United States Patent Application Publication US 2025/0018062 A1 - sequence listing, part 4

SEQ ID NO: 5573 - DNA, 435 bp, synthetic construct
  misc_feature 1..435: note = source = /note="Description of Artificial Sequence: Synthetic coding sequence"
  source 1..435: mol_type = other DNA
atgagcaccgagggtgggggccggcgatgccaggcacaagtaagtagacgaatctcgttctctgccagtcatcgattgtacagtaaattcctgtctgacgaggaaaacctgaaactctttggaaagtgcaataatccaaatgggcacgggcataactataaagtggtcgtgaccgttcatggtgagatagatcctgccacgggaatggtgatgaacttggcagatttgaaaaagtacatggaggaggctattatgcagccactcgatcataaaaatttggacatggatgtaccgtactttgccgatgtggtctcgactaccgaaaatgtggcagtgtatatttgggacaacctgcagaaggtattaccggtcggggtgctttacaaggttaaggtatacgaaaccgacaacaatatagttgtgtataagggagaa

SEQ ID NO: 5574 - DNA, 435 bp, synthetic construct; identical to SEQ ID NO: 5570
  misc_feature 1..435: note = source = /note="Description of Artificial Sequence: Synthetic coding sequence"
  source 1..435: mol_type = other DNA

SEQ ID NO: 5575 - DNA, 435 bp, synthetic construct
  misc_feature 1..435: note = source = /note="Description of Artificial Sequence: Synthetic coding sequence"
  source 1..435: mol_type = other DNA
atgtcaactgagggaggagggcgccgctgtcaggcccaggtgtcaaggagaatctcgttctccgctagccatagactctactccaaatttctgtccgacgaggagaatctgaagctgttcggaaagtgcaataatccaaacggtcacggacacaactataaggtcgtggtcaccgtccacggtgaaattgatccggctaccgggatggtgatgaatctggccgacctgaaaaagtacatggaagaggcaatcatgcaaccgcttgatcataagaatttggacatggatgtgccttactttgcggatgtagtctctaccactgaaaacgtcgctgtgtacatttgggacaacctccagaaagtcctcccagtcggagtgctgtacaaagtcaaagtctacgaaaccgacaacaatatcgtggtctataagggtgag

SEQ ID NO: 5576 - DNA, 435 bp, synthetic construct
  misc_feature 1..435: note = source = /note="Description of Artificial Sequence: Synthetic coding sequence"
  source 1..435: mol_type = other DNA
atgagtacagaaggtggaggcagacgctgccaggcccaagtttccaggagaatctcattttctgctagtcatcggctctattctaagtttctcagcgacgaggagaatttgaagcttttcggaaagtgtaacaacccaaatggacacggtcataactacaaggtcgttgtcaccgtgcatggagaaatcgaccctgctaccggtatggtgatgaacctggcggacttgaaaaaatatatggaagaagccatcatgcagccactggaccacaagaatctcgatatggacgttccttactttgccgacgtcgtgagcactacagaaaacgtcgccgtctacatttgggacaatttgcagaaagtcctccctgtgggggtgctgtataaggtgaaggtgtacgaaacagacaacaatatcgtagtgtacaaaggggaa

SEQ ID NO: 5577 - DNA, 435 bp, synthetic construct
  misc_feature 1..435: note = source = /note="Description of Artificial Sequence: Synthetic coding sequence"
  source 1..435: mol_type = other DNA
atgagcactgagggaggcggtagacgatgtcaagcacaagtctcacgccgcatatctttttcggcctcgcacaggctgtattccaagtttctgagcgacgaagaaaacctgaaactttttgggaaatgtaacaatcctaacgggcacggtcacaattacaaggtggtcgtgaccgtccacggtgaaattgatccagcaaccgggatggtcatgaacttggcagatcttaagaaatacatggaggaagcaatcatgcaacctcttgaccataagaaccttgacatggacgtgccatactttgccgatgtcgtgtcaaccaccgaaaatgtggccgtgtacatttgggataatcttcagaaggtgctccccgtcggcgtgttgtacaaggtgaaagtgtacgaaaccgacaataacattgtggtctacaaaggcgaa

SEQ ID NO: 5578 - DNA, 435 bp, synthetic construct
  misc_feature 1..435: note = source = /note="Description of Artificial Sequence: Synthetic coding sequence"
  source 1..435: mol_type = other DNA
atgagcactgagggcggaggtcgccgctgccaggctcaggtctcacgccgaatcagcttttctgcatctcatcgcctgtactcgaagttcctgtcagacgaggagaacttgaaactctttggtaagtgtaacaatccaaacggtcatggtcataattataaggttgtggtgacggtacatggagagatcgatccagccacggggatggtgatgaacttggctgatctaaagaagtatatggaggaggcaattatgcaaccgttagatcataaaaacttggatatggacgtcccctatttcgcggacgttgtcagtaccacggagaacgtggcggtttatatctgggacaatctccaaaaagttctgcctgttggggtgctatacaaggttaaagtgtacgaaactgacaataacatagtcgtttacaagggggaa

SEQ ID NO: 5579 - DNA, 435 bp, synthetic construct
  misc_feature 1..435: note = source = /note="Description of Artificial Sequence: Synthetic coding sequence"
  source 1..435: mol_type = other DNA
atgagtacggagggcggtggtcgcagatgtcaggcccaggtatcccgacggatctctttttctgcctcccacagactgtactcgaagtttctgagtgatgaagagaacctgaagctcttcggtaaatgcaataaccccaacggtcatggacataattataaggtggtcgtcacggtccacggggagattgatccagctacaggtatggtgatgaatctcgctgacctcaagaaatacatggaagaggccattatgcagcccctggatcacaagaatctagacatggatgtgccttactttgccgatgtggtgtctaccacagagaacgtggcagtatatatctgggacaatcttcaaaaggtgctccccgtgggcgtcctgtacaaagtcaaggtctatgaaacggataataacatcgtggtgtacaagggagag

SEQ ID NO: 5580 - DNA, 435 bp, synthetic construct
  misc_feature 1..435: note = source = /note="Description of Artificial Sequence: Synthetic coding sequence"
  source 1..435: mol_type = other DNA
atgtccacagaaggtggcggccgccgctgccaggctcaggtatctcgacgaataagctttagtgcaagccacagactgtatagcaagttcctgtcagacgaagaaaacctgaagctgtttggcaagtgtaataatcccaacggtcacgggcacaactataaggtggtggtaacggtgcacggggagattgatcctgcgaccggaatggtgatgaatctggccgatcttaagaaatatatggaggaggcgataatgcagccgttggatcataagaatctcgacatggatgtgccatacttcgcagatgtagtgtccacaaccgagaacgtcgctgtttacatttgggataacttgcagaaagtcctcccagtcggagtgttgtataaagtcaaagtctacgaaaccgacaataacatagtggtctacaaaggggaa

SEQ ID NO: 5581 - DNA, 435 bp, synthetic construct
  misc_feature 1..435: note = source = /note="Description of Artificial Sequence: Synthetic coding sequence"
  source 1..435: mol_type = other DNA
atgtctaccgagggagggggcagacggtgtcaagctcaggtctctcgtaggatatcattcagcgcttctcacagattgtactcaaaattccttagtgatgaagagaacttaaagttgttcgggaagtgtaataaccctaatggacacggccataattacaaggttgtggtaactgtccacggcgaaattgatcctgcaaccggcatggtcatgaatctagcagatcttaagaagtacatggaagaggcaataatgcaacccttggatcacaaaaacctcgatatggatgtgccctatttcgctgatgttgtatccaccactgagaacgttgctgtatatatatgggataatctccaaaaggtgcttcccgtaggtgtactctataaagtgaaggtttatgagacggataacaatattgttgtttacaagggagaa

SEQ ID NO: 5582 - DNA, 435 bp, synthetic construct
  misc_feature 1..435: note = source = /note="Description of Artificial Sequence: Synthetic coding sequence"
  source 1..435: mol_type = other DNA
atgtctaccgaagggggcggtaggcgatgccaggcccaagtttctcggcgaatctcattctccgcctcccaccgcttgtacagcaaatttcttagcgatgaagaaaacctgaagttattcgggaaatgcaacaatcctaatggacacggccacaattacaaagtggtggttaccgtgcacggggagattgatcccgcaaccggtatggtcatgaatttggctgacctgaagaaatacatggaggaggccatcatgcagccactggaccacaaaaatttagatatggacgtgccctacttcgccgacgtggtgagcacaactgaaaatgtagcagtgtacatctgggataatttgcagaaagtgctgccggttggggtgctgtacaaagtcaaagtttacgagaccgataacaacatcgtcgtttataaaggagaa

SEQ ID NO: 5583 - DNA, 435 bp, synthetic construct
  misc_feature 1..435: note = source = /note="Description of Artificial Sequence: Synthetic coding sequence"
  source 1..435: mol_type = other DNA
atgtccactgaaggtggtggaaggagatgtcaggcccaggttagccggcgcatatctttttcggcgtcgcatcggctctacagcaagttcctgtcagacgaggagaatcttaaacttttcggtaagtgcaataatcctaacggacacggtcacaactacaaggtcgtcgtgaccgtgcacggagagatcgatccggccaccggaatggttatgaatctggctgacctgaagaaatacatggaagaagctatcatgcaaccactcgaccataaaaaccttgatatggacgtcccgtacttcgccgatgtggtgtccactacggagaacgtagcagtgtacatttgggataacctgcagaaggtgctgcctgtcggggtgctctacaaggtgaaagtgtatgaaaccgacaataacattgtggtgtacaagggggaa

SEQ ID NO: 5584 - DNA, 435 bp, synthetic construct
  misc_feature 1..435: note = source = /note="Description of Artificial Sequence: Synthetic coding sequence"
  source 1..435: mol_type = other DNA
atgagcacagagggaggaggaagaagatgccaggcccaggtgtctagacgcatatcttttagtgcttctcaccggctgtacagcaaatttctgtcagacgaagagaatcttaagctgttcgggaagtgcaataatcctaatggacatgggcacaattacaaggtggtcgtgaccgttcatggggaaattgaccctgcgacagggatggtgatgaatctggcggacttaaagaaatacatggaggaagctataatgcagcctcttgaccacaagaatcttgacatggacgtaccatactttgcggatgttgtctcgaccactgaaaacgtagcagtgtatatctgggacaacctgcagaaagtgctacctgtcggagtgttgtataaggtgaaggtctatgaaactgataacaatatcgtcgtatataagggcgag

SEQ ID NO: 5585 - DNA, 435 bp, synthetic construct
  misc_feature 1..435: note = source = /note="Description of Artificial Sequence: Synthetic coding sequence"
  source 1..435: mol_type = other DNA
atgtcaaccgaaggagggggaaggaggtgtcaggcccaggtgagtcggcggataagtttttctgcttcccaccgactttattcgaaatttctaagcgacgaggagaatctgaagctattcggaaaatgcaacaaccccaatggccacggacacaattataaggtggtggtcactgtgcatggcgaaattgacccagccacaggcatggtaatgaacttggccgatctgaaaaagtacatggaggaggcaattatgcagccattggaccacaagaacctggacatggatgtcccatattttgcagacgtggtgagtaccaccgagaatgttgcagtttacatctgggacaacctgcagaaggtgctcccagtgggagtgctctacaaagtgaaggtctatgagactgataataacatcgtagtgtacaagggcgag

SEQ ID NO: 5586 - DNA, 435 bp, synthetic construct
  misc_feature 1..435: note = source = /note="Description of Artificial Sequence: Synthetic coding sequence"
  source 1..435: mol_type = other DNA
atgagcactgagggcgggggtaggcgctgccaggcccaggtgagccgcaggatctcgttttccgcttcgcacagattgtactcaaagttcctgtcggatgaagaaaacctgaagctgttcggtaagtgtaacaacccaaatgggcacggacataactacaaagtggtcgtgaccgtgcacggcgaaatcgaccccgcgaccggaatggtgatgaacctggccgaccttaagaagtacatggaggaagccatcatgcagccgctcgaccataagaacctggatatggatgtcccttactttgcggacgtcgtatccactaccgaaaatgtggcagtctacatttgggacaatctgcaaaaagtccttcccgtcggcgtcctctacaaagtcaaagtctacgaaactgataacaacatcgtggtctacaaaggggaa

SEQ ID NO: 5587 - DNA, 435 bp, synthetic construct
  misc_feature 1..435: note = source = /note="Description of Artificial Sequence: Synthetic coding sequence"
  source 1..435: mol_type = other DNA
atgagtaccgaggggggcggccggaggtgtcaagctcaggtgtcacgccgcatcagcttcagcgcgagtcaccgcctctattctaaattcctgagcgatgaggagaacctcaaactctttgggaagtgtaataaccccaatggtcacggacataattacaaagtcgtggtaaccgttcatggcgagatagatccagctacaggcatggttatgaatcttgcagatctaaagaaatacatggaagaggcaatcatgcaacctctagatcataagaatctggatatggacgtgccgtatttcgccgatgtagtcagtactaccgaaaatgtggcagtgtacatctgggacaacctgcagaaggtattgccagtcggcgtcctttataaggtcaaagtgtacgaaaccgataataatatcgtcgtctataagggtgaa

SEQ ID NO: 5588 - DNA, 435 bp, synthetic construct
  misc_feature 1..435: note = source = /note="Description of Artificial Sequence: Synthetic coding sequence"
  source 1..435: mol_type = other DNA
atgtcgactgagggaggcggccgacgttgtcaggcccaggtgtcgaggcggatcagcttctccgcttcgcatcgcctctactcaaagtttctctcagatgaagagaatctgaagctgttcggaaagtgcaacaacccaaatgggcatggacacaattacaaggtggtggtgaccgtccacggagagatcgatccggccaccggtatggtgatgaatttggcggacttgaagaaatacatggaggaagcgataatgcagcctctcgatcacaaaaatctggacatggatgttccatacttcgccgatgtagtctccacgaccgaaaacgtcgcagtgtacatttgggacaaccttcaaaaagtgctcccggttggggtcctgtacaaggtgaaagtctacgaaactgacaacaacatcgtggtgtataagggtgaa

SEQ ID NO: 5589 - DNA, 435 bp, synthetic construct
  misc_feature 1..435: note = source = /note="Description of Artificial Sequence: Synthetic coding sequence"
  source 1..435: mol_type = other DNA
atgtctaccgaaggcggtgggagacgatgtcaggctcaagtgtccagacgcattagcttttcagcatctcacaggctgtactcaaaattcctcagcgatgaagaaaacctcaagctgtttgggaagtgcaacaacccgaatggacatggacataactacaaggtggtcgtgaccgtgcacggagaaatagatcctgccactggtatggtcatgaatctggcggacttgaaaaagtacatggaagaagccatcatgcaacccctcgaccataagaacttggacatggacgtcccatactttgctgacgtggtgagcactactgagaacgtggccgtgtacatttgggacaaccttcaaaaggtgctgcccgtgggagtcctttacaaagtgaaggtctacgagactgataacaacatcgtggtgtataagggcgaa

SEQ ID NO: 5590 - DNA, 435 bp, synthetic construct
  misc_feature 1..435: note = source = /note="Description of Artificial Sequence: Synthetic coding sequence"
  source 1..435: mol_type = other DNA
atgtcaacggagggcgggggccggagatgtcaagcccaagtgtcccgccgcatttcatttagcgcgagccaccgactatactctaaattcctctcggacgaggagaatctgaagctctttgggaagtgcaataacccaaacggacacggtcacaactataaagttgttgtcacagttcatggcgaaatagatcctgctacaggcatggttatgaatttggccgatctaaagaagtatatggaggaggctataatgcagccactcgaccacaagaatcttgatatggatgtgccatacttcgccgacgtcgtgtccaccactgagaatgtcgcggtctacatctgggacaacctgcaaaaggtgttgcctgtgggagtactatataaagtcaaagtgtatgagaccgacaataacatcgtagtctacaagggggaa

SEQ ID NO: 5591 - DNA, 435 bp, synthetic construct
  misc_feature 1..435: note = source = /note="Description of Artificial Sequence: Synthetic coding sequence"
  source 1..435: mol_type = other DNA
atgtcaactgaaggcggaggacgcagatgtcaggcacaggtgtcacgccggatctcgttcagcgcctcccacaggctgtactcgaagttcctgtccgatgaagagaatctgaaactgtttggtaagtgcaacaatccgaacggacacggacataactacaaagtcgtcgtgactgtgcacggggaaattgaccctgcgaccggcatggtcatgaacctcgcggacctcaagaagtacatggaggaggctatcatgcagccgctggatcataagaatcttgatatggacgtgccctacttcgccgatgtggtgagcacgaccgagaacgtcgccgtttacatctgggacaacctccaaaaggtgttgccagtgggagtgctgtacaaggtcaaagtgtatgaaaccgacaataacatcgtcgtgtacaagggcgaa

SEQ ID NO: 5592 - DNA, 435 bp, synthetic construct
  misc_feature 1..435: note = source = /note="Description of Artificial Sequence: Synthetic coding sequence"
  source 1..435: mol_type = other DNA
atgagtacagaggggggagggcggagatgtcaggcacaggtatctagacgcatatcattctccgcctcccatcgactctatagtaaatttctctctgacgaagagaacctcaagctctttgggaaatgcaacaatcctaatggacatgggcataactacaaggtggttgtgacagtgcatggggagattgatcctgcaacaggaatggtaatgaatcttgcagatctaaaaaagtatatggaagaggcaataatgcagccacttgaccataagaaccttgatatggatgtgccatactttgctgacgtggtgagtactacagaaaatgtcgctgtgtatatatgggataatctgcagaaagtgcttcctgtgggagtgctgtataaagttaaagtttatgagactgataacaacatcgtagtctataagggggaa

SEQ ID NO: 5593 - DNA, 435 bp, synthetic construct
  misc_feature 1..435: note = source = /note="Description of Artificial Sequence: Synthetic coding sequence"
  source 1..435: mol_type = other DNA
atgagcacggaaggtgggggcaggcgttgtcaagctcaggtctctaggagaattagtttcagcgcatctcaccggctgtattccaagttcttatccgatgaggaaaatctgaaactctttgggaagtgcaacaaccctaacgggcacgggcataactacaaggtggtcgtgaccgttcacggggagattgatcctgctaccgggatggttatgaacctggcagatttgaagaagtacatggaagaagccataatgcagccactagaccacaagaatctggacatggacgtcccatatttcgccgatgtcgtgagcacgaccgaaaacgtggccgtgtacatctgggacaatctgcaaaaagtgctccctgtgggagtgctctataaggtcaaagtgtacgaaaccgataacaacatcgtagtttacaaaggcgag

SEQ ID NO: 5594 - DNA, 435 bp, synthetic construct
  misc_feature 1..435: note = source = /note="Description of Artificial Sequence: Synthetic coding sequence"
  source 1..435: mol_type = other DNA
atgagcactgaaggcggtgggcgccggtgtcaagcccaagtctctaggaggatctcattctcggcatcgcatcgcctctattccaagttcctgtcagatgaggaaaacctgaaactctttgggaagtgcaataacccaaacggtcatgggcataactacaaagtcgttgtaacggtccacggggaaatcgatccggctactggcatggtgatgaatctggcagacctgaagaaatacatggaggaagccattatgcagccgctggaccacaaaaatctcgacatggacgtcccatacttcgcggatgtcgtcagcaccaccgagaatgtggcggtgtacatctgggataatcttcagaaagtcctcccggtcggagtactctacaaggtgaaggtgtatgagactgacaacaatatcgtggtgtacaagggagag

SEQ ID NO: 5595 - DNA, 435 bp, synthetic construct
  misc_feature 1..435: note = source = /note="Description of Artificial Sequence: Synthetic coding sequence"
  source 1..435: mol_type = other DNA
atgagcacggagggcggcggccggaggtgtcaggcccaggtgagcaggagaatttcctttagcgcttcgcaccgtctgtactcaaaattcctctctgacgaggagaatcttaagctgttcggaaaatgcaacaaccccaacggtcatggacacaattacaaggtcgtggtgacagtacacggcgaaatcgaccctgctaccggcatggtcatgaatctcgccgatttaaaaaagtacatggaggaagctataatgcaacctctggatcacaagaacctcgatatggacgttccgtacttcgcagatgttgtgtcgactaccgaaaacgtggccgtctatatttgggacaatctgcagaaggttctcccagtcggtgtcctgtataaggtcaaggtgtacgaaaccgataataacattgtggtgtataaaggtgaa

SEQ ID NO: 5596 - DNA, 435 bp, synthetic construct
  misc_feature 1..435: note = source = /note="Description of Artificial Sequence: Synthetic coding sequence"
  source 1..435: mol_type = other DNA
atgtcgactgagggaggaggacgcaggtgccaggctcaagtcagcaggcggatctcattcagcgcaagccaccgcctgtacagcaaattcctgagcgacgaagagaacttgaagctgttcggaaagtgcaataacccaaacggccatggccacaactacaaagtcgttgtgaccgtgcacggagaaatcgatccagccactggaatggtgatgaacctcgcggacctgaagaaatacatggaggaagcgattatgcagccgctcgatcataagaatctggacatggacgtgccctactttgccgatgtcgtgtcgacgacggaaaatgtggcagtctacatctgggacaacctccagaaagtgctgccggttggggtgctgtacaaagtgaaagtgtatgaaaccgacaataacatagtcgtgtacaagggagag

SEQ ID NO: 5597 - DNA, 435 bp, synthetic construct
  misc_feature 1..435: note = source = /note="Description of Artificial Sequence: Synthetic coding sequence"
  source 1..435: mol_type = other DNA
atgtcaaccgaaggaggcggaaggagatgtcaagcccaagtctcgcggagaatcagcttctcagcatcccaccggctctacagcaaatttctctcagacgaagaaaacctgaagctcttcggtaagtgtaacaacccaaatggacacggacataactacaaggtcgtggtgactgtgcacggtgaaatcgacccggccacggggatggtcatgaacctggccgacctgaagaaatacatggaggaagccattatgcaacctctggatcacaagaacctggacatggacgtgccatacttcgcagatgtagtgtccaccaccgagaatgtggcggtgtacatctgggacaacctgcagaaggtgctgccagtgggagtgctctataaggtgaaagtgtacgagactgataacaatatcgttgtgtacaaaggagaa

SEQ ID NO: 5598 - DNA, 435 bp, synthetic construct
  misc_feature 1..435: note = source = /note="Description of Artificial Sequence: Synthetic coding sequence"
  source 1..435: mol_type = other DNA
atgtccacggaaggcggaggtcgccggtgccaggcgcaggttagccgccgcatcagcttctctgcctcacaccgcttgtactccaagtttttgtccgacgaggagaacctcaagctgttcggcaagtgtaataacccaaacggacatggtcacaactacaaggtcgtagtcaccgtccatggtgagatcgacccggccaccggcatggtcatgaatctggctgatctgaagaagtatatggaggaggctataatgcaacctctggatcacaagaacttagatatggacgtaccctactttgcggacgtcgtcagcacaaccgagaacgtcgccgtgtacatctgggataacctgcaaaaggtcctgcccgtcggagtgttatataaggtcaaggtttatgagacggataacaacatcgtcgtttataagggcgag

SEQ ID NO: 5599 - DNA, 435 bp, synthetic construct
  misc_feature 1..435: note = source = /note="Description of Artificial Sequence: Synthetic coding sequence"
  source 1..435: mol_type = other DNA
atgtcgacggaaggtggtggacggcggtgccaggctcaagtcagcagacggatatcgttctcggcatcccacagactctattcaaagttcctctccgatgaagagaacctgaagttgtttggcaagtgcaataatccaaacggtcatggacacaactacaaggtggtcgtgaccgtgcacggggagattgatcccgcaactggaatggtcatgaacctcgcagatctgaagaagtacatggaagaagcaattatgcagcccctcgatcataagaatcttgatatggatgttccatactttgcagatgtggtgtcgaccactgagaatgttgcggtctatatctgggacaacctgcagaaagtcctgccggtgggagtgctctacaaagtcaaggtgtacgaaaccgacaacaatattgtcgtgtacaagggagag

SEQ ID NO: 5600 - DNA, 435 bp, synthetic construct
  misc_feature 1..435: note = source = /note="Description of Artificial Sequence: Synthetic coding sequence"
  source 1..435: mol_type = other DNA
atgtcaactgagggcggcgggcgacgctgccaagctcaggtatcacggcgtatatcttttagcgccagccacaggctgtattccaagttcctttctgacgaagaaaatttgaagctttttgggaaatgtaacaaccccaatgggcacggacataattacaaggtagtcgtgacagtgcatggagagatcgaccccgcgacgggaatggtgatgaacctagccgatctgaaaaagtacatggaggaggcaataatgcagccactggaccataagaatctggacatggacgtgccctacttcgctgacgtggtgtcaacaacggagaatgtggcggtttatatctgggacaacctgcagaaagtgctacctgttggagtgctctacaaggtcaaggtttacgaaaccgataataatattgttgtgtataagggggag

SEQ ID NO: 5601 - DNA, 435 bp, synthetic construct
  misc_feature 1..435: note = source = /note="Description of Artificial Sequence: Synthetic coding sequence"
  source 1..435: mol_type = other DNA
atgtcgactgagggaggaggaaggcgttgtcaggctcaagttagccgacgaatttctttcagcgcgtcgcatagattatactccaagttcctttctgatgaagagaatctaaaactctttggaaaatgtaataacccaaatggtcacggacacaattacaaggtcgtcgtgacagttcacggagaaatagatccagcgactggaatggtcatgaatctcgcagatctgaagaaatacatggaggaggctatcatgcaacctcttgatcacaaaaacctggatatggatgtgccgtactttgctgatgtagttagcacaacagaaaacgttgcagtgtatatttgggataacctacaaaaagttcttccagttggggttctctataaagtcaaagtttatgagacggacaataacattgttgtctataaaggtgag

SEQ ID NO: 5602 - DNA, 435 bp, synthetic construct
  misc_feature 1..435: note = source = /note="Description of Artificial Sequence: Synthetic coding sequence"
  source 1..435: mol_type = other DNA
atgtccactgagggaggggggaggagatgtcaagcgcaggtttcgcggcgcatctccttcagcgcatcccatcgtctgtactcaaagttcctgtcggatgaggagaacttgaaactttttgggaagtgcaacaatccaaacggacatggccacaactataaggtggtggtgaccgtccacggagagatcgaccccgccactggaatggtgatgaatttggccgatctgaagaagtacatggaagaagccatcatgcagccgcttgaccacaaaaacctggacatggacgtcccgtacttcgctgacgtcgtgtcaactaccgaaaatgtggcggtctacatttgggataatctgcagaaggtgctcccggtgggtgtgctctacaaagtcaaggtgtacgaaaccgataacaacatagttgtgtacaagggagaa

SEQ ID NO: 5603 - DNA, 435 bp, synthetic construct
  misc_feature 1..435: note = source = /note="Description of Artificial Sequence: Synthetic coding sequence"
  source 1..435: mol_type = other DNA
atgtcgaccgaaggaggaggccggcgatgccaggcacaagtcagtagaagaatctcgtttagcgcatcacaccgcttgtactccaagtttctgtccgatgaggaaaatctgaaactcttcgggaagtgtaataaccccaatggtcacggacataactataaagtcgtcgtgaccgtgcatggtgaaatcgaccctgccaccggcatggtgatgaacctggccgatcttaagaagtacatggaagaagctattatgcagccactggatcataagaacctggatatggacgtgccttacttcgcagatgtcgtgagcactacggaaaacgtggcagtctacatctgggataacctccaaaaggtcctccctgtgggcgtattgtacaaggttaaggtatatgagactgacaataacatagttgtgtacaaaggagag

SEQ ID NO: 5604 - DNA, 435 bp, synthetic construct
  misc_feature 1..435: note = source = /note="Description of Artificial Sequence: Synthetic coding sequence"
  source 1..435: mol_type = other DNA
atgtccaccgaggggggaggacgaagatgccaggcgcaggttagcaggagaatcagtttctccgcatcccatcgcctctactctaagttcctgtctgatgaggagaatctcaaactcttcggcaagtgcaataaccccaatgggcacggacacaactacaaggtggtggtgacagtccatggagaaatcgatcctgctactggcatggtgatgaatttggctgacctgaagaagtacatggaggaagcaataatgcaacccttagaccataagaatctggacatggacgtaccttacttcgcagacgttgtgagtaccacagagaatgtcgctgtttacatttgggataacttacaaaaggtccttcctgtaggcgttctctataaggtgaaggtgtatgagacagataacaatatcgtggtgtataagggggag

SEQ ID NO: 5605 - DNA, 435 bp, synthetic construct
  misc_feature 1..435: note = source = /note="Description of Artificial Sequence: Synthetic coding sequence"
  source 1..435: mol_type = other DNA
atgtcaactgagggtggaggtcgcagatgccaagcgcaggtgtctcgaagaatatctttcagcgccagtcatcgtctgtatagcaaatttctgagcgatgaagaaaatctgaagcttttcggaaagtgcaacaatccgaacggacatgggcacaactacaaggtagtggtgacagtgcacggtgaaatcgacccggcgacgggcatggtcatgaatctcgcagatcttaagaagtacatggaggaggctatcatgcagccgcttgaccataagaatctggacatggatgtgccgtattttgctgatgtagtgagcaccaccgagaatgtagccgtttatatatgggataacctacagaaagtcctccccgttggggttctgtataaggtcaaagtctatgagacagacaataatatcgttgtgtacaaaggggag

SEQ ID NO: 5606 - DNA, 435 bp, synthetic construct
  misc_feature 1..435: note = source = /note="Description of Artificial Sequence: Synthetic coding sequence"
  source 1..435: mol_type = other DNA
atgagcactgaaggcggaggcaggcgctgtcaggcccaagtctcccggaggatctcgttctccgcctctcaccggctgtactcaaagttcctgtccgatgaggagaacctcaaattgtttggtaaatgcaataaccccaatggtcatggacacaactacaaggtggtcgttaccgtgcatggggaaattgacccagcgactggaatggtgatgaacttggccgatctgaagaagtacatggaggaggcgatcatgcagccgctggaccataagaatctggatatggatgtgccgtacttcgctgacgtcgtttccacgaccgaaaacgtggcagtgtacatctgggacaacctccagaaagtcctcccggttggtgtgctttacaaagtgaaggtctacgaaactgacaataacattgtggtgtacaagggcgaa

SEQ ID NO: 5607 - DNA, 4281 bp, synthetic construct
  misc_feature 1..4281: note = source = /note="Description of Artificial Sequence: Synthetic coding sequence"
  source 1..4281: mol_type = other DNA
atgcaccagcggcatccgcgggcacggtgtccaccgctctgcgtggcaggaatccttgcttgcgggtttctcctcggatgctgggggccgtcgcatttccaacaatcatgcctgcaggcgctggaaccacaggctgtatcttcctacttgagccctggagccccgctgaaaggacggccaccctcgccaggattccaacgccagcgccagaggcagcgccgcgccgcgggcggaatcctgcacctggagctgctggttgcagtcggacctgacgttttccaggcccatcaggaggacactgaacgctacgtgcttacgaacctgaatatcggggcggagctcctgcgcgacccgtcgctgggtgcgcagtttcgcgtccatctggtgaagatggttatcctcactgaaccagaaggagcaccaaacatcactgctaatctgacctcaagcctcctgagcgtgtgcgggtggagccaaactatcaacccggaggatgataccgaccctggccacgcagacctggtgctgtacatcacccggttcgacctggagctcccagatggaaaccgccaggtacgcggagtgacccagctgggaggggcatgctctccgacctggtcgtgtctgatcacggaagataccggtttcgacctgggcgtcactatcgcacatgagatcggacactccttcggactggaacatgacggagcccccggatcaggatgtgggccttccggacacgtcatggcctccgatggcgcggcaccccgggcaggactcgcatggtcgccttgctcgcgacgccagctcctgagcttgctgtcggccgggcgggcacgctgtgtgtgggacccaccgcggccacaacccggctcggcaggccaccccccagatgcgcagcccggactctattacagcgccaacgaacaatgtcgcgtggccttcggaccgaaagcagtggcttgtaccttcgctagggagcaccttgatatgtgccaagccctgagctgccacaccgatcctctggaccagtcatcctgctcgcggcttctggtgccgctgctggacggcaccgagtgtggtgtggaaaagtggtgctccaagggacgctgccggagcctggtcgaactcaccccgatagctgccgtgcacgggaggtggagttcctggggccctcgctcaccgtgcagccgctcctgcggaggcggcgtcgtaacccggcgtcgccagtgcaacaatcctcgcccagctttcggaggacgggcctgcgtgggagcagacctgcaggccgaaatgtgcaatactcaagcctgtgaaaagactcagctggaattcatgtcacaacaatgtgcaagaactgatggtcaacctttgagatcgtcccccggcggcgcatcattctaccactggggtgccgcggtgccacatagccagggagacgcgctctgcaggcacatgtgtagggcgattggagaatcgttcatcatgaaaagaggggactcgtttctggacggcactcgctgcatgccttccgggccacgagaggacggaactctgtccctgtgcgtcagcggctcctgcagaaccttcggatgcgacggacgcatggactcccagcaagtgtgggatcggtgccaggtgtgcggaggggataatagtacctgctcgccgaggaaggggtctttcactgcaggtagagccagggagtacgtcacgtttctgaccgttacgccaaacctgacttcagtgtacatcgccaaccacaggccgttgtttactcatctggccgtgagaatcggtgggcgctacgtggtggcgggcaagatgtctatttccccgaacactacctacccctccctgctcgaggacggcagagtcgaataccgcgtggcacttacggaggaccgtttgcccagactcgaagagatccggatttggggaccgctgcaggaggacgcggatatccaggtgtaccgcaggtacggagaagagtacggaaatcttacccggcctgacattacgttcacttacttccagcccaagccgcgccaggcctgggtgtgggcggctgtgcggggcccgtgttccgtgtcatgtggagccgggctccgctgggtgaactattcctgcctggaccaggcccgcaaggagttggtcgagacggtgcaatgccaggggtcccagcagccaccggcgtggccggaagcgtgcgtccttgaaccttgcccaccatactgggctgttggagacttcggcccgtgctcggccagctgcggtgggggactgcgcgaacggccagttagatgcgtggaggcgcaaggctcccttctcaaaaccctgccgccggcccggtgtcgggcgggtgctcagcagccggccgtggcacttgaaacttgcaacccgcagccgtgcccggccaggtgggaagtgtccgagccatcatcgtgcacttccgcaggaggggctggattggcgctggaaaacgaaacctgcgtgccaggagcggatggactcgaagcgccggttaccgaaggcccaggcagcgtcgatgagaagctcccagccccagaaccttgcgtgggaatgtcatgtccacccggctggggacacctggatgcgacttcagcgggagagaaggccccatcaccatggggaagcatcagaacgggtgcacaggccgcacacgtctggaccccagccgccgggtcctgttccgtgtcgtgcggcaggggattgatggagctcaggttcctgtgcatggattcagccctgagagtgccagtgcaagaagaactgtgtgggcttgccagcaagccggggtcccggagggaagtctgccaagccgtcccgtgccctgcccgttggcagtataagttggcggcatgttcggtgtcctgtggacgaggagtggtccggagaatcctctactgcgcacgggcccatggagaggatgatggtgaggagattttgctggacacccagtgccagggactcccgcggcctgagccgcaagaagcctgctcactcgagccttgtccgcctcgatggaaggtgatgtcactcggtccgtgttcggcttcatgcggactcggcaccgccagacggagcgtcgcatgtgtgcagctcgaccagggccaggatgtagaagtcgacgaagctgcgtgcgccgccctggtgcgcccggaagcctccgtgccatgccttatcgcggattgcacctaccggtggcacgttggaacctggatggaatgctccgtgagctgcggcgacggtatccaacggcgaagagatacctgcctgggccctcaggcgcaggctccggtccctgcagacttttgccaacacctcccgaagccggtgaccgtgcgcggatgctgggcgggcccgtgtgtaggacaagggaccccctctctggtgccgcatgaggaggctgcagcaccggggagaactactgcgactcctgcgggggcatcgctcgaatggagccaggcgagagggctgctgttttccccggctccgcaacctcggcgcttgctccctggtccccaggaaaattctgtgcaatcatcggcgtgtgggagacagcaccttgagcccaccggcactattgatatgaggggaccgggccaagccgactgcgcggtggctatcgggcggccactgggagaagtggtgactctcagagtgctggaatcatccttgaactgttcggccggcgacatgctgctgttgtggggacggttgacctggagaaagatgtgcagaaaacttctggatatgaccttttcgtcgaaaacgaatactcttgtcgtccgccagcgctgcggacgccccggtggtggcgtcctgcttcgctacggatcgcagttggccccggaaactttttacagggagtgcgacatgcaattgttcggtccctggggggaaatcgtgtcgccctccctttccccggcgacgagcaacgccggcggatgccgcctgttcatcaacgttgcaccgcatgcccgcatcgcgatccacgccctcgcaaccaatatgggagccggaacggaaggagccaacgcctcatacatcctgatacgagacacccacagtctccgcactactgcgttccatggtcaacaagtgctgtactgggaatcggaaagctcgcaagcagaaatggagttttccgagggcttcctgaaagcacaagcctctctccggggccagtactggaccctgcagagctgggtgccagagatgcaagatccccagtcctggaagggaaaggaaggcacc

SEQ ID NO: 5608 - DNA, 4281 bp, synthetic construct
  misc_feature 1..4281: note = source = /note="Description of Artificial Sequence: Synthetic coding sequence"
  source 1..4281: mol_type = other DNA
atgcaccagcgacacccacgggcccgctgtcctcctctgtgtgtggctggtatactggcatgcggctttctcctgggatgttggggaccaagccacttccaacaatcctgcctgcaagcgctggagcctcaggcggtatcctcttacctttccccgggagcccccctcaagggccggccaccttcacctggatttcaaagacaaagacagcggcagcggcgcgcggcaggcggaatcctccatctcgagctgttggtggcagtgggtcccgacgtgtttcaagcccaccaagaagataccgaacgatatgtccttactaacttgaatatcggcgcggagcttctccgagatccgtcccttggagcacaatttagagtgcatctcgtgaagatggttattctgaccgaaccagagggggcacccaacatcaccgcaaaccttacctcgtcacttcttagtgtgtgcggatggtcccaaactatcaatccagaggatgacaccgaccccggacacgcagatctggttctgtacattaccaggtttgatctggaactgccagatggaaacagacaggtccgcggggtgacccagcttgggggagcctgttcgcccacttggagctgtcttatcactgaagataccggttttgatcttggagtgacgatcgcacacgaaataggccatagctttgggcttgagcacgacggcgcacctggcagcggttgtggtcctagcggtcatgtcatggcgtcggacggggcagcacctagagcaggtcttgcatggtccccatgttccagacgtcaactgctgtccctgctgtccgctggtcgagcacggtgtgtctgggatccaccaaggcctcagcctggaagcgcaggtcacccacccgatgcccaacctgggctgtactacagcgcaaatgaacagtgtagagtggctttcggacctaaggctgtcgcttgtaccttcgcccgagaacatcttgatatgtgccaagcactgagctgtcatacggatcccttggatcaatcatcctgttccagactcctggtgcctctgctggatggcacggaatgtggagtggagaaatggtgttcaaaaggaagatgcagatcccttgtcgagctgacccctatcgcagccgtgcatggcagatggtcatcctggggacccaggagcccttgctcgcgctcatgtggtgggggcgtggtcacccggcggagacaatgcaataatcctcggcctgcctttggaggaagggcgtgtgtgggcgcagatcttcaagcagaaatgtgtaacactcaagcatgtgaaaaaactcaacttgaattcatgagccaacagtgcgctcggaccgatggacaacctcttagatcctccccaggtggagcctcattttaccattggggtgcagcagtccctcattcgcagggagacgccctgtgtagacatatgtgtagagcaataggtgagtctttcataatgaagagaggtgattcctttctggatggcacccgttgcatgccatcggggccgagagaagatggaaccctttcgctgtgcgtcagcggaagctgcaggacttttggctgcgatggtagaatggattcacagcaggtgtgggatcgttgccaggtgtgtgggggtgataacagcacttgtagcccacggaagggatcattcaccgccggccgagcacgagaatacgtgactttcctcaccgtgaccccgaacctgacttccgtgtacatcgccaaccacagacctctctttactcacttggcagtgagaattggaggtaggtacgtggtcgcaggtaagatgtcgatttcccctaacactacttacccatcacttctcgaagatggaagggtcgaataccgcgtcgctctgacggaggaccggcttcccagactggaggaaatcaggatctggggtccactccaagaagatgcggatatccaagtctacagacggtacggtgaggaatacggaaacctgacccggcctgacattaccttcacttacttccaacccaaacctaggcaagcatgggtgtgggcagcggtgcggggaccatgtagtgtgtcctgtggtgctggcctgagatgggtcaattactcatgcctggatcaagcgcgcaaggaactggtcgaaaccgtgcaatgtcaaggttctcaacaaccgcccgcttggccggaagcgtgtgtgctcgaaccttgtcccccctactgggcagtgggtgattttggaccctgttccgctagctgtggcggtggtctgagggaacgccctgtccggtgtgtggaggcacaagggtcacttctgaaaacgctcccccctgcacgatgtcgtgcaggggcgcagcaaccagcagttgcacttgagacttgtaatccacagccatgtcctgcaagatgggaggtgtcagagccatcgtcgtgtacttccgcaggtggtgcaggtctggctctggaaaacgagacgtgtgtccccggtgcggacggtctggaggcaccggttactgaagggccgggatcggtggatgaaaaactgccagcgccagagccttgcgttggaatgtcctgtcctcccggatggggacatcttgatgccacgtcggcaggtgaaaaagccccctctccctggggctccatccgaaccggtgcacaggcagcgcatgtgtggacccctgcagctgggtcatgttccgtctcatgtggacgaggactgatggaactgcgttttctttgtatggattctgctcttcgggtcccagtgcaagaagaactgtgtgggctggcatcgaagccaggttcacggagggaggtgtgtcaagcagtcccctgccctgcacggtggcagtacaagttggcagcctgtagcgtctcgtgtgggagaggagtggtgaggcggattctttactgtgcaagggcgcatggagaggatgatggagaagagatccttttggatacccagtgccagggtctgccgcggcctgaacctcaagaagcgtgctcgctggaaccatgccctcccagatggaaggtgatgtcgctgggtccctgttcagcgagctgcggtctgggaacggcacgcagatcggtggcatgtgttcagctggatcaaggacaagatgtcgaggtggatgaagcggcatgcgccgccctcgtcagaccggaggcgtcagtgccatgcctgatcgccgattgcacctaccgctggcacgtgggaacttggatggaatgttcggtgtcatgtggagatggcatccaacgccgtcgggacacttgcctcgggccacaggcacaagcgcctgtgcctgcagacttctgtcaacatctccctaagccagtgactgtccggggctgctgggcgggcccttgtgtgggacagggtactccgagcttggtgcctcacgaagaagcagcagcgcctggtcgtactacggcaaccccagcgggagcgagcctggaatggtcacaggcacgaggcctgctgtttagcccagcacctcaaccacgtaggctgctccctgggccacaagaaaatagcgtgcaatcgtcagcgtgtgggaggcagcatcttgaacctaccgggactattgacatgcgcggaccaggtcaagcagattgtgctgtcgcgattgggaggccactgggtgaagtggtgacgctccgcgtgcttgaatcgtcacttaactgttccgcgggcgacatgctgctgctctggggacgcctgacctggaggaaaatgtgtagaaaacttttggatatgaccttttcaagcaagactaacaccctcgtggtgagacaacgatgcgggcgcccagggggtggagtgctgttgcgttacggcagccaactggccccggagactttttaccgcgagtgcgatatgcagctttttggaccttggggcgaaattgtttctccctcactgagtcctgcaacttcgaatgcaggcgggtgcagattgttcatcaacgtcgcaccacatgcccgtatcgcaattcatgcactggctaccaacatgggcgcgggcactgaaggggccaacgcatcgtacatacttatacgcgacacccacagcctccggactactgcatttcatggacagcaggtgctgtactgggaatcggaatcaagccaggcggaaatggaattttcggagggcttcctcaaggcacaggcctccctgcgcggtcagtactggaccctgcagtcatgggtgccagagatgcaggaccctcaatcgtggaaggggaaggaagggacc

SEQ ID NO: 5609 - DNA, 4281 bp, synthetic construct
  misc_feature 1..4281: note = source = /note="Description of Artificial Sequence: Synthetic coding sequence"
  source 1..4281: mol_type = other DNA
atgcaccaacgccacccacgcgcacggtgtccgccactgtgtgttgcaggaatcctcgcctgtggctttctgctgggttgttgggggccatcgcacttccagcagtcctgccttcaagcattggaaccccaggccgtgtcgagctacctgagccccggtgcgccgctgaagggtcgcccgccgtcaccgggtttccagcgtcaacgacagcggcagaggagggccgctggggggatactacatctggaactgctggtcgctgttggacccgatgtgttccaggcccaccaggaggacaccgagcgctacgtcctcaccaatctgaatattggggccgaactgctgcgggacccttcccttggggcacagttccgggtgcacctggtgaagatggttatactcacggagccggagggggctccaaacatcaccgccaacctgacatctagccttctatcagtgtgtggatggagccagacgattaaccctgaagacgatacagatccgggacacgccgatctcgtcctgtacattacccgcttcgatctagaactgccagatgggaatagacaggttagaggggtgacccagctaggaggtgcctgcagtcctacctggagctgtctcatcaccgaggatactggctttgacctaggagttaccatcgctcatgaaattggacatagctttggccttgagcacgacggagcaccgggatcaggctgtggaccctccggtcatgtgatggccagcgacggtgcggccccacgagccgggctcgcctggagtccatgctctcgtcgccagctcctatcactgttgagcgcgggtagggcccggtgcgtttgggacccacccagaccacagcccggatctgccgggcaccctccggacgcacagcccgggctctactactctgctaatgaacagtgcagggtggcatttgggcctaaggccgttgcctgtacattcgccagggagcatctcgatatgtgccaggcactctcctgccacacagatccattggaccagtcctcctgcagcagactcctggtacccctgcttgatggaacagaatgcggcgtggagaagtggtgctccaaaggcaggtgtaggtcactggtggagctcactcctatcgcggcagtgcacgggagatggagctcatggggcccgcggtccccatgctctcgctcttgcggaggaggggtcgtgacacgtcgacgtcagtgcaataacccccgtcctgcctttggggggcgagcttgcgttggggctgacctccaggccgagatgtgcaacacgcaggcctgcgagaagactcagctggagtttatgtcgcaacaatgtgcaagaacagacggtcagccgttgagatcctcgccaggaggggcgtcgttttatcattggggggccgccgtgccacattctcagggagacgccttatgtaggcatatgtgtcgggccataggggagtcattcataatgaagcggggagatagtttcctagacggcactcggtgcatgccgtccggcccaagggaggacggcacgctaagtctgtgcgtgtcaggctcttgccgaaccttcgggtgcgatgggcgcatggatagccaacaagtgtgggatcgctgccaggtgtgcggtggcgacaactccacctgtagtcctcgtaagggctcgtttacagccggacgagcccgggagtatgttaccttcttgaccgttactcccaatttgacttctgtgtacattgctaatcaccgtcctctgttcacccacctggcagtgcggatcggtgggcggtacgtcgtggcaggaaagatgtctatcagccctaacactacatatccgtccctcctcgaagacgggcgcgtagagtaccgggtagctctgacagaagatcgtctgccaagactggaagagatacgcatatgggggcctttacaggaggatgctgacatacaggtgtatcgaagatatggggaggaatacggcaacttgacacgccctgacatcaccttcacttattttcagccgaagcctcggcaggcttgggtctgggctgccgtgagggggccatgctccgttagctgcggcgctgggctgagatgggtcaattacagttgtttggaccaagccagaaaggagctggtcgagaccgttcagtgccagggcagccagcaacctcctgcctggcccgaggcgtgtgttctggagccatgccccccttattgggccgtaggggacttcggaccctgcagcgccagctgtggaggtggacttcgcgagagacccgtgcggtgtgttgaagcccaggggtcactgttaaagacactacctccagctagatgccgcgctggagcccagcagcccgctgtcgccctcgagacctgtaatccccagccttgcccagctcggtgggaagtgtcagagccctcatcttgcacttctgccggcggggcaggtctcgctctggagaacgaaacttgcgtccctggggcggatggtctggaggctcctgtaactgaggggccaggctcagtggatgagaaactccccgcacccgagccatgcgttgggatgtcatgtccaccggggtgggggcaccttgacgccactagtgcaggggagaaggccccctccccctggggaagcatacgcaccggggctcaggctgcgcatgtgtggactcccgccgctggcagttgctccgtttcatgcggccgaggtcttatggagctccggttcctgtgcatggactccgcactcagagtcccggtacaggaagaactgtgcgggctagccagtaagcctgggagcagaagagaagtgtgtcaagccgttccatgcccagccaggtggcagtacaaactggctgcatgctcagtgtcttgtgggcgcggcgtagtccggcgcattctctactgtgctcgagcccatggggaggacgacggcgaggaaatactgctggacacacagtgccagggactgccgcgccctgaaccccaggaagcgtgttcgctagaaccttgtcctccaagatggaaggtcatgagcttgggaccatgttccgctagctgcgggctaggtaccgcacgaagatcagtcgcatgcgtgcagctggatcaaggacaggacgttgaggtcgatgaggctgcctgcgcggccctagtccgccctgaagctagcgtcccctgtctgattgccgattgcacctacaggtggcacgtggggacatggatggagtgctcagtgtcatgcggtgatggtatacaaagaagacgcgatacctgtttggggccacaggcgcaggctccagtgcccgcggacttttgccagcatttgcccaaacctgtgacagttcgcggatgttgggccggtccatgtgtaggacaagggactccttcgctcgtgccccacgaggaggcggctgctccggggcggaccaccgccacccctgccggggcgtctctggaatggtcccaggcacgcggtctgctgttctctccagctccccagcccaggcgactgctccccggccctcaagagaactctgtacagtcctcagcttgtggaagacagcacctcgagcctaccgggacaatagacatgcgagggcccggtcaagctgattgtgccgtcgcaatcgggcgaccccttggggaggtggtgactctgcgcgtgctggaatcctcactgaattgcagcgcgggcgacatgctgctgctgtggggcaggctgacatggcgcaaaatgtgtcgcaagttgcttgatatgacgttttccagcaaaactaacacactggtggtgaggcagaggtgcggaaggcctggaggaggggtgctcctgagatacggcagccagcttgccccagagactttctatagagagtgtgatatgcagctgtttggaccttggggtgaaatcgtgtctccatcgttgtctcctgccacatctaatgctggcggctgtcgcctgtttatcaatgttgcgccgcacgctcggatcgcaatccacgcccttgctacaaacatgggcgcagggacagagggtgctaacgcctcctacattctcatccgggatacgcattcgttaagaacgaccgcttttcacggccagcaggtcctctattgggaatccgaatcaagccaagccgagatggagttcagtgagggctttctgaaggcccaagcaagtctccggggccagtattggacactacagtcttgggtccctgagatgcaggacccgcagtcgtggaagggcaaggaagggacg

SEQ ID NO: 5610 - DNA, 4281 bp, synthetic construct
  misc_feature 1..4281: note = source = /note="Description of Artificial Sequence: Synthetic coding sequence"
  source 1..4281: mol_type = other DNA
atgcatcagcgtcacccacgcgcccgttgccctccgctctgtgttgcgggtatcctggcctgcggattcctcctgggctgttggggcccgagccacttccagcaaagctgcctccaggccttagaacctcaggctgtctcttcgtacctctcaccgggcgcccctctcaagggccgacccccctctccgggcttccaacgtcagcgtcaacgtcaacgccgtgccgccggcggaatcctgcatctagaactgctggtcgccgtgggccccgacgtttttcaagcccaccaggaggatactgagcgctacgtgctcaccaacctcaacatcggcgctgagctccttcgcgaccccagcctgggcgcgcagtttcgcgttcatcttgtaaaaatggttatcctgactgaacccgagggagctccaaacattactgccaacctgacttcgtcccttttgtcagtttgcggttggtctcagactatcaaccccgaggatgataccgacccgggtcacgcagacctggtcctctacatcacccggttcgacctggaacttcccgacggaaatcgccaggtgcgcggagtgacccagttgggcggtgcatgctcaccgacatggtcgtgtctcattaccgaggacaccggcttcgatttgggagtgaccattgctcacgagatcggacactccttcggtctcgagcatgatggtgctcctggttctggatgcgggccttccggacacgtgatggcgagcgatggagccgcccctcgcgccgggctggcgtggtcgccttgcagcaggcgccagttactgagtcttctcagcgccggcagagcccgttgtgtctgggatcctccccgcccccagccgggttccgccggacacccccccgatgcccagcccggtctctactatagtgccaacgagcagtgtcgcgtcgccttcggccctaaggctgtcgcttgcaccttcgcccgcgagcatctcgacatgtgccaggccctcagctgccacacagaccccctcgatcagtcatcttgttcgcggctacttgtcccactgctcgacggtacagaatgcggtgtcgagaagtggtgctctaagggccgttgccgatccctagtcgaactcactcctattgctgccgtccacggacgctggtcgtcgtggggacctcgttccccgtgttcccgctcgtgcggtggcggcgtggtcaccaggcgccggcaatgtaataatccacgccccgcattcggtggccgtgcctgcgtcggcgccgatctgcaggccgagatgtgcaatacacaggcgtgcgagaagacccagttggaattcatgagccagcagtgcgcccggaccgatggccagccccttcgctcttcccctggcggcgcgtccttctaccactggggggccgcggtgccacacagccaaggtgatgctctgtgccggcacatgtgccgcgcaattggtgaaagcttcattatgaagcgtggcgacagcttcctcgacggcacgcgttgcatgccgagcggcccccgcgaggatggcactttatctctatgcgtttcgggatcctgccgcaccttcggctgtgacggccgtatggattctcagcaggtctgggatagatgccaggtttgtggaggtgataacagtacctgctcgccccgtaagggaagtttcaccgcaggcagagcacgggagtacgtgaccttcctgaccgttacgccgaacctcacctcggtttacattgcaaaccaccgtccgctcttcactcacctggccgttcgtataggtgggcgctacgttgtagcggggaagatgtccatcagcccaaacaccacctacccgtcgctgttggaggacggtcgcgtcgagtaccgcgtcgctttgactgaggaccgtctccccaggctcgaagagatccgcatctggggcccgttgcaggaggatgccgatatccaagtgtaccggcggtacggcgaggaatacggcaacctaacccgtcctgacattaccttcacctactttcagcccaagcctcgccaggcctgggtctgggccgcggtgcgcggcccctgttctgtttcttgcggagccgggcttcgttgggtcaactactcctgtctggaccaggcgcgaaaagaacttgtcgagactgttcagtgtcagggctctcagcagccgcccgcctggcctgaggcctgtgtcctcgaaccttgtccaccctactgggcagtcggcgactttggcccctgttctgccagttgtggcggaggtcttcgtgagcgtcccgtccgctgtgttgaagctcagggttccctcctcaagacgctcccgccggcacgttgcagagctggtgcccagcagcctgcggttgctctggagacttgcaatccacagccgtgccccgcccgctgggaggtgtcagagccttcctcctgtacctccgcaggcggcgcgggtctggctctcgaaaacgagacatgcgttcccggtgccgacggcctagaggctcccgtcactgagggtcctggctcggtcgacgaaaagttgccagctcccgaaccctgcgtcggaatgagctgccccccaggctgggggcacctggacgccacctctgccggtgagaaggccccatctccatggggctccattcgtactggagctcaagctgctcatgtctggacgcccgctgctggctcctgttctgtgagctgcggccggggtctgatggagcttcgtttcctgtgcatggactccgccctgcgtgtcccggtgcaggaggagctctgtggtctcgcctccaagccgggctcacgtcgtgaggtttgccaagcagtcccctgtcccgctcgttggcagtacaagctcgctgcgtgctccgtctcctgcggccgcggagtcgtccgccgtatcctgtactgtgcccgggcccacggcgaagatgacggtgaggagatattgttggatactcagtgccagggacttcccagaccggagccgcaagaggcgtgttctctggagccttgccctcctcggtggaaggtgatgagcctgggcccgtgtagcgcttcatgcggcctcggcactgcccgccgctccgttgcttgcgtccagctcgatcagggccaggacgtcgaggtcgatgaggccgcctgtgcagccctcgttagaccggaggcctccgttccctgcctcattgccgattgcacctataggtggcacgtgggcacgtggatggagtgctccgttagttgtggcgatggaattcaacgccgccgcgacacctgtctgggcccccaggctcaggctcccgtaccggctgatttctgccagcaccttcctaagcctgtgaccgtcaggggatgttgggcggggccgtgcgttggacagggcacgccgtcactggtgccccatgaagaggccgcggctccagggcgcaccactgccacccctgctggtgctagcctcgagtggtcccaggccaggggcctccttttctcgccggcccctcagccgcggcggcttttgcccggcccccaggagaactcggttcaatcttccgcctgcggccgtcagcacctggagcccaccgggaccatcgacatgcgcggtccaggccaggccgactgcgctgtcgctatcggtcggcctctgggcgaggttgtgaccctcagggtcctggagagctcactgaactgctctgccggcgacatgcttctgttgtggggtcgcctgacttggcgtaagatgtgtcggaagctcttggacatgactttctcctccaagactaacactttggtagtccgccagcgttgcggccgtccgggcggtggtgtcttgctgcgttatggctcgcaacttgctcctgaaactttttaccgggagtgcgacatgcaactcttcggtccatggggggagatagtctcgccttcgctctcccctgccacatctaacgccggcggttgccgcctgttcatcaacgtggccccacatgcccgaatcgctatccacgctctagccaccaacatgggtgccggcaccgagggtgcaaacgcctcctatatcttgatcagggacactcactctcttcgcactaccgcgtttcacggccaacaggttttatactgggagagcgagagctcgcaggcggagatggagttctcggagggtttcttaaaggctcaggccagcctccggggccagtactggacccttcaaagttgggtccctgagatgcaggatccgcagtcttggaaggggaaggagggcaca

SEQ ID NO: 5611 - DNA, 4281 bp, synthetic construct
  misc_feature 1..4281: note = source = /note="Description of Artificial Sequence: Synthetic coding sequence"
  source 1..4281: mol_type = other DNA
atgcatcaacggcaccctcgcgccagatgtccccccctgtgcgtggccgggatattggcatgcggatttctgctgggctgctgggggccaagccactttcagcagtcatgtctgcaggccctagagccccaggctgtctctagttacctgagccccggagcaccactgaaagggcggccaccatcccctggcttccagcgccagcggcagcgacagcgacgcgccgccggcggtatccttcatcttgaactgctggtggcagtcggtcccgatgtgtttcaagcccatcaagaggatactgagcggtacgtgttaaccaatctgaatattggagctgagctgctacgagaccctagtcttggtgctcaattccgtgtgcacctggttaaaatggtgattctgacagaaccagaaggggcccccaatattaccgcaaacctgaccagctctctgctgtcagtctgtggctggtcacagaccatcaaccctgaggacgatacagatccaggccatgccgacctagttctgtatataactcgctttgacctagagctgcccgacggaaatagacaggtgcgcggagtgacccagctgggaggagcctgcagcccaacttggagttgtctcatcactgaggatacaggtttcgacctgggtgtgaccatagcccacgaaattggtcattcctttggtctggagcacgatggggccccagggtctggctgcggcccaagtggccacgttatggccagcgatggggccgccccacgcgctggcttagcttggtccccctgctctcggcggcagctattgagcctgttatctgctgggagagccagatgcgtgtgggatcccccgcgcccacagcctggctctgccgggcaccctcccgacgctcaaccaggcctatactattccgccaacgagcagtgcagggtggctttcggaccaaaggctgttgcctgtacctttgcccgggagcacctagacatgtgtcaggccctgtcttgtcacacagatcccctggaccagagcagctgttctagacttctcgtccccctactcgacggcacagagtgcggggtggagaaatggtgttctaagggcaggtgcagatcactggttgagttaacaccaattgctgcagtgcacggcagatggtcttcttgggggccacggagcccttgctcaagaagctgcgggggcggagtcgtcacccgtcgccggcagtgtaataacccccgacccgccttcgggggcagggcctgtgtcggtgccgacctgcaggctgaaatgtgcaacacccaagcatgtgaaaagactcagcttgagtttatgtctcagcagtgcgcacgtaccgatggccagccattgagatcttctccggggggtgccagtttttatcactggggcgccgccgtgccgcattctcagggtgatgctctatgcagacatatgtgccgggctattggcgagtccttcatcatgaagcggggcgacagctttttagacggcacaagatgcatgccctccgggccccgtgaagacgggactttgtctctgtgcgttagcggcagctgtagaacctttgggtgtgacggacggatggatagccagcaggtgtgggaccgttgtcaggtgtgtgggggtgataacagcacatgttctcctcggaaaggctcctttaccgccgggagagcccgcgaatatgtgactttcctgactgtgacacccaacctgacaagtgtgtacattgccaaccaccggcctctatttacccacttagccgtgcgaattggagggaggtacgtggtggctggtaagatgagcatttctccaaacaccacctatccctccctgctggaagatggcagggtggagtatagagtggccctgactgaggataggctgcccagactggaggaaatccgtatatggggccccctgcaggaagacgccgatatacaggtgtataggagatacggggaggaatacggcaatctgacccgccctgacatcacatttacttatttccagccaaaaccccggcaggcctgggtctgggctgctgtccgcgggccttgttccgttagttgtggggccggcctgcggtgggtgaattatagctgtctggaccaagcacgaaaagagctggtcgaaaccgtgcagtgccagggcagccagcagccaccagcttggcccgaggcatgtgtcttagaaccatgtcctccctattgggccgtgggcgatttcggaccatgcagcgcctcttgtggcggcggccttagggagagaccagtgaggtgtgtggaagcccagggaagcctgctgaaaaccttgcctccagcacgctgccgtgctggggcccaacagcccgcagtagctttagagacctgcaacccacaaccatgccccgcccgatgggaagttagtgagcctagttcttgcactagcgcaggcggcgctggcctagcactagaaaacgaaacttgcgtacctggcgcagatggtctggaagcaccagtgaccgaaggaccagggtctgttgatgagaaactcccagctccagaaccttgcgtgggcatgagctgcccgcccggatgggggcacctagatgctaccagtgccggcgaaaaggctccaagtccctggggtagtatacgcaccggcgcccaggctgctcacgtatggactccagcagccggctcctgctctgtctcttgcgggcggggcctcatggagctgagattcctgtgtatggatagtgcacttcgggtgcctgttcaagaggagctatgcggcttagcctccaagcctggatcacgacgcgaggtttgccaagcagtcccttgccctgccagatggcagtacaagctggccgcctgcagtgttagttgtggccgcggcgtcgtgcgtcgcatcctgtactgcgcacgtgcacacggcgaagacgacggcgaggagatactgctggacactcaatgtcagggcctacctcgccccgagccccaggaagcttgtagccttgaaccatgtccccctcggtggaaggtgatgagcctcggaccctgttctgcttcatgtggcctgggcactgcccgccggagcgtggcctgcgttcagctagatcagggccaagatgttgaggtggatgaggcagcctgcgcagccctggttcgccccgaggcctcagtgccctgcctaatagccgattgcacataccgatggcacgttgggacatggatggagtgttctgtgtcctgtggagacggaatccagaggcggagggacacctgcctggggccacaggcacaggcacccgtgcccgccgacttctgccaacacctgcctaaaccggtgaccgtgcgcgggtgctgggctggcccctgcgtgggccaaggcaccccgagtctggttccacacgaagaagcagctgcccccggccgtacaactgccacacctgctggcgcctccctggagtggagtcaggctagagggctcctgttctcaccagctcctcagcctcgtcgcctgttgcctggcccacaggaaaacagtgtgcagagctccgcttgtggccgacagcacctagagcccacaggcaccattgatatgagaggaccaggacaagccgactgcgcagtggcaataggccgccctcttggtgaggtggtgacactaagagtgctggaaagtagtctgaactgttccgctggcgatatgctgctgctttggggccggctaacatggaggaagatgtgtaggaagctcctcgatatgacattcagcagtaagacaaatacactcgtagtgcgtcagcgctgcggtcgaccaggcggaggcgttctactgcggtacggctctcagctggccccagaaaccttctatcgagagtgcgatatgcagctattcggcccatggggcgaaatagtgagcccatctctcagccccgccaccagcaatgctgggggctgcagactgtttataaatgtcgccccacatgcccgcatcgctatccacgccctggcaacaaatatgggagccggcacagaaggggccaatgcttcatatatccttatacgcgatacccattcattacgcacaacagcctttcatggtcaacaagtgctgtactgggaatccgagtccagtcaggccgagatggaattctctgaaggcttcttaaaggcacaagcatcccttcgcggccagtattggaccctgcaaagctgggttcccgaaatgcaggacccccagagctggaaaggcaaggaggggact

SEQ ID NO: 5612 - DNA, 4281 bp, synthetic construct
  misc_feature 1..4281: note = source = /note="Description of Artificial Sequence: Synthetic coding sequence"
  source 1..4281: mol_type = other DNA
atgcaccagcgccatcccagagcacggtgcccccctctgtgcgtggctgggattcttgcttgtggcttccttctgggatgctggggaccatctcatttccaacagagctgtttgcaggcactggagcctcaggccgtcagtagttacctctcccctggcgcccccctcaagggaagaccaccttctcctggtttccagcggcagcgacagcgccaacggcgcgccgcaggtgggatactgcacttggaactgttggtggctgtcgggccagatgtgttccaggcgcatcaggaggatacggaaaggtatgttcttactaatttgaatatcggggccgaacttctgagggatccctcccttggagctcagttccgggtgcatctggtcaaaatggtgatcctgaccgagccagagggtgcgccgaacataacggcaaacctgacatcctctcttttgtcagtgtgcgggtggtcccaaacaattaacccagaggatgacacggatcccgggcatgccgatctggttctctatatcacacgcttcgatctggagctcccagacggtaataggcaggtgcgcggcgtcacgcaactcggcggtgcctgctcccccacttggtcatgcctgatcactgaagataccggatttgacctcggagttacaattgcccacgagatcggccattccttcgggcttgagcatgatggtgcgcctggcagcgggtgcggtccaagcgggcacgttatggcaagcgacggtgccgccccacgggcagggctggcatggtccccttgtagtcgcaggcagctcctgtccctgctgtctgctggcagagcaagatgcgtctgggatccaccgaggcctcagccagggagtgcgggccacccacccgacgcccaaccagggctgtactatagcgccaacgagcagtgtcgggtcgcgtttggacctaaagccgttgcttgcacattcgctcgagaacatctcgacatgtgccaagctctgagctgccatacagatccactcgatcagagcagttgttcacgcctgcttgtacctttgctggatggaactgaatgcggtgtggagaaatggtgttcaaaaggacgatgcagatctctcgtcgagctgacccccatcgctgccgttcacggaaggtggtccagttggggaccccggtccccctgcagccgcagttgcggaggcggagtcgtgacacggaggagacagtgcaacaatcctcgacctgcattcggtggccgggcttgcgtaggcgctgacctgcaggctgagatgtgcaatactcaggcatgtgagaagactcaactggaattcatgtcccagcagtgcgcgagaactgacgggcagccactcaggtcctccccgggcggtgcctctttctaccattggggagcagccgtgccacattcccagggcgatgctttgtgccggcacatgtgtcgcgcaattggtgagtcatttatcatgaagagaggggattcttttctggatggcaccagatgtatgccatctggaccccgcgaagacgggaccttgtcattgtgcgtgtctgggtcctgtcgaacatttggctgtgacggacggatggactcccagcaggtctgggacaggtgccaagtgtgtggaggagacaattcaacatgtagccctcggaagggatcatttaccgccgggagggccagagaatacgtgaccttcttgaccgtgacgccgaacctgacctctgtttacatcgcgaaccacagacccctgtttacccacctcgccgttagaatcggaggtcgctatgtggtggctggcaaaatgtcaatatcccctaataccacatacccgagcctgcttgaagacggacgagtcgaataccgggtggcgctcacagaagacaggctgccccggttggaggaaatacgcatatggggtccactccaagaggacgccgacatccaggtctatcgccgatatggtgaggagtatggtaatctgacccggcccgacatcacgttcacttactttcagccgaagccccggcaggcgtgggtttgggctgcggtcagagggccatgctcagtgtcctgcggagccgggcttcgatgggtaaactactcttgcctggatcaagcacggaaggaactcgtcgagactgtgcagtgtcaggggagccagcagccccctgcatggcccgaggcctgcgtgttggaaccatgtcccccatattgggccgtaggggactttggaccctgttccgcctcctgtggcggaggtctccgggaacgacccgttcgatgtgtggaagcgcagggctctctgctcaaaactctcccccctgcgaggtgtcgcgccggggcgcagcagccggccgtggccctcgaaacatgcaacccccagccatgcccagctcgctgggaggtctctgaaccatccagttgtacgtccgcagggggtgcaggactggcgctcgagaacgaaacctgtgtgcccggggctgatggactggaggcccccgttaccgagggaccaggttctgtcgacgaaaagctgccagcccccgaaccctgtgtgggcatgtcctgtccaccaggctgggggcacctggatgcaacgagtgcaggcgagaaggcccctagtccctgggggagtattcgcacgggggcgcaggccgcccacgtgtggaccccagcagcgggtagctgtagcgtgtcctgcggacggggactcatggagctcagattcctttgcatggactcagctttgagggtacccgtgcaggaggaattgtgtggcttggcttccaaacctgggtcaagaagggaggtgtgccaggctgttccatgtcctgccaggtggcaatataagctggcggcatgttcagtttcttgcgggaggggggtcgtgaggagaattctgtactgcgccagggcccacggcgaggatgacggcgaggaaatcttgctggatacccagtgccaggggctcccacggcctgagcctcaggaagcctgcagcctggagccgtgcccgcccaggtggaaggttatgagtttggggccctgctccgccagctgcggactgggaacagcacggcgctcagtggcctgcgtgcagctggatcagggccaggacgttgaggtggatgaggcggcctgtgccgcccttgtgcgaccagaagcttccgtgccctgtctgatcgcggactgcacctatagatggcatgtggggacgtggatggaatgttccgtgagctgtggcgatggcatccagagaaggagagatacctgcctgggcccccaggcccaggccccggttcccgcagatttttgccagcacctgccaaaacccgtgaccgtgcggggttgctgggccgggccatgcgtgggccagggaacgccctccctggtaccacacgaagaggctgccgctcctgggagaaccaccgccacccctgccggggcctcacttgaatggagccaggcccggggcctgctgttttcccctgcgccccaaccacgcagactcctgcccggaccccaggaaaatagcgtgcaatcctcagcttgcgggaggcagcacctggagcccaccggtaccatcgatatgagaggcccaggacaggcggattgtgccgtcgctatagggagacctctgggggaggtggtgactctccgcgtgttggaaagttccctcaattgttctgctggagatatgctgctgctgtgggggagactgacctggagaaaaatgtgtcggaagctcctggacatgacctttagtagcaaaacaaacaccctcgtcgtcagacagaggtgtgggagaccggggggcggagtcctcctccggtacggttctcagctggctcctgagactttctatagagaatgcgatatgcagctctttggaccttggggcgagattgttagtccatccttgtcacctgccacctctaacgccgggggatgtagactgtttattaacgtagcaccacacgctcgcatcgctattcacgccctggccaccaacatgggcgctgggacagagggcgcgaatgcgagctatatccttatccgcgatacccattctctgcgaacgacggcttttcacggacaacaggtactgtactgggaaagcgaaagttcccaggccgagatggagtttagcgagggatttctgaaagcacaggccagtctgcgcggccagtattggacgctgcagagctgggttcctgagatgcaagatccgcagtcctggaagggcaaagagggaaca

SEQ ID NO: 5613 - DNA, 4281 bp, synthetic construct
  misc_feature 1..4281: note = source = /note="Description of Artificial Sequence: Synthetic coding sequence"
  source 1..4281: mol_type = other DNA
atgcaccagagacacccgcgcgcacgctgcccgccactctgtgtggcaggaattctggcctgcggcttccttttgggctgttggggaccctcccactttcagcaatcctgtctgcaggctctggagcctcaggccgtgtcttcttatctgagccctggcgccccactgaaaggacgcccgccgtctcccggctttcagaggcagagacaacgccaacgccgcgctgccggcggcatcctgcacctggaactcttggtagcggtgggcccggatgtcttccaagcccatcaagaggatacagagcgctacgtgctcacaaatttgaacattggtgctgaattgctgagggatccctccttgggagctcaattccgcgtccatttggttaaaatggtgatcctgaccgagcccgagggagccccaaatattactgctaatctgacaagttcccttttgtcagtttgcggttggagccagaccatcaacccggaagacgatactgaccctggtcacgccgacctggtgctgtacattacccgcttcgacttggaactgcccgatggtaatagacaagtgagaggagtaacccagttgggcggagcatgcagtcctacgtggtcatgcttgattaccgaagatacaggtttcgaccttggcgtgacaatcgcgcacgagatcggtcactcttttggcctcgaacacgatggtgcccccggcagcggttgcggaccatcaggccatgtgatggcatcagatggcgcggctccgagggccggactggcgtggagtccttgtagcaggcgccagctcttgtctctgcttagtgccggccgcgctaggtgtgtttgggatcccccaaggccccaacccggatctgcaggacatcctccagacgcacagccaggtctctactactctgcaaacgagcaatgtcgcgtcgcctttggccctaaggccgtcgcctgcactttcgccagagaacacctggatatgtgtcaggccttgagctgtcacactgacccactggaccaaagctcctgttctaggctgctggtgcccctgctggatggcaccgagtgcggcgtggaaaagtggtgtagcaagggcaggtgcaggagtctggttgagttgactccaatagctgctgtacacggaaggtggtcatcttggggacctaggtctccctgctcaagaagctgtggcggcggagtggtcaccagaaggaggcagtgcaacaaccccaggcccgccttcggtggtagggcttgcgtgggagcggatcttcaggctgaaatgtgtaacacccaagcttgtgagaagacgcagctggaatttatgtcccagcagtgcgcaaggactgacggccagccgctgaggtcatctcccggcggcgcatccttctaccactggggcgcagccgttccccattctcagggcgatgctctgtgcagacatatgtgcagggcgatcggtgaatcctttattatgaagcgcggcgatagtttcctggatggtactcgctgcatgccttcaggtcccagagaggacggaacactgtccctttgcgtcagcggcagctgtagaacattcggctgcgacggaaggatggacagccagcaggtctgggaccgctgccaggtatgtggcggcgataattctacttgctctcctcgcaagggatcattcactgccggacgcgcacgcgagtacgtcaccttccttaccgtgactcctaaccttacttctgtgtatattgctaaccatagacccttgttcacccatttggccgttaggatcggcggtaggtatgtggttgctggcaaaatgagtatttctcctaatacgacatacccgagcctgttggaggacggacgcgttgaataccgcgttgcgcttaccgaggacaggttgcctaggttggaagagatcaggatctggggtcctcttcaggaggacgctgacatccaagtgtacagaagatacggcgaagaatacggcaatttgactcgccctgacatcacatttacttactttcaacccaaacccagacaagcatgggtgtgggcagcggtcagaggaccgtgctccgtgtcctgtggtgctggcctgagatgggtcaactactcctgtctcgaccaggccaggaaggaactcgtggaaaccgtccagtgccagggatctcaacaaccaccggcctggcctgaagcatgcgttctggagccctgccccccctattgggctgtaggcgatttcggtccctgcagcgccagttgcggcggcggcctgcgcgagaggcctgtgaggtgcgtagaagctcagggctctctcttgaagaccttgccccctgcacgctgcagggctggtgctcaacagcccgcagtggctctggagacctgcaatccacagccctgcccagctaggtgggaagtgtccgagccgagtagttgtacgagtgctggtggagccggactcgcactggagaacgagacgtgtgtaccgggagctgatggccttgaagcacccgtgaccgaaggacccggttcagtggacgaaaagttgcctgcacccgagccatgtgtgggtatgtcttgcccacccggctggggtcatctggacgctacctccgccggagaaaaggcaccgtccccatggggcagcatcaggaccggtgcgcaggctgctcacgtttggacccccgcggccggatcctgctctgtcagctgtggaaggggtctcatggagctgagattcctgtgcatggactcagccctgagggtacctgtgcaggaagagctttgcggcttggctagcaagcccggatctcgcagagaggtgtgtcaagccgtgccgtgcccggccagatggcaatataaacttgccgcctgttccgtctcatgcggccgcggagtggtcagaagaattttgtattgtgctcgcgctcacggcgaggatgacggcgaggagatactgctggacacccagtgccagggtcttccacgcccagagccccaagaggcatgctcccttgaaccctgtccaccccgctggaaggtaatgtcactgggaccttgttctgcttcttgcggactgggtaccgccaggagatccgttgcttgtgtgcagctggaccagggacaggatgtcgaggttgatgaggctgcatgcgctgctctggtgagacccgaagctagtgtcccctgcttgattgccgattgcacctaccgctggcacgtcggcacctggatggagtgtagtgtgagttgcggtgatggaattcaacgcaggagagacacatgtctgggtccccaggctcaagcacccgtgcccgcagacttttgtcagcatttgcccaagcctgttaccgttcgcggctgctgggctggcccgtgtgtgggacagggcacaccaagtctcgtgccccatgaagaagctgcagcgcctggtcgcaccacagctactccagctggagcgtccctggagtggagccaggcgagaggactgctgttttcaccagctccacagccccgcaggctgctgccgggaccacaagagaactcagtgcagagtagcgcatgtggaaggcagcacctcgaacccaccggcaccatcgacatgcgcggccctggtcaggccgattgcgcagtcgcgataggtagacctctgggcgaagttgtgaccctgagggttctggagtcaagtctgaattgttctgcaggcgacatgttgctcctgtggggccgcttgacctggagaaaaatgtgccgcaagctgttggatatgactttttcctcaaagaccaacacactggtagtgaggcaacgctgcggcagacccggaggaggtgtgctgctgagatacggtagccagcttgcgcctgagactttctacagagagtgtgacatgcagcttttcggcccttggggagaaatcgtgagcccttctctttctccggctacttctaacgccggtggatgtagacttttcataaacgtcgctccgcatgcccgcatcgccatccatgctttggctaccaacatgggagccggaaccgagggcgctaatgcttcatatatcctcattagagacacacattcactgaggactactgcctttcacggccagcaagtcctctattgggagagtgagagttcccaggccgaaatggagttttcagaaggtttcctcaaggcccaggcctccctgagaggacagtactggaccttgcagtcatgggtaccagaaatgcaggacccccaaagctggaagggtaaggagggcact

SEQ ID NO: 5614 - DNA, 4281 bp, synthetic construct
  misc_feature 1..4281: note = source = /note="Description of Artificial Sequence: Synthetic coding sequence"
  source 1..4281: mol_type = other DNA
atgcaccagcggcatccgagggctcgttgtcccccactttgcgtcgctggaatcctcgcatgtgggtttttgcttggatgttgggggccatcgcattttcagcaaagctgccttcaggcgcttgaaccacaggcggtgtcttcatacttgtcaccaggagccccattgaagggaagaccgccgtcgccaggatttcaaagacaaagacagcgccaacgtcgcgcggcgggagggattttacacctggaattacttgtagctgtaggaccagatgtattccaggcacatcaagaggacacagaaaggtatgtgctaacaaatctcaacattggagctgaactcttgcgcgacccatccttgggagcccaattccgcgtccaccttgttaagatggtcattcttactgaaccagagggagcacctaatatcaccgcgaatttgacgtcttcattgctatcagtctgcgggtggagccaaactattaatccagaagatgataccgatcctggtcatgctgatttagtcttgtacataacgcgttttgatttggaactgcctgatggaaatcgacaagtcagaggagtgacccaattgggcggtgcatgctccccaacttggtcatgccttattaccgaggacacgggattcgatctgggagtaaccattgcccatgaaatcggtcattccttcggattggaacatgacggagccccaggaagtggatgtggtcctagtgggcatgtcatggcaagtgacggtgccgcgccaagagcaggattggcgtggagcccgtgctcgaggagacagttgctatcacttctctcagctgggcgagctcgatgcgtttgggacccacccagacctcagccgggatctgcgggtcatcctccagatgctcagccgggattgtattactctgcaaacgaacagtgtagagttgcatttggaccaaaagcagttgcttgtacgtttgcacgggaacacttagatatgtgccaagccctgtcatgccacactgacccgctcgatcaatcaagttgttccaggctgctcgtgccactgctggatggtacagaatgtggtgtggagaaatggtgttctaaggggagatgtcgatctctggttgagctgacaccaattgcagccgtccatggacgatggtcctcctggggacctcgctcaccgtgctccagatcatgcggagggggagttgtcaccaggcggcgccaatgcaataatccaagaccggcctttggtggcagggcatgtgttggcgcagatcttcaagcagaaatgtgcaatacacaagcatgcgaaaaaactcaactcgaatttatgtcccagcaatgtgcccgaactgatggacaaccattgcgttctagccccggaggtgcctctttctatcattggggagcagcagtcccgcattcccaaggcgatgctctatgtcgccatatgtgcagagctataggagagagtttcatcatgaaaagaggagattcattcttggatggcacacgatgtatgccctccggacctcgagaggatggtacattgtctctatgcgtttccggatcttgtagaacctttggttgtgatggaagaatggacagccaacaggtctgggatagatgccaggtctgcggaggagataattctacatgtagtccacggaaaggaagttttaccgcaggaagagcccgcgaatatgtgactttcctcacagttacaccaaacctaacctccgtctatattgcgaaccaccgaccgctgtttactcacttagctgttcgtataggaggacgctatgtcgttgccggaaagatgtccatcagtccaaacaccacatatccgtcgctactagaagatggacgagttgagtatcgagttgctttaaccgaggatagattgcctagactcgaggaaattcgcatctggggcccattgcaggaggatgcagacatccaagtttatcgacggtatggagaagagtacgggaacttgactagaccagatattacctttacttattttcaacctaaaccgcgacaagcttgggtctgggcagcagttcgtgggccatgttcggtttcgtgtggagcaggtctgcgatgggtcaattattcttgcttggatcaagcccgtaaggaactcgtggagacagtacagtgtcaaggatcccagcaacctcccgcctggccagaggcatgtgtccttgagccgtgtccaccttattgggcagtgggtgattttggcccttgcagcgcatcatgtggtggaggtttgcgagaacgaccagttcgttgtgtcgaggcgcaagggtccctgctgaagactctacctccggcccgttgccgagctggagcacaacaaccagcagttgctttggaaacatgcaacccacagccttgtccggctagatgggaagtttcagaaccgtcatcctgcacatcagcaggtggagctggacttgcacttgagaacgaaacgtgtgtgccgggagctgacggattggaagctccggtcactgaggggccagggtcggtcgacgaaaaattaccagcacctgaaccttgtgttggaatgtcttgtccaccaggatggggacatttggatgcaaccagtgctggcgaaaaagcaccgtcaccgtggggatcaatacgaactggagctcaggctgctcacgtgtggactccagcggctggctcctgttctgtttcgtgcggacggggacttatggaattacgttttctttgcatggatagcgcattacgtgtgccagttcaagaagaactttgcggtcttgcttctaagcctggaagccgcagagaagtgtgtcaagccgttccatgcccggctcggtggcaatacaaacttgctgcttgttcggtctcatgtggacgaggagttgttcgacgaattttgtattgtgccagagcccatggagaggatgacggagaggagatcctccttgatacccaatgccagggactcccgcgtcctgagccacaggaggcatgctctctcgaaccatgtcccccacgatggaaagtcatgagtctcggaccatgtagtgcctcatgtggacttggaactgccagaaggtcggttgcttgcgtccaactggatcaaggtcaggacgtcgaggtcgatgaagcggcttgtgctgctcttgttagaccggaagcatcggtaccttgtctgattgcagattgcacatatcgctggcatgttggaacatggatggaatgcagcgttagttgcggagacggaattcaacgtcgtagagacacttgtcttggtcctcaggctcaggctcctgttccagcagatttctgtcaacatcttccgaagccggtgacagttcgaggatgctgggccggcccctgtgtgggacaaggaacaccttcactcgtaccccacgaagaggcggcagcgcccggtagaacaactgcgacgccggctggggcaagcttggaatggagtcaggctagaggtcttttgtttagtccagctccacaaccacgtagactgttgccaggacctcaagagaattctgtgcaatcctcagcttgtggaagacagcacctcgaaccaacgggaacgatcgatatgcgagggcctggtcaggctgactgcgctgttgccattggtcggcctcttggtgaggtagtgacattacgtgttcttgaaagttccttgaattgttctgctggagatatgttgcttctgtggggaaggttgacctggcgtaaaatgtgcagaaaactactcgatatgactttttcttctaagacgaacactctcgtagttagacagagatgtggaaggcctggaggtggagttttgctacgatatggttcgcaacttgcaccggaaactttttatcgtgagtgtgacatgcagctgttcggtccatggggagaaattgtttccccgagcctgtcaccagcgacttctaatgctggaggttgtcgcctttttattaacgttgcgccacacgcccgtattgctattcatgccctcgctaccaatatgggcgccggtactgaaggcgccaacgcttcgtatattctcattagagatacccactcgctcaggacaacggcctttcatggccagcaggttctttattgggagtctgagagttcacaagcagaaatggaattttcagaaggattcctcaaagcacaagcaagcttgcggggacagtattggacgctccaatcttgggtcccagagatgcaggacccacaatcgtggaaaggaaaggagggaacg

SEQ ID NO: 5615 - DNA, 4281 bp, synthetic construct
  misc_feature 1..4281: note = source = /note="Description of Artificial Sequence: Synthetic coding sequence"
  source 1..4281: mol_type = other DNA
atgcaccaaaggcaccctagagctagatgtcctcccctgtgcgttgctggaatactcgcttgcgggttcctgctgggatgttggggtccatcccactttcagcagagctgcttgcaagctcttgagccacaggccgtatccagctacctgtctcccggcgcaccactgaaaggccggccaccctcaccaggattccaacgccagaggcagcggcagcgaagggccgccggaggcatcctccacctcgagctgctggtggcggtaggtccagatgtctttcaggcccaccaggaagatactgaaaggtacgtgctgacaaacctcaacataggggccgagctgttgagagacccgtcactgggagctcaatttagagtgcatctcgtgaagatggtgatcctgacagagccggaaggcgctcctaatatcacagcaaacctcacttcttccctgcttagtgtgtgcgggtggagtcaaacaataaacccagaggacgacaccgatcccggacacgcggatctggtcttgtacatcacccggtttgaccttgagctgcctgatggcaataggcaagtgcggggcgtaacccagctcgggggggcctgctctcccacatggagctgtttgatcaccgaagatacgggattcgatttgggggttaccatcgcccatgagatcgggcactcttttggcttggagcacgacggcgcaccagggtctgggtgcggaccttcaggtcatgtgatggcctctgacggggccgctccccgcgctggcctggcgtggtctccatgtagccgcaggcaactgctgagcctgcttagcgccggtcgcgccagatgcgtttgggaccccccacgccctcagcccggaagcgcaggtcaccctccggacgctcagccaggcttgtattattctgccaacgaacagtgtagggtcgcctttggcccaaaagctgtcgcatgtaccttcgcccgggagcacctggacatgtgccaggcactgagttgccacacggaccccctcgaccagagttcttgctctcgacttctggtgccgttgctggatggcaccgaatgcggcgttgagaagtggtgttccaaaggtaggtgtcggagtttggtggaactgacacccattgcagctgtccatgggaggtggtcaagctgggggcctcggtcaccttgctctagaagctgcgggggtggggttgtcactagaagacgccagtgcaataatccaaggcccgctttcgggggacgcgcttgcgttggcgccgatctgcaggcagaaatgtgtaatacacaggcgtgtgagaagacccagctcgagtttatgagtcagcagtgtgccaggacagacggtcagccgctgaggagctctccagggggagctagcttttatcactggggagcggctgtccctcattctcaaggggatgcattgtgtaggcatatgtgccgggcaatcggcgaatcattcattatgaagcgcggggactccttcctggatgggacacgctgcatgccgtctggcccgagagaagatggtacgttgagcctgtgcgtgtccggcagttgtagaacatttggctgcgatggccgcatggattctcagcaagtgtgggacaggtgtcaagtgtgtgggggggacaacagtacatgttcacctcggaaggggagcttcacagctggccgagcgcgagaatacgtcacgtttctgaccgtgacaccgaatcttacctctgtgtacatcgccaatcaccggccccttttcactcacctcgccgtacggattggtgggcggtacgtagtggccggaaaaatgtccattagtcccaataccacctacccttccttgctggaagatggcagagtagagtaccgagtcgctctgactgaggatcgcttgcctcgcctggaggaaatcagaatatgggggcctttgcaggaggatgccgacatacaggtttatcgaagatatggcgaagagtatggcaatctgaccaggccggatatcacattcacatattttcagcccaagcctaggcaggcttgggtgtgggccgctgtgagggggccttgcagcgtctcttgtggggccggattgagatgggtcaactattcctgccttgaccaggccaggaaagagctggtagagactgtccagtgccaggggagtcaacaaccacctgcctggcccgaggcatgtgtcctcgaaccctgcccaccttactgggccgtaggggatttcgggccatgtagcgcttcttgcgggggggggctgcgcgagcgaccagtcagatgtgtggaggcccagggttctcttctgaaaacactgccgccggctagatgccgcgccggcgctcaacaaccggcagttgctcttgagacttgtaatcctcagccatgtccagcccgctgggaggtctcagaaccatcaagctgcacaagcgctggaggggcaggcttggccctggaaaacgagacttgcgtgcctggtgccgatgggctggaggcaccagtgacagaaggcccaggctccgtggacgagaagctgcccgccccagaaccatgtgtgggcatgtcttgcccaccagggtggggccatctggacgcaacaagcgctggcgagaaggcccccagcccctggggaagcattagaaccggagctcaggccgcccatgtgtggactccagcagctgggagctgctcagtcagctgcggtaggggcttgatggaactgaggttcctttgtatggactcagccctgagggttccagtacaggaggaactctgtgggcttgcctccaagcccggatcccgacgcgaagtgtgtcaggcagttccgtgccccgcaaggtggcagtataagctcgctgcgtgtagcgtaagctgcggccgcggtgtggtgcgccgcatactttattgcgccagagcccatggagaggacgacggcgaagaaattctgctggacacacagtgtcagggcctcccccgcccagagcctcaggaagcctgctctctggagccctgcccccccagatggaaagtgatgtctctcggtccttgtagcgcctcctgcggactcggtaccgctagacggtcagtcgcatgcgtgcagcttgaccagggccaggatgtggaggtggacgaggctgcatgtgccgcactcgtccggcccgaggcatcagttccttgtcttatcgctgattgcacatacaggtggcacgtgggcacgtggatggagtgctcagttagctgtggagacggcatacagcgccgcagagatacatgccttggtccccaggcgcaagcccccgtccctgccgacttctgccagcatctccccaagcccgtgaccgtaaggggttgttgggctggcccttgtgtgggacaaggtaccccctccttggtgcctcacgaagaggctgcggcccccggcagaacaacagccacccccgctggagcctctcttgagtggtcacaggccaggggcttgctgtttagtcccgcgcctcagcctcgccgattgctgcccggaccgcaggaaaacagtgtgcagtctagcgcgtgcggaagacagcatctggaacccactggaactatagacatgcgcgggccaggtcaagctgattgcgccgtcgcaattgggagaccacttggagaggtggtgaccttgcgggtgctggaatccagcttgaactgttccgctggcgatatgttgctgttgtgggggagactgacttggaggaagatgtgtagaaagctgcttgacatgacattttctagcaagaccaacacactcgtggtaaggcagaggtgtggccgccctggtggaggggttctgctgagatatgggagtcaactcgcacccgagacattctatcgagaatgcgatatgcagctgttcggcccctggggcgagatagttagcccttctctgtctccagccacatctaatgcaggtgggtgtcgacttttcatcaatgttgcaccgcatgctagaatcgccatccacgctctggcaacaaacatgggcgccggaacggagggggcgaatgccagttatatcctgatccgggatacccattcactgagaactactgccttccatggccagcaggtcttgtattgggaatcagaatcatcccaagcagagatggagttcagcgaggggtttctgaaggcccaggcatcactgaggggccagtactggactctccagagctgggtccctgaaatgcaggatccccagtcttggaaggggaaagagggaaca

SEQ ID NO: 5616 - DNA, 4281 bp, synthetic construct
  misc_feature 1..4281: note = source = /note="Description of Artificial Sequence: Synthetic coding sequence"
  source 1..4281: mol_type = other DNA
atgcaccaaaggcatcctagggcaaggtgccccccactgtgcgtagccggcatcctggcgtgcggtttcctgctgggttgctggggtccttcacacttccagcagtcctgtctgcaagcactcgagccccaggctgtgtctagctatctgtctccgggtgcaccgcttaaagggagaccaccctccccagggtttcagaggcagaggcagcgacaacgcagagccgcaggtgggatactacatctggagcttttagtggcggtcggtcctgacgttttccaggcccaccaggaggatacagaaagatatgtactgaccaacttgaacattggtgccgagctccttcgggatccttccctgggtgcccagttcagagttcacctggttaagatggttattctgaccgagcccgagggcgcaccgaacattacagccaacctaactagtagtctgctgagtgtttgtgggtggagccagacaattaatcctgaggatgacaccgatcccggtcatgcagacttggtcttatacatcacacggttcgacctggagctacccgacggtaaccggcaggttcgcggagtgacccagctgggcggtgcatgttccccgacatggagttgcctgatcaccgaggatacgggcttcgaccttggcgtgactatcgcacacgagatcggacattcttttggcctggagcatgatggcgctcccggatcagggtgcggaccgtcagggcatgtgatggcctccgacggggctgcgccccgcgccggactggcttggtccccgtgctcccggagacagctgctctccctccttagcgccggaagagcccggtgcgtttgggaccccccccgccctcagccaggttccgccggacaccctcccgacgcgcagccgggcctatactattccgccaatgagcagtgcagggtcgcattcggccctaaggccgtggcatgcacctttgccagggagcatctggacatgtgccaagctctctcctgtcacaccgaccctctagatcagtccagctgtagccgactgcttgtacctctgctcgatggcacagagtgcggcgtcgaaaaatggtgctctaagggaagatgcaggagcttggtggagctgacccctattgccgcagtacatgggcggtggagctcttgggggcctcgcagtccttgttcccggtcatgcgggggtggcgtggttacacgacgcagacagtgtaataatcctcgaccagccttcggcggacgggcttgcgttggagcagatctgcaggccgagatgtgcaatactcaggcatgcgagaaaactcaactggaatttatgtcccagcaatgcgccagaactgacggccagcccttgagatcctcacctggaggtgcatctttctatcattggggggcagccgtcccccactctcagggggatgccttgtgtcgtcatatgtgccgagcaattggtgaaagcttcatcatgaaaagaggggatagcttcttggacggtaccaggtgtatgccgtccggaccccgcgaggatgggacattgagcctgtgcgtttcaggcagctgtaggactttcgggtgcgacggaaggatggactcgcagcaggtatgggatcgttgtcaagtctgcggcggcgataattccacctgctccccaagaaagggctcattcacagctggaagagccagggaatacgtgacatttttgacggtgacacccaatttgacaagtgtgtacattgctaatcatcgccccctattcacccatttggctgtcagaattggcgggcggtatgtggtcgctggtaaaatgtctatatcgcctaacacaacttacccaagccttctcgaggacgggcgagtcgagtaccgtgtggcattgacagaggacaggctgccaaggttagaggaaatcagaatttggggccctctccaggaggatgcagacatccaagtctatcgaaggtatggagaggagtacgggaatttgacacgacctgatatcacattcacatactttcagccgaagcctaggcaggcgtgggtctgggccgctgttagggggccctgtagcgtttcttgcggcgcaggtcttcggtgggtgaactactcctgtctcgaccaggccaggaaggagcttgtggaaaccgtgcagtgtcagggatcacagcagccaccggcgtggccagaagcgtgcgtgctggaaccatgtcctccttactgggccgtgggtgattttggaccctgctctgcatcctgcggaggcgggctcagagagcgcccagtgagatgcgtggaggcgcaggggagcctgctcaaaaccctacccccggccaggtgccgggccggggcacagcaaccagccgtggctctggaaacttgcaaccctcagccatgtcctgcccgctgggaagtgtccgagccaagtagctgtacgtccgccggaggggctggtctcgctctggagaacgagacatgcgttcctggcgcggacggactggaagcgcccgtgacggaagggcccggaagcgtggacgagaagcttccagcccctgagccatgcgttggcatgtcctgccctcctggctggggacacctggacgctacctcggccggcgagaaggccccttctccttggggctcgatcagaaccggcgcgcaggcggcccatgtatggacacccgccgcaggctcatgttcagtcagttgtggcaggggccttatggagctgcgctttctctgtatggattccgctctacgggtgcctgtgcaggaggaactttgcggcctggcgtcaaaacctggctctcgccgggaagtctgtcaggccgtgccatgcccggccaggtggcagtacaagctagcagcttgctctgtgtcttgcggccgaggagtggtgcggagaattctgtactgtgctagggctcacggagaggacgatggggaggagattctgctcgatacacagtgccaggggctgccaaggcctgagccccaggaagcttgctctttagaaccgtgtcctccacgctggaaggtcatgtccctaggaccgtgtagtgcctcctgcggactgggcaccgcaaggaggagtgtcgcctgcgttcagctggatcaagggcaagatgttgaagtcgatgaggccgcctgtgccgcattggtcaggcccgaagctagtgtcccctgtctgatcgctgattgcacttataggtggcatgtcggcacatggatggagtgttccgtgagctgcggagacgggatccagcgtcggcgggatacctgcctaggcccgcaggctcaggccccggtgcctgccgacttctgccaacaccttcccaagcctgtcacggtccgagggtgttgggccggcccttgcgtggggcagggcacaccctcattggttcctcatgaggaagcagcagcccccggacggacgaccgcaacccctgccggggctagcctagagtggagtcaggcacgtggacttctattttcgcccgcgcctcagccacgaagattgctacctgggccacaggaaaatagtgtgcagtcgtccgcctgtggaagacagcatctggaacctaccggaactatcgatatgaggggacctggtcaagcggattgtgccgttgctattgggagaccactcggcgaagtggtgaccttgagggtgctggaatcctccctgaactgcagcgcaggcgacatgctgcttttatggggacgcctgacctggcgaaaaatgtgtcgcaaacttctcgacatgactttcagtagtaaaacaaatactctggtggtgcgacaacggtgtggaaggcctggtggaggagtgctgttgcggtacggaagccagctagctcccgagacattctaccgcgagtgcgacatgcagctgttcggaccctggggcgagatagtgagtccaagtctgtctccagcaacctctaacgccggaggttgtcggcttttcatcaacgtggcaccgcacgcccgtatagccattcatgctctggccactaatatgggagcaggcaccgaaggcgcaaacgcttcgtacatcttgatcagggacacacactccctgagaacaacagcctttcatggacaacaggtcctgtattgggagagcgaatcttcccaggctgagatggaattttccgaaggatttctgaaggcccaggctagcctcagaggacagtactggacactgcagtcatgggtgcccgaaatgcaggatcctcagtcctggaagggcaaagaaggtacc

SEQ ID NO: 5617 - DNA, 4281 bp, synthetic construct
  misc_feature 1..4281: note = source = /note="Description of Artificial Sequence: Synthetic coding sequence"
  source 1..4281: mol_type = other DNA
atgcatcagcgccaccctcgggcccggtgccctccactgtgcgtggctggaatcctcgcctgcggattcctgctgggatgctggggcccatcgcactttcaacaatcgtgtctgcaggctctcgagccgcaagcagtgtccagctacctctcccctggcgccccgctcaaaggacgccccccaagccctggattccaacggcaacgccagcggcagcggcgagcagcagggggaatcctgcatctcgagctgctcgtggcagtgggacctgacgtgtttcaggcccaccaggaagatactgaaagatacgtcctcactaacttgaacattggggccgaactgctccgtgacccatccttgggagctcagttcagagtgcaccttgtgaaaatggtgattctcactgaaccggagggcgccccaaatatcacggccaacctcacttcctcgctgctctccgtctgcggctggtcacagaccatcaacccggaagatgatactgaccctgggcacgcggacctcgtcctgtatatcactagattcgacttggaacttcctgatggaaatcggcaggtccgcggggtgacccagctgggcggagcgtgtagcccgacttggtcgtgtctcatcactgaagatactggcttcgacctgggagtcaccattgctcatgagattggccacagcttcggcctggaacacgatggagcgccgggctccggctgtggcccaagcggacatgtgatggcctcggatggtgccgcccctcgcgcgggtttggcctggtcaccgtgttcccgccgacagcttctgtcgctcctgagcgcggggcgcgctcggtgcgtgtgggacccacctaggcctcagccgggctccgcggggcacccgcccgatgcccaacccggactgtactactccgcaaatgaacaatgccgggtggcctttggacccaaggcggtggcctgtacgttcgccagggagcatctcgacatgtgccaagctctgtcgtgccacaccgaccccctcgaccagtcctcctgctcccggctgctggtgcccctcttggacgggactgagtgcggcgttgagaaatggtgctccaagggcaggtgtcgctccctcgtggaactgacgccgatcgccgccgtccatggaagatggtccagctggggacctcggtccccgtgcagtcgatcgtgcggaggaggtgtggtgaccaggaggcgccagtgcaataatccgaggccggcgttcggaggcagagcctgcgtcggagcagatctgcaggcagagatgtgcaatacgcaagcgtgcgagaaaacccagctcgaattcatgtcccaacagtgcgccagaactgatggacagccgctgcgctcgagccccggaggagcctccttttaccattggggagcggccgtgccccactcgcagggtgacgcactctgtagacatatgtgtcgcgctatcggggaatcatttatcatgaagcggggagactctttcctcgacggcaccagatgcatgccgagcggaccacgagaggacggcactctgtcactgtgcgtctctggaagctgcagaaccttcggctgcgacggaagaatggatagccagcaggtctgggaccggtgtcaggtgtgtggcggtgacaactcgacctgttcgccgcgcaaaggctcctttactgccggacgcgccagggaatacgtgacctttttgactgtgaccccaaacctgacttccgtgtatatcgccaatcatcggccgctgtttacgcatctggccgtcagaatcgggggacgatacgtcgtggcagggaagatgtcaatctcgccaaatactacttatccgtcgctgctggaggatggcagggtggagtaccgggtcgctctgaccgaggaccgattgccaaggcttgaggagatcaggatttggggaccgcttcaggaggatgccgatatccaagtctaccgtcgctacggagaggagtacggaaacctgacccggcctgacatcactttcacttacttccaacctaagccccgccaggcgtgggtgtgggccgccgttagggggccgtgctcggtgagctgtggcgcaggactccgctgggtgaactactcttgcctcgaccaggctcgcaaggagctggtggagactgtgcagtgccaaggtagccaacagcccccggcttggccggaggcatgcgtcctggaaccgtgcccaccgtactgggctgtgggagacttcgggccgtgttctgcgtcctgcggaggaggacttagagaaaggcccgtccggtgcgtggaagcccaaggttccctgttgaaaacccttccacctgcaaggtgccgtgcaggcgcccagcagccagcggtggcgttggaaacgtgcaacccccagccatgcccggcccgatgggaggtgtctgaaccctcttcctgtactagcgccggaggagcaggactggcccttgaaaacgaaacctgcgtcccgggcgccgatggcctcgaggcaccggtcaccgagggaccgggatcggtggatgagaagttgccggcacctgagccgtgcgtcggcatgtcgtgccctccaggttggggtcatctcgacgcgacttccgccggcgaaaaggcgccgtctccgtggggcagcattcgcacgggagcccaagcggcgcacgtgtggactccggctgcgggttcatgctccgtaagctgcgggcgcggactgatggagcttaggttcttgtgtatggactctgcccttagagtgccagtgcaagaagagctctgcgggctcgcgtcgaaacctggatcaagacgggaagtatgccaagccgtgccctgtccggcgcggtggcaatacaagctggctgcctgctcagtgagttgcggccgaggagttgtgcgccggatcctgtactgcgcccgcgcgcacggagaggatgatggagaagagatcctgctggatacgcagtgtcagggtctgccgcgcccggaaccgcaagaggcgtgcagccttgaaccatgccctcctagatggaaggtgatgagccttggaccgtgctccgcgtcctgtggtctgggaaccgcgcggagatctgtggcttgtgtccaactcgaccagggacaagacgtggaagtcgatgaggcggcttgcgcagcgctggtgaggccggaagcgtccgtgccatgtctgatcgccgattgcacttaccgatggcacgtgggcacctggatggaatgttcagtctcgtgcggcgatggaatccagcggcgcagggatacttgtctgggacctcaggcccaggcccctgtgcctgcggacttctgccagcatctgccaaagcccgtgaccgttcgcgggtgctgggctgggccatgcgtggggcaggggacgccctcgctggtcccacacgaggaggccgcagcaccagggcgcactaccgcaactccagcaggggcctcacttgaatggagccaagcgcggggcctgttgttctcgcctgcccctcaacctcgccggctcctgcctggaccgcaagaaaactccgtccaatcgagcgcgtgtggacggcagcatctggagccgacgggaaccatcgacatgcggggtccgggtcaggcggactgtgctgttgccatcggccgcccactgggagaggtggtgacccttagagttttggaatcgtcccttaactgcagcgcaggggacatgctgctcctctggggtcggttgacgtggcgcaagatgtgccgcaagctgctggatatgaccttctcgtccaagaccaacactttggtcgtgcggcagcggtgcggacgcccggggggaggggtgctgttgcgctacggatcccagctggcaccagaaactttctacagagaatgcgacatgcagctgttcggaccgtggggagagatcgtctccccaagcctgtcgccagctactagcaacgccggagggtgtcggctcttcatcaatgtggcgccgcatgcccggatagccatacacgcactcgcgactaacatgggagccggaaccgaaggagcgaatgcgtcatacatcctgatccgggacactcatagccttcgcactactgcctttcacggacagcaagtactctactgggagtcagagagctcccaggcagaaatggagttttcggaaggcttcctgaaggcccaagcatctctgcggggccagtactggacgctccaatcctgggtgccggaaatgcaagacccacaatcgtggaaaggaaaggaaggaacc

SEQ ID NO: 5618 - DNA, 4281 bp, synthetic construct
  misc_feature 1..4281: note = source = /note="Description of Artificial Sequence: Synthetic coding sequence"
  source 1..4281: mol_type = other DNA
atgcatcaacggcatccaagggctcgctgcccgccattgtgtgttgccggaattttagcttgtggattccttttaggctgttggggtccaagccactttcaacagtcatgccttcaagcactagaaccgcaagcggtttcctcatatctttccccaggagcgcctctgaagggacgacccccttcacccggctttcagagacagcgccagcgccagcgtcgtgcggccggaggcattttacacttggaattactggtggcagtcggaccggatgtcttccaggcgcaccaagaagacacggagagatacgttttaacaaatctaaatattggagctgagcttctgcgtgatccgtcactgggtgcccagtttcgtgtacacttggttaaaatggtgattctcaccgaacctgaaggggcacccaatataacagcaaatctgactagttccctactttctgtctgcggttggtctcagacaattaatccggaagacgacaccgacccgggacatgcagatttagtgctttatattacacgtttcgacttagaactgccggacggcaacaggcaggtgcgtggtgttacacaattaggcggtgcgtgcagcccaacatggtcttgtctgattaccgaagatacggggttcgacctgggggtaacgattgctcatgagatcggccattcttttggccttgagcatgatggcgccccaggtagtgggtgcgggccttccggccatgttatggcctcagacggtgctgcaccgcgggcgggcttagcttggtcaccgtgtagtcgaagacaactgttaagtcttctttccgcagggcgagccagatgtgtatgggacccgccaagaccccaacccggatcggccggccatcctccggatgcccaaccgggactctactattctgctaatgaacaatgtcgcgtggcgttcggtccgaaggcggtagcatgcacatttgcgcgtgaacacttggacatgtgtcaagctttgtcttgtcatactgatccattagatcagtcttcatgcagccgcttgcttgtgcctcttctggatggcactgagtgcggcgttgaaaaatggtgttcaaaaggccgttgtcgttctctggtggaacttactccaattgcggcggtgcatggcagatggtcctcttggggaccgcgctcaccttgtagccggtcttgtggcggaggtgtcgtaacccgcaggcgccagtgtaacaatcctagacctgcctttggcgggcgtgcctgcgtcggggccgatctgcaggctgagatgtgtaatacccaggcatgcgaaaaaacacaattagagtttatgtcacagcagtgcgcgcgtacagatggccagcctttgagatcttccccgggcggcgccagtttctaccattggggcgcggccgtcccgcattcccagggagacgcgttatgcagacatatgtgtagagcgattggcgaatcgtttatcatgaaaagaggcgactctttcttggacggaacgcgctgtatgccgtcaggacctcgtgaagatggcactttaagcttgtgcgtgtcaggctcgtgcagaacatttggctgcgatggtcgaatggacagtcaacaggtatgggatagatgtcaggtctgtggtggcgataattcaacttgctcacctagaaaagggtcttttactgccggacgagcccgtgaatatgtgacgtttctgaccgtaacgccgaatttaacctccgtatatattgccaaccaccgccctttatttactcaccttgccgttcggattggcgggaggtatgtcgttgcgggcaaaatgtctatcagccctaatacaacgtacccgagcttattagaagatggacgagtcgagtatcgcgtagcgctgactgaggataggctcccgcgtctggaagagataaggatctggggacccctacaggaagatgccgacattcaggtttaccgcaggtatggtgaggagtatggtaacctaacacgtccggatataacatttacctactttcagccgaaaccgcgacaagcgtgggtttgggcagcagtacgtgggccatgttctgttagctgtggtgcaggtttacgatgggtcaactattcttgtctggaccaggcaagaaaagaattagtggaaactgttcagtgccaaggcagccaacagcctccggcgtggcctgaagcttgcgtgttagaaccgtgccctccgtactgggctgtcggcgattttggcccgtgcagtgcaagctgcggaggcggacttcgcgagcgcccagtgagatgcgtggaagcacaaggaagcttactgaaaaccttgccaccggcacgatgcagagcgggtgcccaacagccggccgtagctctggaaacttgtaatccgcagccatgccctgcacggtgggaagtttctgagccatcgagctgtactagcgctggtggagcgggcttggccttggaaaatgagacctgcgtaccgggcgccgatgggctagaggcgccagtcacagagggcccgggatcagtggacgaaaagctcccggctccggaaccgtgcgtaggaatgagctgtcctccgggatggggtcatttagatgctacatctgcgggggaaaaagctccttctccttggggctcaattcgtacaggagcgcaagctgctcatgtttggactccggctgcgggcagttgttccgtttcctgtggtagaggcttgatggaactcagatttctttgtatggattcagcccttcgagtgccggtgcaggaagaactgtgtggattggcaagcaaaccggggagccgaagagaagtgtgtcaagcagtgccgtgtccggctcgttggcagtacaaacttgcagcttgcagtgtcagttgcggtagaggcgtggtgcgtcgtattttgtactgcgcacgtgcccatggcgaagatgatggagaagaaattttattagatacccaatgccagggacttccgcgtccggaacctcaggaagcctgctcattggagccatgtccgccgagatggaaagttatgtctcttggaccatgcagcgcttcctgcgggttgggaactgcacgtcgctctgtcgcatgtgttcagctcgatcagggccaggacgtcgaagtggacgaagctgcttgcgcagcgctggttcggccagaggcgagtgtgccgtgtcttattgcggattgcacgtaccgctggcatgttggcacatggatggaatgctcagtcagctgcggcgacgggatacaaagaagaagggatacatgcttagggccgcaagctcaagcgccagtcccggctgatttttgccaacatttgccgaaaccggtgaccgtccgcggctgctgggctggaccgtgcgtcggacaaggcacgccgtcgttagtaccacatgaagaagctgccgccccgggcagaacgacagcaactcccgctggcgcgtccttggaatggagccaagcgcggggccttcttttttcaccggcaccgcaaccacgacgtcttctgccaggaccgcaagagaactcggttcaatcctctgcctgtggaagacaacatctggaacctaccggaacgatcgatatgagagggccaggacaagccgactgtgccgtagctattgggcgccccctgggcgaagtggtaaccttacgcgttctggaaagttctcttaactgctctgccggagatatgctattactttggggtaggctaacctggcggaaaatgtgccgtaaattattagacatgactttcagttcaaaaacgaacacactggttgtgcggcagcgatgtggacgccctgggggcggtgtcttgttaagatatggcagccaactcgcaccagaaacgttctatcgcgaatgtgacatgcaactttttggaccgtggggcgaaatcgtttctccgagcctgtcccctgctaccagcaacgcgggaggttgccgcttgtttatcaatgtggcaccgcatgctaggattgcaatccacgcgttagctacaaatatgggagcaggaacagaaggagcgaacgcctcctatatcttgatccgtgatacacatagcttgcgcaccacagcgtttcacgggcagcaggttttatattgggaaagtgaatcaagccaagctgaaatggagttctcagagggctttttgaaagcgcaagcatctttacgtggtcaatactggacccttcagtcgtgggtacctgagatgcaggatccgcaaagctggaagggaaaagaggggact

SEQ ID NO: 5619 - DNA, 4281 bp, synthetic construct
  misc_feature 1..4281: note = source = /note="Description of Artificial Sequence: Synthetic coding sequence"
  source 1..4281: mol_type = other DNA
atgcaccagcgacatcccagagccaggtgtccgcctctgtgcgtggctggtattctggcgtgtgggtttcttctcggctgttggggcccctcacactttcagcagtcttgtttgcaggctctggagccacaggcggtctcctcatacctatcccctggggcacctctcaaagggcgtcctcccagccctggttttcagagacagagacagcggcaacgcagagccgccggcggaattctacacctggagctgcttgtagctgtaggtcccgacgtcttccaggctcaccaagaagatacggaaaggtatgtgctgaccaatctcaatattggggcggagctgctgcgcgatccttcattgggcgcacagtttcgggtacatctcgtcaagatggtgatcttaaccgagccagaaggcgcaccaaacattaccgccaatctcactagcagcctactgagcgtgtgcggctggtctcagacaatcaacccggaggatgacactgaccctggacacgccgacttagtgctctacattacaagattcgatttggagctcccggatggcaacagacaagtgcgaggtgtgacccaactgggcggtgcgtgcagtcccacttggtcatgtctcatcaccgaagatacgggatttgaccttggtgtaaccatcgcacacgagattggacactcatttggactggaacacgatggtgcaccaggttctggctgtggtccttcagggcacgtgatggctagtgatggcgccgcacctcgggctggtctcgcttggtcaccctgttcccgccgacagctgctgagcctgctgagtgcaggccgtgcaagatgcgtatgggacccccctcgaccccagccaggcagtgccggacacccccctgacgcgcaacctggcctgtattatagcgccaatgaacagtgccgcgtggcattcggaccaaaagcagtcgcatgtaccttcgctcgcgaacacctcgacatgtgtcaggccctttcctgtcataccgaccccttggatcagagttcttgtagtcgcctcttggtccccctcctggatggcacagagtgtggtgtggaaaagtggtgctccaaaggtcggtgccgcagtctggttgagttgactccaattgcagccgtccacgggcgctggtcatcctggggccccaggtctccgtgctcaaggtcttgcggtggtggagttgtcacacgccgcagacagtgtaacaatcctcggcccgccttcggcggccgggcctgtgtgggggcagatcttcaggcggagatgtgtaacacacaggcttgtgagaagacccaactagagttcatgtcgcagcagtgtgcacgaactgatggccagcctttgcgatcgagcccaggtggagccagcttttatcactggggtgctgctgtgccccactctcagggcgatgccctctgccgtcatatgtgccgagccattggggagtcgttcatcatgaaacggggggactcattcctggacggcaccagatgcatgccttctgggcctcgggaggacggcaccctcagcctttgcgtgagcggaagctgtagaacgttcggatgcgacggacgtatggatagtcagcaggtgtgggacagatgccaggtttgtggtggggacaactcgacctgttcaccacgcaagggttcttttaccgccggtcgcgcccgtgagtacgtgacatttttgaccgttactcccaacttgacatccgtttacattgctaatcaccgcccgctgttcacacacttggcggtgaggattggcggcaggtacgttgttgccggaaagatgtcaattagcccgaatacgacttatccaagtttgttagaagacggcagggtggagtacagagtggccctgactgaggacagactgccacgactggaggaaatccggatatgggggcccctgcaagaggatgctgacatccaggtttaccggcggtacggcgaggaatatggaaacctgactcggccagatattaccttcacatacttccagcctaagccccgccaggcctgggtgtgggccgcagtgcgcggtccctgtagcgttagctgtggcgcgggactccggtgggtgaactactcctgtctcgatcaggctaggaaggagctggtggagaccgtgcagtgccaaggatctcagcagcccccagcgtggcccgaagcttgtgtgctcgagccctgccccccttattgggctgttggcgacttcggcccctgtagcgcctcttgtggaggtgggcttcgcgagcgacccgtgcggtgtgtcgaagcgcaaggatctctcttgaaaacactgccccccgcccgttgcagggccggcgcccagcagccggctgtcgccttggagacatgtaatcctcagccttgtcctgcacgatgggaggtttccgagccaagttcatgtaccagcgctgggggggccggattagcccttgagaacgaaacttgtgttcccggagcagacggactggaagcgccagtcactgaaggtcctggctccgttgacgagaagctcccggcacctgaaccctgtgttgggatgagctgtccgccaggatgggggcacctggatgctacctccgccggggagaaggcaccttcaccttggggatctatccgcacaggagcacaggcggcccacgtatggactccggccgcgggatcctgttccgttagttgcgggcgcgggttaatggagctgcggttcctatgcatggattctgctctgagggtcccggtgcaggaagagctgtgtggcctggctagtaagcccgggtcccgccgcgaagtgtgtcaggccgtcccttgtcccgctagatggcaatataagctggctgcctgctctgtcagctgcggcagaggggtagttagacgcatcttatactgtgctcgggctcatggggaggatgatggagaggagatcctgctggatacccagtgtcaaggccttccccgcccagagccccaagaagcatgctcgctggagccttgcccaccgaggtggaaggtgatgagtttgggtccttgcagcgcttcttgcggcctgggtactgccaggcggtctgttgcctgcgtgcaactggaccaggggcaggatgtagaggtggatgaggctgcatgcgccgctctagtgagacctgaagcctcagtcccctgcctgatagccgattgtacctacagatggcatgtggggacctggatggagtgtagcgtcagttgtggtgacggtatacaacgcagaagggacacctgtttaggaccgcaagcacaggcacctgtgcccgctgacttttgtcagcacctgcctaagcctgtcactgtccgaggatgctgggccggtccatgcgttggacaggggactccgagtctcgtgccccacgaagaggctgccgcaccaggccgcaccacagcgacaccagctggcgcgtccctcgagtggagtcaggcccgaggactgcttttctctccagcgccacaacctaggagactgctgcctggaccgcaggagaactccgtgcagtctagcgcctgtggtagacagcacctcgaacctactggaactatcgacatgcgggggcctggccaggcggactgcgcagtggcaatagggcgcccgctgggggaggtggtgaccctgagggtgctggagtcctcactcaattgttccgcaggcgacatgctgttgttgtggggaagactaacttggcgaaagatgtgtaggaagcttctggatatgaccttttccagcaaaactaatactctcgtagtccgccagcggtgcggccgccccggaggaggagtcctgttgcgatatggtagtcagctggccccagagacattttatcgtgagtgcgatatgcagctgtttgggccatggggcgagattgtcagcccgagtctgagcccagccacttcgaatgcaggtggctgtagacttttcattaatgtggccccgcatgctcggatcgccattcatgctctggccacgaacatgggtgctggcacagagggcgcaaacgccagctatattctgattcgggacacccactctcttaggaccaccgcatttcatggtcagcaggtgctttactgggagtccgaaagcagtcaggcagagatggagttctcagagggatttctgaaagctcaagcctccttgcgtggacaatattggactctgcagagttgggtgccggagatgcaggaccctcagtcatggaagggtaaggaagggaca

SEQ ID NO: 5620 - DNA, 4281 bp, synthetic construct
  misc_feature 1..4281: note = source = /note="Description of Artificial Sequence: Synthetic coding sequence"
  source 1..4281: mol_type = other DNA
atgcatcagcggcatccccgcgcgagatgtccaccgctttgtgtcgccggtattcttgcatgcggcttcttgcttggatgttggggtccgtcacactttcagcaatcttgcctgcaagccttggagccccaggctgtgtcgtcctacctctccccaggcgctcctcttaagggtcggccacccagcccaggcttccaacgtcaacgacaaagacaacggcgagcagcaggtgggattctgcacctggaacttcttgtggcggtggggccagacgtgttccaggcacaccaggaagatactgaaaggtacgtactcactaaccttaacatcggagcggagcttcttagggatccctcgcttggcgcgcaatttagggtccatctcgtcaagatggtgatccttaccgaacctgaaggtgcaccaaatatcactgcgaacctgacctcgtccctcctgtcagtgtgtggatggtcgcaaactataaaccctgaggacgatactgacccagggcatgctgatcttgtcttgtacatcacgaggtttgatctcgaactccccgatgggaacaggcaagtgcgcggggtgacgcaactgggtggagcatgttcgcccacctggtcctgtctcattactgaggatactggctttgacttgggtgtcaccattgcccatgagataggacactcattcggactcgaacacgacggagcacctggcagcgggtgcgggcctagcggtcacgtcatggcctccgatggggcagctccgcgcgcaggactcgcctggtcaccgtgctcccgtagacaactgttgtcgctgctgtccgcaggtcgcgcgcgatgtgtctgggaccccccacgccctcaacctggttcggccgggcatccccctgacgcccaacctggattgtattactcggctaatgaacagtgccgggttgcattcgggccaaaggcagtggcctgtacctttgcgcgcgaacatctggacatgtgccaagcactgtcctgccataccgacccgctcgaccagtcgtcgtgtagcaggctgttggtgcccctgctggatgggactgagtgtggtgtggaaaagtggtgctcgaagggaagatgccggagcctggttgaattgaccccaattgcagccgtccatggtagatggtcgagctgggggcccaggagcccatgcagcagatcctgtggcggaggcgtggtgacgcgtcgtcgacaatgcaataaccctaggcctgctttcggaggaagagcctgtgtgggcgcggatcttcaggccgagatgtgtaatactcaggcctgcgaaaagactcagcttgagtttatgtcccagcaatgcgcacggacggacggacagcctcttagatcctcacccggaggagcgtcattttaccactggggcgccgcagtgccacacagtcagggtgatgcgctgtgtcgtcacatgtgtcgagcaattggagagtcatttatcatgaagcgaggtgattcgtttctggacgggacccgctgtatgccctccggtccacgggaggatggcaccctttctctttgcgtttcagggtcctgtcggacctttggatgtgacggtcgtatggactcacaacaggtgtgggataggtgtcaagtttgcggaggagacaatagcacctgttcccccagaaagggttcgttcactgcaggaagagctcgggaatacgtgaccttccttaccgtgacgcctaaccttactagcgtgtacattgccaatcaccgaccccttttcacgcacttggcggtgcgtatcggtggccggtacgtggtggcaggtaagatgtcaatctcccctaacacgacttacccatccctgcttgaagatggaagagtcgaatacagagtggccctgaccgaggaccggctccctcgcctggaagagattcgaatttggggcccactccaggaggatgccgacattcaagtttaccggcgctatggagaagagtacggaaatttgacccgccctgatatcaccttcacctacttccaaccaaagcctagacaagcatgggtgtgggccgcagtgagggggccctgtagcgtgtcctgtggggcgggactcagatgggttaactactcctgcttggatcaagcgcgaaaagaattggtcgagacggtgcagtgtcaaggctctcagcagccacctgcctggccagaggcttgcgtgctggaaccatgcccgccatactgggccgtgggtgattttggaccctgttccgcgagctgtggaggaggacttcgagaacgaccggtgcgctgtgttgaagcacaggggtccttgcttaagactcttccgccggcacgttgcagggctggagcccagcagcctgcagtcgcacttgaaacttgtaacccgcagccttgtcctgcacgctgggaagtctcggaaccctcgtcatgtacctcggccggcggagcaggtctggcgctcgagaatgaaacctgtgtgcctggagcagatggcctcgaagcgccagtcaccgaagggccaggttcagtggacgagaagctgcctgcaccagaaccgtgcgtcgggatgtcatgtcctcccggttgggggcatctggatgcaacctcggcaggcgagaaggcaccgtcgccttggggttccatccgaacgggcgcgcaggccgcacatgtgtggactccagcggcaggttcatgttctgtgtcttgtggaagaggtcttatggaacttagattcctgtgcatggattcagcacttcgagttccagtgcaggaagaactctgtgggctggcatccaagcccggatcgagacgagaagtgtgccaagcagtcccttgtccggctcgctggcaatacaagctcgccgcatgttcggtgtcctgtggccgtggagtcgtgcgccggattctgtactgtgcccgcgcgcatggagaggatgatggagaggaaatcctgcttgatacccaatgtcaaggtttgcctcgacctgaaccacaagaggcgtgctcgcttgagccttgtcctccccggtggaaggtcatgtcactgggaccgtgcagcgcttcctgcgggctgggaactgcgagacgctccgtggcctgtgtgcaactcgaccaaggacaagatgtggaggtggatgaagcagcgtgcgcagcactggttagaccagaagcatcagtgccttgcctgatagccgattgtacctaccggtggcatgtgggaacctggatggaatgttcagtgagctgtggggatggaatccagagacgtagggatacctgtctcggccctcaggcacaggcacccgtacctgccgacttctgccagcatctgcctaagccagtgactgtgcggggatgttgggccggaccttgtgtcggccaaggcactccatcgcttgtcccacacgaagaagcggctgcacctggccgtactactgccaccccggccggagcttcgctcgagtggtcgcaagccaggggactgctgttctcccctgcacctcagcctcgacggctgctccctggaccacaagaaaattcggtgcaatcctcagcatgtgggcgtcaacatttggaaccgaccggcaccattgatatgagaggaccgggtcaggcagattgtgctgtcgcaatcggaaggcctcttggcgaagtcgtgaccctcagagtgctggaatcaagccttaactgctccgcaggagatatgctgcttttgtggggtaggcttacttggcggaaaatgtgtcggaagctgttggatatgaccttttcgtcgaaaactaacaccttggtggtcaggcagcgatgcggacgtcccggaggaggagtgcttctgcgttacggatcgcagcttgcacccgaaactttttaccgggaatgtgatatgcaactgtttggaccgtggggcgaaattgtctccccctccctgtctcccgcaacgagcaacgctggaggctgtcggctgtttatcaacgtggccccccatgcgaggattgctatccatgccctggcgactaacatgggggcagggactgagggagctaacgcaagctacattcttattagagacactcattccctgcgcaccactgcatttcatggtcagcaggtcctttattgggagtcagagtcctcgcaagcagaaatggaattctcggagggctttcttaaggcacaagctagcctgagaggacagtactggaccctccaaagctgggtccccgagatgcaagacccacagtcttggaaaggaaaggaaggtacc

SEQ ID NO: 5621 - DNA, 4281 bp, synthetic construct
  misc_feature 1..4281: note = source = /note="Description of Artificial Sequence: Synthetic coding sequence"
  source 1..4281: mol_type = other DNA
atgcatcagaggcatccaagagccaggtgtccaccgctgtgtgtggctggcattctggcttgtggttttctcctgggctgctgggggccaagtcacttccagcaatcctgcctccaagccttggagccgcaggctgtatcttcatacctgtcccctggggctccactgaaaggcaggccgccttcccctggattccagcgccagcgacaacggcaacgaagagccgcaggtggcatcctccacctggagctgcttgttgccgtaggccctgatgtgtttcaagcccaccaggaagatacggagcgatacgtactgacaaacttgaacattggtgctgagctgctgcgcgacccaagcctgggcgcccagttcagagtgcacctggtcaagatggtcatcctgaccgaaccagagggcgccccaaacataactgcgaacttgacgtcttcattgctgtcagtctgtggatggtctcagaccatcaatccagaggatgacaccgacccagggcacgctgacttggtactctacataacacggtttgatctggaactccccgatggcaataggcaggtcagaggggtgacccaactcggaggtgcttgcagccctacctggtcatgcttgataacagaagatactggctttgacctgggtgtcacaatcgctcacgaaattggccactcattcggcttggagcacgacggcgcgccgggcagtggatgcgggccaagtggacacgttatggcctccgacggcgcggccccaagggcagggctcgcctggtccccatgcagtcggaggcagctgctcagcctgctgtcagcaggcagggcccggtgcgtgtgggatccccccaggcctcagccaggctcagcgggtcacccccccgatgcccagcccggcctgtactactccgctaacgaacaatgccgggtggcgtttgggccgaaggctgtggcctgcacattcgcccgcgaacacctggacatgtgtcaggccttgagttgccataccgatccacttgaccagtcttcctgtagcagactgctcgtcccactgctcgatggaactgagtgtggggtagagaagtggtgcagtaagggacggtgtcggtctcttgttgagcttacaccaattgctgctgtgcacggacggtggtcatcctggggcccgcggtcaccttgctctaggtcttgcggaggaggagtcgtaactcgcagaagacagtgcaacaatcctaggcccgcattcggcggtcgggcatgtgtgggtgcagatctccaggcagagatgtgcaatactcaagcatgtgaaaagacgcagctggagttcatgagccagcagtgtgctagaaccgatgggcagcctctcaggagcagtcctgggggcgcttccttctatcactggggagccgcagtgccacatagccagggggatgcactctgcagacacatgtgtcgagccatcggagagtctttcattatgaaaaggggcgattcttttctggatggtactaggtgtatgccttctggaccacgggaggacggaacactcagcctctgcgtgtcaggatcatgtcgaacattcgggtgtgacgggcgcatggacagccagcaggtttgggaccggtgccaagtgtgtggcggcgacaacagtacctgtagtccaaggaagggatcttttacggccggtagggctcgggaatatgtaaccttccttacagtgacccctaatttgaccagcgtgtacatcgccaaccatcggccgctgttcacccatctggcggtgcgcataggtggcaggtacgttgtggccggtaaaatgtctattagcccaaataccacctacccaagcctccttgaagacggccgagtggaatacagagtggctttgactgaagatcgcctgccccgacttgaggagattaggatctggggtccactccaggaagacgcagacatccaagtgtatcgcagatacggcgaggagtacggaaatctgacaagacccgatatcacattcacatatttccagccaaagccccgacaggcctgggtctgggctgctgtacggggaccttgctccgtgtcctgcggcgcagggttgcgctgggtgaattattcttgcctggatcaggcacgcaaggagctggtggagaccgtccagtgtcaggggtctcagcagccacctgcctggcccgaagcctgtgtgcttgaaccttgtcccccgtattgggctgtaggcgattttggcccatgctcagcttcatgtggcggaggcttgagggaacgcccggtgagatgcgtggaggcacaaggttcattgctgaagacccttccccccgctcggtgcagagcgggagctcagcagccagctgtcgcgctggagacctgcaacccccaaccctgtccggcacggtgggaggtgtctgagcctagttcttgtaccagcgctggcggcgcaggtttggccctggaaaatgagacctgtgtgcccggtgctgatgggctggaggctcccgtcaccgagggaccagggtctgtcgacgagaagctgccagcaccagagccctgtgtcggtatgtcctgtcctccgggttggggacacctggatgccacctctgccggcgaaaaggctccttccccgtggggtagcattagaacaggtgcccaagcagcgcatgtttggacacccgctgccgggtcttgtagtgttagttgtgggcgcggcctgatggaattgcggtttttgtgtatggattccgcattgcgcgttcctgtgcaggaggagttgtgcggactcgcctctaaacccggctcaagacgggaggtatgtcaggccgtcccgtgtccggccagatggcaatacaagctcgctgcatgttctgtttcctgcggccggggagtggtccggcgaatcctgtactgtgcccgggcccacggcgaagacgacggcgaggaaatcctgctcgacactcagtgccaggggttgccccggccagaaccccaggaggcctgtagcctcgagccttgcccccctagatggaaggttatgagcctgggtccttgtagtgctagctgtgggctggggaccgctaggaggagcgtggcatgtgttcagctggaccagggtcaggacgtcgaagtggatgaggcagcatgcgccgcgctggtgcgaccagaagcgagcgtgccgtgcttgatcgcagactgcacttaccgctggcacgtcggcacctggatggagtgttctgtctcatgcggggacggaattcaaaggagacgggatacatgcttgggtccccaggctcaggcgcccgtccccgcagatttctgtcagcatctccctaaacccgtcacagtgaggggatgctgggcggggccttgcgtgggtcagggcacgccttcacttgtgccccacgaggaagctgccgccccaggcaggaccacagctaccccagctggcgcctctttggaatggtctcaggctagaggcttgctcttttcccctgccccacaaccccggcggttgctccctggtccgcaggaaaatagcgtgcaatctagtgcttgcgggagacagcacctcgagccaactgggacgattgacatgagaggtccagggcaggctgattgcgccgtggctattggaagacctctcggggaagtcgtaacccttcgcgtgctcgagtcctccttgaattgttctgccggtgatatgctcctgctgtggggccgccttacctggagaaagatgtgcaggaagctcttggacatgaccttctcttccaaaaccaacaccctcgtggtgagacaacgatgcggacggccaggcggcggcgtactgctcaggtacggctctcagctggcgccagaaaccttctacagggaatgcgacatgcagctcttcggaccttggggcgagattgtctccccctctcttagccccgcaacctccaatgctgggggatgcagactgttcataaacgtggccccccacgcccgcatagccatccacgctctggccaccaacatgggagctgggactgagggagcaaacgccagctacatactcatcagagatacccactccctgagaacgacagcattccatggacagcaggtgctgtattgggagagcgagtcctcccaagctgagatggagtttagtgagggtttcctgaaggcacaggcgagcctgcgggggcagtattggacccttcagtcttgggtgccagagatgcaggaccctcagtcttggaaaggaaaagaaggtacc

SEQ ID NO: 5622 - DNA, 4281 bp, synthetic construct
  misc_feature 1..4281: note = source = /note="Description of Artificial Sequence: Synthetic coding sequence"
  source 1..4281: mol_type = other DNA
atgcaccaaagacacccccgggcgaggtgcccaccgctgtgcgtggcagggatcctggcctgcggattcctgctgggttgttggggaccgagccattttcaacagagctgtctgcaagcgctggaaccccaggccgtgagctcctacctgtcacctggtgcgccgcttaaaggtcgcccgccctccccaggcttccagaggcaacgccaacgtcaacgccgagctgcaggaggcattctccacctggagcttctcgtcgccgtgggaccggacgtgttccaagcccaccaagaggataccgaaagatatgtgctcacgaatctgaacattggcgcggagctgctgcgcgacccttcgcttggcgcccagttccgggtccatctggtgaaaatggtcatcctgactgaacctgagggcgctccgaacatcaccgcgaatttgacctcttctctgctgtccgtgtgcggatggagccaaaccatcaaccctgaggacgacaccgatccgggccacgcagatctggtgctgtatatcactcgatttgaccttgagcttccagacgggaacagacaagtgcggggcgtgactcaactgggaggtgcctgctcgcccacttggtcgtgcctgatcactgaggacaccggattcgacttgggagtgactatcgcccatgagatcggtcacagcttcggccttgaacacgacggtgctccgggttcgggctgtgggccatcgggacacgttatggcctcggacggagcagcccctcgggccggccttgcctggtcgccgtgctcgagacgacaacttctgtccctcttgtcggccggcagagcccggtgcgtgtgggatccgccgcggcctcagcctggatccgccgggcatccacctgatgctcaaccgggtctgtactactcggcaaacgaacagtgccgggtggctttcggtcctaaggcagtcgcctgcacctttgcccgggagcatctggatatgtgccaggctctgtcatgccacactgacccactcgatcagtcgagctgttctcgcctgttggtgccgctgctggacggcactgaatgcggagtggagaagtggtgtagcaagggacgctgccgcagcctcgtcgagctcaccccgatcgcggcagttcatgggcgctggtcgtcgtggggacctcggtcgccttgttcacgctcatgcggaggcggtgtggtgacccgccgccgccagtgtaataacccacgcccggcattcgggggacgggcatgcgtgggagccgacctccaggcagagatgtgcaacacccaggcctgcgaaaaaactcaactggagttcatgtcccagcaatgcgcccgcacggacggacagccactgcggtccagcccaggtggcgcctcgttctaccactggggcgccgccgtgccgcactcccaaggtgacgccttgtgtcgccacatgtgccgggcgatcggagaatctttcatcatgaagaggggggatagctttctggacggaaccagatgcatgccgtcgggtccgcgggaagatgggacgctctccctctgtgtgtctggatcctgccgcaccttcggatgtgatggacgcatggattcgcagcaagtctgggaccgctgtcaggtctgcggcggtgataactcgacttgttcaccacggaagggttcgtttaccgccggacgcgccagagaatatgtgactttcctgactgtgactccaaacttgaccagcgtgtacatcgctaaccatagaccgctgtttacccacttggctgtgcgcattggcggacggtacgtcgtggcgggaaagatgagcatctcgcccaacaccacttacccgagcctcctggaagatggccgggtggaataccgggtggccctgactgaggatcgcctgccacgcctggaagaaatccgcatctggggtcctctgcaagaagatgcagacatccaggtgtaccggcggtacggcgaggaatacggaaacctgacgcgacctgatatcacgttcacgtacttccagccgaagccacggcaggcgtgggtatgggcagcagtgcgcgggccgtgcagcgtctcgtgcggagctggattgcgctgggtgaactactcttgccttgaccaggcacgcaaggaactggtcgagactgttcagtgccagggttcccagcaaccgcccgcgtggcctgaggcctgcgttcttgagccgtgcccgccctactgggccgtgggcgatttcggcccgtgttcggcttcatgcggagggggactgagagaaagacccgtgcggtgtgtggaggcgcaaggaagcctgctcaaaactcttccgccggcaagatgccgagccggagcgcaacagccggcagtcgcactggagacgtgtaatcctcaaccatgtccggccagatgggaggtgtccgagccgtcgagctgcacttccgctggaggtgccgggctcgccctggaaaatgagacttgcgtgccgggagccgacgggcttgaggccccggtcaccgagggcccgggaagcgtggatgaaaaactccctgcccccgagccgtgcgtgggcatgagctgcccaccaggctggggacaccttgatgcaacttcagcaggggaaaaggcacctagcccttggggttcaattcggaccggagcgcaggctgcacacgtgtggaccccggcagccgggtcgtgctcggtgtcatgtgggaggggccttatggaactgcggttcctgtgcatggactcggcgctgcgcgtgccggtccaggaagagctgtgcggtctggcctcaaagcccgggtcacggcgggaagtctgccaggctgtgccctgtccggctagatggcagtataagctcgcagcctgttcggtgagctgcggcagaggcgtggtccggcggatcctgtattgcgcccgagcccacggagaagatgatggtgaagaaatcctcctcgatactcagtgccaaggactgccacggccggagcctcaagaagcctgctcccttgaaccgtgtccgccacgctggaaggtgatgtccctcggaccgtgctcggcttcctgcggactgggcaccgcgaggcgctcggtggcctgcgtgcaactggatcagggccaggacgtcgaagtggacgaagcggcctgtgccgccctggttagaccggaggcgagcgttccatgtctgatcgcggactgcacctacagatggcatgtgggaacctggatggagtgcagcgtgtcctgcggagatggaattcagagacgccgggatacctgcctgggtccacaggcccaagcccctgtccccgctgacttttgtcagcatctccctaagccggtcaccgtccgcggctgttgggcggggccgtgcgtcggacaaggcaccccttcactggtgcctcatgaggaggcggcagcccccggacggaccaccgccaccccggcgggcgcctccctcgagtggtcccaagcgcgggggctcttgttcagcccagcaccacagcctcgtagacttttgccaggacctcaggagaacagcgtccagtcgtctgcatgcggacgccagcatctcgaaccaactggcaccatcgacatgcgcggaccaggtcaagcggactgcgcggtggccatcggacgcccgctgggggaggtggtgactctgagggtgctggaatcgtcgctgaattgctcggctggagacatgctcctgctttggggtcgcctgacctggagaaaaatgtgccggaagttgctcgacatgactttctcgtccaagaccaacaccctggtcgtcaggcaaaggtgcggtcgtccgggcggtggagtgcttctccggtacggctcccagcttgcaccggaaacgttctatcgggaatgtgatatgcagctctttggcccgtggggcgaaatcgtgtcaccgtccctgagccctgccacctccaatgctgggggatgtaggctcttcatcaatgtggccccgcatgcccggatcgcaattcacgcacttgcaactaatatgggagcggggactgaaggagctaacgcgtcatacatcctgattagagacacccattctctgcgcacgaccgctttccacggccagcaggtcctttactgggagagcgagagctcgcaggccgagatggagttcagcgaaggattcctgaaagcccaggcgtcactccgcggccagtactggaccctgcaaagctgggtgccggaaatgcaggatccccagtcatggaagggcaaggagggcact

SEQ ID NO: 5623 - DNA, 4281 bp, synthetic construct
  misc_feature 1..4281: note = source = /note="Description of Artificial Sequence: Synthetic coding sequence"
  source 1..4281: mol_type = other DNA
atgcaccagagacacccccgtgcaaggtgcccccccctttgcgtcgccggcatcttggcctgcggatttcttcttggttgttggggcccctctcacttccagcagtcctgccttcaagctcttgaaccccaagccgtgtcatcttacctgagcccaggggcacctctgaaaggacgaccaccatctccaggcttccaaagacagaggcaacggcaacgccgcgcggccggagggattcttcatcttgagcttctggtcgccgtggggccagatgtcttccaggcgcaccaggaagatactgagagatacgtcctcactaatctcaatatcggcgcagaacttttgcgcgacccgtcattgggagcacagtttagggtccatctggttaagatggtcatcctcaccgagcctgagggagcgccaaacatcaccgccaacttgacctctagcttgctgagcgtctgcggttggtcccaaacaatcaacccggaggatgacacagaccctggccatgccgatcttgtgctgtacattaccagattcgatttggagctccctgatggaaacaggcaggtgcggggggtaacacagctgggcggagcgtgttccccaacttggtcttgcctcatcaccgaagacacagggttcgacctgggagttacaatcgcacacgaaatcggccactctttcggcctggagcatgatggagcaccagggtctggttgcgggccttcaggtcacgtgatggcatccgacggcgccgcaccgagggccggactggcttggagcccctgctctcgccgacagttgctgagcctcttgtctgctggacgcgccagatgtgtctgggatccaccgcggccacagccaggcagtgctggccacccacctgatgctcaaccgggtctgtattactcagctaatgagcagtgccgcgtggcattcggcccaaaggccgtggcttgtacctttgctcgcgaacatctggatatgtgccaagcactgagttgccacacagatccactcgatcaatcctcttgtagtaggcttctcgtccccttactcgatggaaccgagtgcggagtggagaagtggtgtagcaaaggacgttgcagaagcctggttgaattgactcccattgccgctgtgcatgggaggtggtcttcctggggccccaggagcccttgttcgcggtcctgcgggggaggcgtggttacacgcaggcgccaatgcaacaaccccaggcctgcttttggtggacgggcatgtgttggagcagacctccaggcggagatgtgcaacactcaggcttgcgagaaaacccagctggaatttatgagtcagcagtgtgccagaactgatggacaaccacttcggagcagccctgggggagcgtccttctatcactggggggctgccgtgccccattcacaaggcgatgccttgtgtcggcacatgtgtagagcaattggagaatctttcataatgaagagaggagattctttcctggacggtacacgctgtatgccgtcaggaccacgcgaggacggtacactcagcctttgcgtcagtggttcatgccgcaccttcggctgcgacggacgcatggacagccaacaagtatgggacagatgtcaggtttgtggtggagataattctacctgtagtccaaggaagggctctttcacagctgggagagcccgcgaatacgtcaccttcctgaccgtgaccccgaacctcacttccgtgtacatagccaaccacaggccgctcttcactcatctcgctgttcgcattggaggaaggtacgttgtcgcaggtaagatgtcgatctctccaaacactacgtatccatctctgcttgaggacggacgagtggagtacagagttgcactcacagaagataggttgccccgcctggaggaaatccgcatttggggccctcttcaagaagacgccgatatccaggtttacaggagatacggagaagagtacgggaacttgacacgccccgatattacctttacatacttccaacccaaacctcgtcaggcttgggtgtgggcagccgtgcgtggaccctgtagcgtgagttgcggggccgggctgaggtgggtgaattatagctgcctcgatcaggctaggaaggagcttgtggaaactgttcaatgccaaggtagccaacagccccctgcctggcctgaagcctgtgtcctcgagccatgtccaccttactgggctgtgggtgattttggaccttgctccgccagttgcggagggggcctgagggagcgtccagtcagatgtgttgaagcccaaggtagcctgttgaagaccctgcccccggctcggtgtcgcgccggcgcacaacagcctgccgtagctctcgaaacctgtaacccacagccatgtcccgctaggtgggaagtgagcgaaccatcatcttgtacgtccgcaggcggcgctggactcgctctggagaacgaaacgtgtgttcctggcgctgatggactggaagccccggtgaccgagggtcctgggtctgttgatgagaaactgcctgcccccgagccttgtgtcggcatgtcatgccccccaggatggggccatctggatgctacttcagccggggagaaagccccaagcccatggggctctattagaaccggggcccaggccgctcacgtgtggaccccggctgcgggctcctgctcagtgagctgcggccgtgggttgatggaacttaggttcctgtgcatggacagcgcacttcgggtgcctgtccaggaggagttgtgtggcctcgcaagcaagccaggatcccgtagggaggtgtgccaagctgtgccttgccctgctagatggcagtataaactcgcagcatgctcagtttcttgtggaagaggtgtcgtcagaagaatattgtattgtgctagggcccatggagaggatgatggagaggagatcttgctggacacccagtgccaggggctcccccgacccgagcctcaagaagcctgctctctagaaccctgcccccctcggtggaaagtcatgtccctcggaccttgcagcgcaagctgtggtctcggcaccgccagaagaagcgtggcctgtgtccagctcgatcaaggccaggacgttgaagtggatgaggcagcatgcgctgctctggttcgcccggaggcttcagtgccttgcctcatcgccgattgcacatataggtggcatgtgggcacctggatggaatgctctgtgagttgcggagatggaattcaacgtaggagagatacctgcctgggcccccaggctcaggctccagtacccgcagatttttgtcagcacctgccgaaacccgtgaccgtgaggggctgttgggcaggaccatgtgtgggccagggaacgccctcacttgtaccacacgaagaagctgcggcccccggcaggacaacagctacaccagcaggagctagcttggaatggtctcaagctagaggcttgttatttagtcctgccccacaacctcggcgtctattgcctggacctcaggagaactcggtgcaaagtagcgcctgtggtcgccagcatctggaacctactgggaccattgatatgaggggacctggccaggccgactgcgctgttgcaatcgggaggccgctcggtgaagtcgttacgcttagggtcctcgaaagctcattgaactgcagcgccggtgacatgctgttgctttggggacgccttacatggagaaagatgtgtaggaaactgctcgacatgaccttttccagcaagacaaacacattggtagttagacagcgctgcggaaggccaggaggcggcgttctcctccgatacggctcccagctagctccagagactttctaccgcgaatgcgatatgcaactgtttggaccctggggcgagattgtgtccccgagcctgagccccgcaaccagcaacgctggaggctgtcgactctttatcaatgtggcacctcacgctaggatcgctatccacgctcttgccactaacatgggcgcaggaaccgaaggcgctaacgccagttatatattgataagggacacccacagtttgcggacaaccgcattccatgggcaacaagttctctattgggagtctgagagttcacaagccgaaatggaattcagcgagggctttcttaaggcacaagccagtctgaggggccaatattggacactgcaatcatgggttcctgagatgcaggacccgcagtcttggaagggaaaggaggggacc

SEQ ID NO: 5624 - DNA, 4281 bp, synthetic construct
  misc_feature 1..4281: note = source = /note="Description of Artificial Sequence: Synthetic coding sequence"
  source 1..4281: mol_type = other DNA
atgcaccagcgccaccccagagcaagatgccctcccctatgtgttgctggtatccttgcctgtggattcctgcttggatgctgggggcctagtcactttcagcagtcttgtctgcaggctctagaaccccaggcagttagcagctacctcagccctggcgctcccctgaaagggaggccaccttcacctgggtttcaacggcagaggcagagacaaagaagagctgccggcgggatcttgcacctggaattattagtggctgtcggaccagacgtgtttcaagctcatcaggaagacacagagaggtacgttttgaccaatctgaacattggggcagagctgctcagagatcctagcctgggcgctcaatttagggtgcacctggtaaaaatggtgattctgacagagcctgagggcgcccccaacataaccgctaacctgacctcctctttgctgtctgtgtgtgggtggagccagactataaatcctgaagacgacacagaccccggccacgcggaccttgttctgtatatcactcgattcgatcttgagctccctgacggcaaccgccaggtgcgcggtgtaacacagctgggcggggcctgctcccctacatggtcgtgcctgattacagaggatactggcttcgacttgggagtcacaatcgcacatgaaatcggtcacagcttcgggttagaacacgatggggcccctggatcagggtgtgggcctagtggccatgtcatggcatcagatggagccgcccctcgtgcagggttggcctggtcaccctgcagcagacggcagttgctatcactcttgagtgccggcagggccaggtgtgtctgggatcctccgcggccgcagcccgggagcgctggacatcccccagatgcccagcccggcttgtattacagcgctaacgagcagtgtagggtggctttcggacctaaagccgtggcatgtacctttgcccgggaacacctggatatgtgccaagccctttcctgtcatactgaccctctcgatcagagtagttgttcccggctgctggtgccgcttctggatggaactgaatgcggggtggagaagtggtgctctaagggccggtgccggtctctagttgagctgaccccaatcgcggccgtgcatggacgatggtccagctgggggccaagatctccatgttcacgctcatgtggcgggggcgtggtcacaagacggaggcagtgtaataatccgaggccagcttttggcggccgcgcctgtgtgggcgcagatctacaggctgaaatgtgcaatacacaggcatgcgaaaaaacccagctcgagtttatgtcgcagcagtgcgctcggacagacgggcagcctctgaggtcttcccccggcggcgccagtttttaccattggggggcagcagtgccacacagccagggggatgctctatgcagacatatgtgtcgtgctataggagaatcgtttatcatgaaaagaggagattcattcctagatggtacccgctgtatgccgtctggaccgagagaggacggcacactgtccctctgcgttagcggtagctgtcgcacctttggatgcgatggcagaatggactcacaacaggtgtgggaccggtgccaggtgtgtggaggggataatagcacatgctcaccaagaaaagggtcctttactgctggtagagccagggagtatgttacattcctgactgtgacacctaatctgacgtccgtctacattgcaaatcatcggcctttgttcacccaccttgctgtcaggatcggcggccgatacgtggtggctgggaagatgtccattagccccaacaccacttatcccagcttgctcgaagatggcagagtcgagtatcgcgttgccttaaccgaggacaggttacctaggttggaggagatacgtatctggggcccactgcaggaggatgcagacattcaagtttacaggcgttatggggaggagtacggaaaccttactcgccccgatattacattcacatatttccaacctaaacctcggcaggcctgggtttgggccgccgtgaggggcccttgcagcgtctcctgcggagctgggcttcgctgggtcaattactcatgtctggatcaggctcgcaaagaactcgtggaaaccgtgcagtgtcaaggctcccagcaacccccagcctggccagaggcctgtgtcctcgagccatgccccccttactgggctgtgggagattttggaccctgcagtgcctcttgtgggggcggcctccgagaaagacctgtgaggtgcgtggaggcccagggatccctgctgaagacactgccccctgcacggtgccgggccggggcccagcagccagccgtcgcccttgagacatgtaacccccagccctgtccggcgagatgggaggtgtctgagccatcttcttgtacttctgctggcggcgccggactggcactggaaaacgagacatgcgtcccaggagcagatggtcttgaggccccagtcactgagggtccaggcagcgtggatgagaagcttccagcacccgagccttgcgtcggcatgtcttgcccccccggatggggacatctggacgccacttcagccggggagaaagcaccctcaccatggggcagtatcagaacaggcgcgcaagctgctcatgtgtggacgccggccgcgggttcttgctctgtaagttgcgggcgtggcctaatggagctacggtttttatgtatggatagtgccttgagggttcccgtacaagaggagctatgcggccttgcctcaaagccaggtagcaggagggaggtgtgccaggccgtcccctgccccgctaggtggcagtacaagcttgcagcttgttctgtctcttgcggacgcggggttgtccgaagaatcctgtattgcgcacgagcacacggggaggacgatggagaggagatactgctggatacacagtgccaggggctcccaagacccgagcctcaggaagcctgcagtctagaaccctgtcctccgcgttggaaggtgatgagcctggggccatgttccgctagctgcggactgggtaccgctcgtcggtccgtggcctgtgtccagctggatcaaggccaggacgtggaagtggatgaggcggcctgcgccgcactggtgcgcccagaagcttctgttccttgtttaattgccgattgcacctacagatggcacgtagggacatggatggagtgttcggtgtcgtgtggcgatgggatccagaggcgacgagacacttgtttgggcccccaggcgcaggcccctgtacccgctgacttttgccagcaccttcccaagccagtgaccgtgaggggttgctgggccggaccatgcgtgggacagggcactcctagcctggtccctcatgaagaggccgcagcccccggccgaactaccgcgactccagccggcgcctcgctggagtggtcacaggctcgtggactcctgttttcaccagccccacagcctcggagactgctacccggaccacaggaaaactcagttcagagtagcgcatgtggcaggcagcatcttgaacccaccggcacaatagatatgaggggacctgggcaggctgactgcgccgtcgccataggtcggcccctgggagaggtagtaacactgagggtgctggaaagcagcctcaactgttccgccggggatatgctgctactgtggggacgactgacatggagaaagatgtgtcgcaagcttctagatatgacattcagcagtaagactaacactctggtcgtgcggcagagatgcggacgacccggcggtggagtgctgcttagatatggcagtcagctagcacctgaaaccttctatcgtgagtgtgatatgcagctattcggaccctggggcgaaatcgtgagtccgtccctgagccccgctacctccaacgctggtgggtgccgactgtttattaacgtggctcctcatgccaggatcgcaatacacgccctagccacaaacatgggcgccggaactgagggggccaacgccagttacattcttatccgagatactcattctctccgtactacggcctttcacggtcagcaagtgctgtactgggagtcagaatccagccaggccgagatggaattctcagaagggttcttgaaggcgcaggcttcgttgagaggacagtattggaccctgcagtcatgggtccctgaaatgcaggatcctcaaagttggaaaggcaaggagggcacg

SEQ ID NO: 5625 - DNA, 4281 bp, synthetic construct
  misc_feature 1..4281: note = source = /note="Description of Artificial Sequence: Synthetic coding sequence"
  source 1..4281: mol_type = other DNA
atgcatcagcgccaccccagagctaggtgccctcccctgtgcgtggcaggtatactggcctgtggtttccttctgggctgctggggccctagtcactttcaacaatcatgtcttcaggccttggagccacaggccgtaagttcctatctgtctcccggcgctccactgaagggtaggcccccctcccctggattccagagacagaggcagcgtcagcgccgtgctgccggaggcatcctgcacctcgagctcctggtcgcagtgggacctgacgtcttccaggctcaccaggaggacacagagcgctacgtgctgaccaacttgaatatcggcgccgagttgctgagggacccaagtctgggagcacagttccgcgtccatctggtgaagatggtgatcctgaccgaacccgagggtgcccccaatatcactgcaaacctgacctcctctcttctgagcgtatgcggctggtcccagacaattaaccctgaagacgataccgatccaggacatgctgacctggtactctatattaccagattcgacctggagctcccagacggaaacaggcaggttaggggcgtcacccagcttggtggtgcatgttcaccaacttggtcttgccttatcactgaggacaccggtttcgacctcggcgttactatcgcccatgagatcggccattcttttggtctcgagcatgacggtgctccaggtagtggatgcggcccctccggacacgtaatggcttcagatggtgccgctcctcgtgccggactcgcctggtctccttgcagtcgtcgtcaactgctgtcactgttgtcagctggccgtgctcgctgtgtgtgggaccctcctcgcccacagccaggtagcgctggacatccccctgacgctcaacctggtctgtattatagcgctaacgagcaatgccgtgtcgccttcggtcctaaagccgtcgcctgcactttcgctcgcgaacatctcgacatgtgtcaggctctgtcttgtcatacagacccactggatcaatcttcttgttcacgcctcttggtgcccctcctggatggaaccgagtgcggagtagaaaagtggtgtagcaagggtcgttgccgctctttggtggaattgacccctatcgccgcagtccacggtcgctggtcaagttggggaccacgttcaccctgttctcgcagttgcggtggcggcgtggtaacccgtagaaggcaatgcaacaacccacgtccagctttcggcggaagagcctgtgtgggtgccgacctgcaggcagagatgtgtaatactcaagcttgcgagaagacacagctggagttcatgtcccagcagtgtgctcgtaccgatggacagcctttgaggtcttccccaggaggcgcctccttctaccactggggtgctgcagtgccacactcacagggcgatgccctgtgtcgccacatgtgcagggccattggtgaatccttcattatgaaacgtggagattccttccttgacggaactagatgcatgcctagtggtcctagagaggacggtacactttctttgtgcgtgagtggaagctgccgcacttttggatgcgacggtaggatggacagccaacaggtgtgggaccgctgtcaagtttgtggcggcgataacagcacatgttcccctcgcaaaggaagtttcacagctggtcgtgctagagagtatgtgaccttcctgacagtgacacctaatctgacctccgtgtacattgctaaccaccgtcctttgtttacacatctcgctgtgaggataggtggccgttatgtggtagcaggcaagatgtccatttccccaaacaccacctacccctccctcctggaagatggtcgcgtggagtacagagtggctctcaccgaggaccgcctcccaagattggaggagatccgcatttggggcccactccaggaagacgccgacattcaggtctaccgcagatacggtgaggaatatggtaatctgactcgtcctgatatcactttcacttatttccaacctaaacctaggcaagcttgggtttgggctgctgtgaggggtccctgttcagtctcctgcggtgctggattgcgctgggtaaactactcatgtctcgaccaagcccgtaaggagttggtcgagaccgtgcagtgtcaaggctctcagcagccccccgcttggcctgaggcctgcgtgcttgagccctgccctccttattgggccgttggtgattttggaccttgttctgcaagctgcggcggcggtctgcgtgagcgccccgtaagatgtgtggaggcacagggaagcttgcttaaaactctcccccccgctagatgccgtgctggtgctcaacagccagccgtggcacttgaaacctgcaacccacagccttgccccgctagatgggaagtctctgagccctccagttgcacttccgccggaggagccggattggcactggaaaacgaaacctgtgtgcctggcgctgacggactggaggcccccgtgactgagggtcctggatctgtggatgaaaaattgcccgctccagaaccttgcgtaggcatgtcttgcccacctggatggggccaccttgacgccactagcgccggagagaaggcaccatcaccctggggtagtataaggacaggcgcccaggctgcccacgtctggactccagccgcaggcagttgttcagtgtcctgcggtcgtggtttgatggagctgcgcttcctgtgtatggacagcgcattgcgcgttccagtgcaggaggaactgtgtggccttgctagtaagcccggctcacgccgcgaagtttgccaggctgtgccttgcccagcccgttggcagtacaagctggctgcatgtagcgtcagttgtggccgtggtgttgtgagacgtattctgtactgcgctagggcacacggcgaggatgacggagaagagattttgctggatacacaatgtcagggtctgccccgccctgagcctcaagaagcttgcagtttggagccttgtcctcctagatggaaggtcatgtctctgggcccttgctctgcctcctgtggcctgggtaccgcccgtaggtcagtcgcttgtgtgcagctcgaccagggacaggacgtcgaggtggatgaggctgcctgcgccgccttggttagacctgaagcctctgtgccttgcctcatcgccgactgcacttaccgctggcatgttggaacctggatggagtgttccgtatcctgtggagacggtatacagaggagacgcgacacatgtctgggccctcaggctcaggctcccgtgcctgcagatttctgtcaacacctgcctaaacccgtcaccgtgcgtggctgctgggcaggaccatgtgtcggacagggaactcctagtttggtaccccacgaagaggctgccgctcctggtaggacaaccgcaacacccgccggcgcttccctggaatggtctcaagcacgtggactcttgtttagccccgccccacagcccagacgtttgctgcccggtccacaagaaaactcagtgcagtccagcgcctgcggaaggcagcatcttgagcccacaggtacaatagacatgagaggcccaggtcaagccgattgtgccgttgcaattggaaggcctctgggtgaagtggtcaccctgcgtgtcctggagtcatccctcaattgttccgctggtgatatgctcctgttgtggggccgcctgacatggcgcaaaatgtgccgtaaactgctggatatgacatttagctctaaaaccaataccctggtggtcagacagcgttgtggaagaccaggaggcggtgttctgcttaggtacggaagccagcttgcacccgagactttctaccgcgagtgcgatatgcagctgtttggaccatggggagaaatcgtgtcccccagcctgtcaccagcaacctctaatgctggtggctgccgcctttttatcaatgtcgctcctcatgctcgcatcgcaatccatgctctcgctaccaatatgggcgctggtaccgaaggcgctaatgccagctacattctgatcagggacactcactctctgagaacaacagcatttcatggacagcaggtgctgtactgggagagtgagtcttcacaggctgagatggaatttagtgaaggcttcctcaaggctcaggcctctctgaggggccaatactggactctgcagtcatgggtgcccgagatgcaagacccccagagttggaagggaaaagagggcact

SEQ ID NO: 5626 - DNA, 4281 bp, synthetic construct
  misc_feature 1..4281: note = source = /note="Description of Artificial Sequence: Synthetic coding sequence"
  source 1..4281: mol_type = other DNA
atgcaccagagacatccacgggctagatgtccccccctttgcgtggcaggaatcttggcctgcggcttcctcctcggatgttggggtccttcccattttcagcagtcttgtctgcaggccctcgagccccaggcagtctcgtcctacctctcgccgggagcacccctgaagggcaggcctcctagtccggggttccaacgacagcgtcaaagacagcggcgggcagccggggggatcctacatcttgagttgctggtggccgttggccccgatgtgtttcaggcgcaccaagaggacacagagcgatacgtgctgacaaacttgaatatcggtgctgaactgctcagggatccgagcctgggtgcccagtttcgagtgcatctcgttaaaatggtgattctgactgagccagagggcgctcccaatataaccgcaaatcttacatctagcttgctaagtgtatgcggatggagccagactattaaccccgaggatgacacagaccccggacacgcggacctggtcttatatataacacggtttgatctcgaattgccagacgggaatcgtcaggttagaggcgtgacccaactgggtggcgcttgttcacctacctggagttgcctgattacagaagacacgggatttgacctcggtgtgactatcgcacacgagatcggccactcgtttggtctggagcacgatggagcacctgggtcaggctgtggccctagcgggcacgtcatggcaagcgacggcgccgccccaagggctggcctggcctggtccccctgcagtagacggcagctgttgtctctgctgtctgccggcagggcaaggtgcgtttgggacccaccaaggccacagccaggctctgcggggcacccccccgacgcgcagcccggcctgtattacagcgcaaatgagcaatgccgcgtagcgttcggtccaaaggctgtagcctgtacattcgcaagggagcacctcgatatgtgtcaggccctgtcatgtcacacagaccctctcgaccaaagcagctgctcgcgacttttagtcccccttttagacggtaccgagtgtggggtcgagaagtggtgctccaagggacggtgtcgctctttggtggaacttacccccattgccgctgtgcacggtcgttggagctcatggggcccacgcagcccatgcagtcgaagctgcgggggtggtgttgtgacacgcagacgccagtgtaataacccacggcctgctttcggggggagggcatgtgtcggggccgatttacaggcggagatgtgtaatacacaggcatgcgagaaaacgcagctagagttcatgtcacagcagtgtgcccggaccgatggccagccgctaagatcaagtcccggcggtgccagtttttatcattggggggcagcagtgccccacagtcaaggtgacgctctgtgcagacatatgtgcagagcgatcggagaaagtttcattatgaagcggggcgatagcttcctcgatgggaccaggtgcatgccctctggtccaagggaagatggtaccctgtcactctgtgtgtctggctcgtgtaggactttcgggtgcgacggcagaatggactctcaacaggtgtgggatcgctgtcaggtatgtggcggcgataattccacatgcagcccaaggaaaggctccttcaccgcaggtagggcaagagagtacgtcacctttctgactgtgacccccaacctgacctcggtgtacatcgctaatcataggcctctcttcacacatcttgccgttcgaatcggcggtcggtatgtggtagctgggaaaatgagcatatctcccaacacgacgtatccctctttgttggaggacggacgagttgagtaccgtgttgcccttaccgaagaccgcttgccacgtctggaagagattcggatctggggccccctgcaggaggatgcagacatccaagtctatcggcgatatggggaagagtacgggaacttgactaggcctgacatcacatttacctattttcaacccaagccacgtcaggcctgggtgtgggcagcagttagaggcccatgctctgtctcatgtggagctggcctgaggtgggtgaattactcgtgcctcgatcaagcccgaaaagagctggtcgagaccgtgcaatgtcaagggtcacagcagcctcccgcttggcccgaagcctgcgttttggaaccatgcccaccctattgggctgtcggagattttggcccatgctcggccagctgtgggggcggactgcgcgagagacctgtcagatgcgtcgaggcacagggatctcttctcaaaaccctacctcccgcccgctgccgcgcaggtgcacagcaaccagctgttgccctggagacttgcaacccgcagccatgtcctgctcggtgggaggtcagcgaaccatcatcctgtacaagcgccggtggcgccggcttggctctggagaacgagacctgtgttccaggagcagatggtctggaagctccagtgacggagggacctgggagtgtcgatgagaagcttcccgcgcccgagccctgtgttggtatgtcctgcccacccggctggggccacctcgatgctaccagtgccggtgagaaagcaccatcaccatggggatctatcaggaccggtgcccaggccgcacacgtgtggacacctgcggctggctcgtgcagcgtgtcttgcggccgtggtttgatggagctccgatttctctgtatggatagcgccctcagagtgcctgtccaagaagaactttgcgggctggccagtaaacccggatctcgcagagaggtttgccaggctgttccgtgccctgcacggtggcagtacaagttggctgcatgttccgttagttgtgggcgcggagttgtgcgcagaatactctattgtgccagggcccacggcgaagatgatggcgaggagatactgctggatactcagtgccaggggttgcctcgcccagagcctcaggaagcttgcagcctggagccttgccctcctagatggaaggtcatgagtctggggccatgtagtgccagctgcggcctcgggacggccaggcggtctgtcgcatgtgtccaactagatcagggacaagacgttgaagtggatgaggccgcatgtgccgctctggttaggcctgaagcttcagttccttgtctgattgctgactgcacataccgctggcacgtaggtacctggatggagtgctcagtgtcctgcggtgacggtatccagagacggcgagatacatgtttggggccacaggcacaggccccggtgcctgccgatttttgccaacatctgcctaagcctgtcaccgtgcgaggttgctgggccgggccttgcgtgggccagggcacaccatctttggtccctcatgaagaggcggcggctcctgggcgaactacagccactccagcaggcgcttccctagagtggagtcaggctcgcggcctcctctttagtccagcccctcaaccgcggcgactcttaccagggccccaagaaaacagcgtgcagtcaagtgcatgtggccgacagcacttggagccaaccggtactatcgatatgcgcggtcccggccaagccgattgtgctgtagccatcggcagacctctgggcgaagtggttacactgcgggttcttgagagctccctcaattgtagcgctggagatatgctgcttctttggggaaggctcacctggaggaagatgtgcaggaagctgctcgacatgaccttttcaagcaaaacaaatacactggtggtaaggcagagatgtgggcgtcctggcggaggcgtactgctgcgatatggatcccaactggcccctgagacgttctatagggagtgtgatatgcagctgtttgggccatggggagagatcgtgtcaccgtcactgtctcctgccacatctaatgccggaggttgtagactcttcatcaacgtagcaccccacgcccgaatcgccatccacgccctagccaccaacatgggggccggcactgaaggcgctaacgctagctacatactgattagggacacccatagtctgaggacaacagcctttcacggtcaacaggtattgtattgggagtccgagtcttctcaagccgaaatggagttctctgaagggttcctgaaagctcaggcttctctgcgcggccagtattggactctgcagtcctgggtgcccgagatgcaggatccccagagttggaaggggaaggaaggcact

SEQ ID NO: 5627 - DNA, 4281 bp, synthetic construct
  misc_feature 1..4281: note = source = /note="Description of Artificial Sequence: Synthetic coding sequence"
  source 1..4281: mol_type = other DNA
atgcaccaaaggcaccccagggcacgatgcccccccttgtgcgtggcagggattctggcctgtgggtttctactgggatgctggggaccatcccactttcagcagagctgtttacaggcactcgagccacaggctgtctcctcgtacttgtctccaggcgcccctctcaaggggcggcctccaagcccaggtttccagcgtcagaggcagaggcaacggcgggcggctgggggcatcctccacctggaattgttagttgcggtgggtcccgacgtgttccaagcgcatcaggaggacacagagcggtacgtgctgactaacttgaatattggtgccgagctgctgagggatcctagcctgggagcccaattcagagttcatctagtgaagatggtgatcctaacggaaccagagggcgcaccgaacatcaccgctaacctcaccagtagcctgctgtccgtttgcggatggtctcagaccatcaatcctgaggatgatactgaccctggccatgcagatctggtcttgtacattacgagattcgacctggagcttcccgatggaaaccggcaagtcagaggagtaacacagctcggcggtgcctgtagtccaacttggagctgtcttatcaccgaggataccggcttcgatctgggggtgacaatagcacatgaaatcggacatagctttggactggagcacgacggagcccccggctctggctgcgggccaagcggccacgtgatggcttccgacggcgctgcacccagggccggtctggcctggtctccttgctccaggaggcagcttctgagcctgctttcagcaggtcgcgctcgctgtgtctgggacccaccacggccccagccagggtcggctggccatcctcccgatgcccaaccaggactgtactattccgcaaacgagcagtgtcgcgtagctttcggtccgaaagcagtggcatgcaccttcgcccgcgagcaccttgatatgtgccaggccttgtcatgccacaccgatccccttgatcagagcagctgttcccggctgctggtgccgctgctggatgggaccgaatgcggggtggaaaaatggtgctccaaaggccgctgtcgatccttggtggagctgactcccattgctgccgttcacggtcggtggagctcctggggccccaggtccccttgctcacggagttgcggaggaggcgttgttactcgtcgtcggcagtgtaacaacccgcggcctgcttttggaggaagggcttgcgtcggagctgacctgcaggctgagatgtgtaacacccaagcgtgtgagaagacccagctggagtttatgtcccagcagtgcgcacgtactgacggccaaccattacgatcctcccccgggggggctagcttctaccactggggagccgccgtgccccactctcagggcgatgccctgtgcagacacatgtgccgcgctatcggagaaagtttcattatgaaaagaggtgactcgtttctggacggcaccagatgtatgcccagtgggcctcgggaggatggtaccttgtcactctgtgtgagtgggagttgtcggaccttcggatgtgacggcaggatggactctcaacaggtgtgggatagatgccaggtctgtggtggggataacagtacctgcagtccgcgaaaggggtcatttactgccggccgggctagagagtatgtaacctttctgacagtgacccctaatctgactagcgtatacatagccaaccatcggccgctgtttacacacctggcagtcagaataggcggtcgctatgttgtggccggcaagatgtcgattagtccgaatactacttacccatcgttgctggaggacgggagggtggaatatagggtcgccttgacagaggaccgcctaccaaggctcgaggagatcaggatatggggccccctgcaagaagacgccgatatacaggtgtacaggcggtatggagaagagtatgggaatctgacccggccagacataacgtttacatattttcaaccaaagccgagacaggcctgggtttgggccgccgtacgggggccctgctctgtgagctgtggggccggcttaaggtgggtgaattactcatgtctagatcaggcaagaaaggagttggtggaaaccgtgcagtgccagggcagccaacaaccccctgcctggccggaagcatgtgtgttggaaccttgcccaccttactgggccgtaggggacttcggaccttgcagcgctagctgtgggggaggattacgggagcggcccgtgcggtgtgtggaagcacaggggtctttattgaaaaccttacccccagccaggtgcagggccggagcacagcagcctgctgtggctctggaaacttgtaacccccagccctgtcctgctcggtgggaggttagtgaaccctcttcctgcacttctgctggcggcgccgggctggcgctcgagaacgagacctgtgtgccaggagctgacggcctggaggcccccgtgacggaagggccagggtccgtagatgaaaagcttcctgctcctgagccatgcgtggggatgtcctgccctcccggctggggccatctcgacgctactagcgccggagagaaagccccctccccctggggatccatccgtacaggcgctcaggctgcccatgtctggacccctgccgctggtagctgttccgtcagctgcggcagaggactgatggaactgcggtttctgtgcatggattctgcacttcgagtgcctgtgcaggaagaactgtgcggcctggcttcaaagccaggctcccggcgggaggtatgtcaagcagtgccctgtcccgccagatggcagtataagctggccgcctgttcggtgtcctgtgggagaggcgtagtgagacgcatcctgtattgcgcacgtgcccatggagaagacgacggcgaagagattctgctagatacccagtgtcagggactgcccagacccgagccccaagaggcatgctcccttgagccatgccctcccaggtggaaggtaatgagcctcggtccttgttcagcctcctgtgggctgggaacagcacgccgttctgttgcctgcgtccaattagatcagggtcaagatgtcgaggtggacgaggccgcctgcgcggccttagtcagacccgaagcgtctgttccgtgtctgatagcagattgtacttatagatggcacgtgggcacctggatggagtgctccgtgagttgcggcgacggaattcagagaagacgcgatacgtgcctgggccctcaggcccaggctcccgtgcccgcagatttttgccaacatctgcctaaacccgtgaccgttaggggatgctgggctggcccatgcgtcggccagggaaccccctccctggtccctcatgaggaggctgctgcccccggaaggaccaccgctaccccagcaggggcaagcctggagtggtctcaggccagagggctgcttttctcacccgcccctcagccaagaaggctgttaccaggcccacaggaaaattccgtgcagagctccgcctgtggcaggcagcatctcgagcccacaggcactatcgatatgcggggaccgggtcaggccgactgtgcagtcgctatcggccggccgctaggagaagtggtgactcttcgcgtgcttgagagcagtctgaactgctcggcaggggacatgctattgctgtgggggaggcttacatggaggaaaatgtgtaggaaactgttggatatgacttttagctcaaagaccaataccttggtggtccgacagagatgcggtcggcccggtggcggtgtcttattacgctatggaagtcagctcgctcccgagacattctatcgcgagtgtgacatgcagctatttggtccttggggcgagattgtgtccccttcacttagcccggccacatccaacgccggggggtgcaggttgtttattaacgtagcaccccacgcaagaatagccatccacgccctggccactaacatgggggcaggaaccgagggggccaacgcttcatacatcctgattcgtgatacccactcactccggacaaccgctttccacgggcagcaggtgctgtattgggagtctgagtctagccaggccgaaatggagttcagtgaggggttcctgaaagcccaggcgtccttgaggggacagtactggacattgcaatcatgggtcccagaaatgcaggacccacagtcatggaagggaaaagaaggcacg

SEQ ID NO: 5628 - DNA, 4281 bp, synthetic construct
  misc_feature 1..4281: note = source = /note="Description of Artificial Sequence: Synthetic coding sequence"
  source 1..4281: mol_type = other DNA
atgcaccagcgacatccacgggcccgttgccctcccctgtgcgttgccggtattctggcctgtggcttcttgctggggtgttggggaccctcgcatttccaacagagctgtctgcaggcacttgaaccccaagctgtaagctcctacctctcgccaggagcccctctgaagggtaggccaccctctccgggcttccagcgtcagcgccagcgccagcggagggctgccggcggaatcctgcacctggaactgctggtggcagtcggtccagatgtattccaggcccatcaagaggacaccgagagatatgtcctcaccaacctgaatatcggagccgagctgctgcgtgatcccagtctaggagcccaatttagagttcacttggttaagatggtgatcctcaccgagccggaaggggctcccaacatcaccgccaatttgacttcaagtctattatctgtgtgcgggtggagtcaaacgattaaccccgaggacgataccgaccccggtcacgcggatcttgtcctttatataactcgatttgatctcgagctccccgacggcaaccggcaggttagaggcgttacacagttagggggcgcgtgctcacccacctggtcatgccttataactgaggacacgggctttgatctcggtgtgaccatcgctcacgaaattggccatagtttcgggctagaacacgacggtgcccctggatccggatgcggtccctctggccacgtcatggctagcgatggcgcagctcccagggcaggactggcctggagtccttgcagtcgccgacagctgctctctctgctatccgcgggccgggctcggtgtgtctgggacccacctagaccgcagccaggttctgcgggacacccccctgacgctcaaccaggactgtattatagtgcgaatgagcagtgccgagttgcctttgggcccaaagctgtagcctgtaccttcgcccgtgagcatctggatatgtgccaggccctgagctgtcataccgacccacttgaccagtcttcctgcagtagactcttagtacccctgctggatggaactgaatgcggcgtggagaaatggtgctctaaggggagatgccgatctctggtcgaactaaccccaattgcggccgtccatggccgctggagttcatggggcccccgatctccctgctctcgcagctgcggaggcggcgtggtgacacgtcgccggcagtgcaacaaccctaggcccgcttttggcggccgcgcatgcgtaggggcggacctgcaggctgaaatgtgcaatacacaggcctgcgagaagactcaactcgaattcatgtctcagcagtgcgccaggacagatgggcagcccttgagatcaagcccaggaggggcctctttttatcattggggggctgccgtcccacatagtcagggagacgctttatgtcgacacatgtgtcgcgcaatcggcgagtcattcatcatgaaacgaggggattcattcctggatggtacgcgatgcatgccctctggcccgagagaggatggcactctgtccctgtgcgtttccgggagctgtaggacattcggatgcgacggccggatggacagccagcaagtgtgggatagatgccaggtgtgtggtggagacaattccacatgttcaccacggaagggctcttttaccgccggaagagctagagagtatgttacgtttcttaccgtgacccctaacttaaccagcgtctatatcgccaatcatcgtcctctgtttacccacctggcggtgcgcatcggaggcagatatgtagtcgctggcaaaatgtctatctccccaaatacaacatatccttcccttctggaggacgggagagtggagtatagggtggctctgacagaggaccggctaccaagactggaggaaatccggatctggggaccactccaggaagacgctgacatccaggtctacagaagatatggggaagaatatggcaatctcaccaggccagacatcactttcacatattttcagccgaaaccaaggcaggcttgggtctgggctgctgttagggggccatgctcagtgagctgtggcgcaggcctgcggtgggtgaactatagctgcctcgaccaggcccgaaaagaacttgtcgagactgtacagtgtcagggctcccaacaacctcctgcgtggccggaggcatgtgtgcttgagccgtgtcctccctactgggcggtgggagacttcgggccatgttcagcgtcttgcggcggaggcttacgcgaacggcccgttagatgcgtggaggcgcaaggaagccttctgaaaacccttcctccagctaggtgtcgcgcaggggcacagcaacctgcagtggcattagaaacctgcaacccacagccatgccctgccagatgggaggtgagcgagccctcatcatgcactagtgctgggggcgctgggctggccctagagaatgaaacctgtgtcccaggtgcagacgggctcgaagcccccgttactgagggccctgggtctgtggacgaaaaattgcccgccccagagccctgtgtgggaatgtcctgcccacccgggtgggggcatcttgatgccacttccgcgggggagaaagcccccagtccctggggttctatccggaccggcgctcaggccgcccatgtatggactccagcagcaggttcctgctcagtgagctgcgggcggggtctgatggagttgagattcttgtgcatggactccgctctcagagtgccagttcaggaggagctctgcggcctagcctctaaacccggcagcaggcgggaagtctgccaagccgtgccctgtccggccaggtggcagtataagttagccgcctgttccgtttcctgtgggcggggcgttgtgcgccgaattctgtattgcgcccgggcacacggagaggatgacggcgaggaaatccttctcgatacacagtgccaaggccttccacggccagagccccaggaggcctgctccctcgaaccatgtcccccccgttggaaggtgatgagtctcgggccttgttcagccagttgcggcctgggcacggctcgcaggagtgttgcctgcgttcaactcgatcaggggcaggatgtggaggtggacgaagccgcctgcgccgccctagtgcggccagaggcctctgtgccatgcctcatcgctgattgtacttacagatggcatgttggcacctggatggagtgctccgtttcctgtggagatgggattcaacgaagacgggacacatgtctcgggccccaggctcaggccccagtgcccgctgatttttgtcaacatctcccaaaaccggttacagtgaggggctgctgggcaggaccatgcgtaggacaagggaccccatctctggttccacatgaggaggctgccgctcccggccgcacaaccgctacgcccgcgggtgcaagcctcgaatggagccaggctcgaggcctattgttcagccccgccccacaaccacgccgattactgcccggtccgcaagaaaatagcgtgcagtcatccgcatgcggccggcagcaccttgagcctacaggaactattgacatgagaggacccggacaggcagactgcgcagtggcgatcggaagaccacttggtgaggttgtgaccctccgtgtgttggagagttccctcaactgctccgcgggagatatgttattactgtggggtcggctgacctggcgcaagatgtgccgcaagttactggatatgaccttttcttctaaaaccaacaccctggtcgttcggcagaggtgcggccggcctggcggaggagtgctgctcaggtatggaagtcagcttgcccccgagacattctatcgtgagtgcgacatgcaactgttcggtccctggggtgagatcgtgtcgccatctctttcccctgcgacctctaacgccggagggtgtcgtttgtttatcaatgtggcaccacacgctcggatcgcaatacacgctcttgcaacgaacatgggcgctggcactgagggagcaaacgcttcctatatcctgattcgagacacccattcattacggaccaccgcatttcatggccaacaggtgctgtattgggagtctgaatcaagtcaggcagaaatggagttcagcgagggctttctgaaggcgcaggcttcacttcgaggccagtattggaccttgcagagttgggtgcccgaaatgcaggatccccagtcatggaagggtaaagaggggact

SEQ ID NO: 5629 - DNA, 4281 bp, synthetic construct
  misc_feature 1..4281: note = source = /note="Description of Artificial Sequence: Synthetic coding sequence"
  source 1..4281: mol_type = other DNA
atgcatcaacggcaccctcgagcacgttgtcctccactgtgtgttgccggaatattggcgtgcgggttcctgcttggatgttggggaccatcgcatttccagcagtcctgccttcaagcactcgagccccaggctgtgtcgtcgtacctgtcgcctggtgcaccccttaaaggtcgccctccatcccctggatttcaacgtcagcgccagagacaacggcgggcagcaggaggaattctccatcttgagctgcttgtcgccgtgggacccgacgtgtttcaggcacatcaagaagataccgaaagatacgtgttgacgaacttgaatataggagccgaacttctccgcgacccatcattgggagcccaattccgggtgcatctcgtgaagatggtgattctgaccgaacctgaaggcgcacctaacatcactgcgaacctcacctcgagcctgctctcggtctgcggctggtcccagaccataaatcctgaagatgataccgacccaggacacgcagatctggtgctgtacattactagatttgatctggagttgccagacggtaatcgacaagtgcggggtgtgacccaacttggtggggcatgctcacctacgtggtcgtgcctgattactgaagataccggttttgatcttggagtgactatcgctcatgaaataggacattctttcggccttgaacacgatggtgcacctggcagcggttgtggacctagcggacatgtcatggcttcggatggggcagcaccacgggcaggacttgcatggtcgccttgttccagaaggcagctgctgtcattgctctcggcaggaagggctagatgtgtgtgggatccacctcggcctcaaccgggttcggcaggccaccctccagacgcgcagcctggcctttactatagcgcaaacgaacaatgccgggtcgctttcggcccaaaagcagtggcgtgcacgtttgcaagggaacatctggacatgtgtcaagcactcagctgccacaccgatcctctggatcagtcaagctgttctcgacttctggttcctttgctggacggaaccgagtgtggcgtcgaaaagtggtgttcgaagggacggtgtagatcgctggtcgagctcactccgatcgccgcggtgcatgggcggtggagctcctggggacctcgatctccatgttccagatcgtgcgggggtggagtggtgacccgacgcaggcaatgtaacaatccccgcccagcatttggtgggagagcctgcgtgggggcagatcttcaggcagaaatgtgcaacactcaggcttgtgaaaagacgcaactcgagtttatgtcccagcaatgcgcccgcacggatggtcagcctttgcgctcaagtcctgggggcgccagcttttaccattggggtgctgcagtgccacattcacagggagatgcactgtgtcggcatatgtgcagggctatcggagaatcgtttatcatgaaaagaggcgattccttcttggatggaaccagatgcatgcccagtggacctcgggaggacggaactctttcgctgtgcgtgtcaggatcgtgcaggactttcggttgcgacggccgcatggactcccaacaggtgtgggacagatgccaagtctgtggcggagataactcaacctgttcccctcgcaaggggtcgtttactgctggacgggcgagagaatacgtgactttcctgactgtcacccctaacctgacttcggtgtacattgcgaaccacagacctctttttacccatctggccgtccgtattggaggccggtacgtcgtggcaggaaaaatgtccatttcccctaacaccacctacccttcactgctggaggacggacgcgtcgaatacagagtggcgctgactgaagatcgtctcccgcgacttgaagaaatccgcatttgggggcctttgcaggaggacgccgatatccaggtgtacagaagatatggggaggaatacggaaatcttacgcggcctgatatcacttttacttacttccaacccaagccacgccaagcatgggtgtgggcagcagtgcgtggcccctgctcagtgtcctgcggtgcgggactgcgctgggtgaattactcctgtctggatcaggcgcgaaaggagctggtggagactgtgcagtgtcagggatcccagcagccaccagcttggcccgaagcgtgtgtccttgaaccttgccccccgtactgggcagtgggtgactttgggccgtgttcggcaagctgtggtgggggactccgggaacgccctgtgagatgtgtggaagcccagggctcgctgctcaaaaccctcccacccgcaagatgcagagcgggagcacaacagcccgcggtcgctctggaaacctgtaatccacagccctgccctgcacggtgggaagtgtccgagccatcgagctgtactagcgccggaggtgcaggattggcactggagaacgagacttgcgtccctggtgcagacggtcttgaggcacctgtgactgagggtccaggatccgtggacgaaaagctgccagctccagaaccttgtgtcggaatgtcctgtccgccagggtgggggcatctggatgctacttcggcaggtgaaaaggcaccatccccgtggggtagcattagaactggagcacaagccgcccacgtgtggacccctgcagcaggatcgtgttcggtgagctgtggacgcggtctgatggaacttagatttctgtgtatggattcggcactcagggttcctgtgcaagaagaactttgtggcttggcatccaaacctggctcccgacgcgaagtgtgtcaggcagtgccctgtcctgccagatggcagtacaagctggctgcctgctctgtgtcctgtggtaggggagtcgtgcggagaatcctctactgcgcaagggcccacggggaagatgacggagaagaaattctgctggatacccaatgtcaaggccttcctcggcccgaaccccaagaggcctgctccctcgagccttgtcctcctaggtggaaagtgatgtccctcggcccttgttctgcatcctgtggacttggaacggcaaggagatccgtggcgtgtgtgcagctcgaccagggtcaggatgtcgaagtggatgaagctgcatgtgcggcacttgtgcggccagaagcctcagtgccttgtcttattgccgactgcacttaccggtggcatgtgggaacttggatggaatgctcggtcagctgcggagacggcatccaacgtcggcgggatacttgcctgggcccacaagcgcaagcacccgtgcctgccgatttttgtcagcatctgccaaagcctgtgactgtcaggggttgctgggcaggaccttgtgtaggccagggaaccccttctctcgtccctcatgaagaagcggcagcaccaggaaggaccaccgccactccagctggtgcttcgctggaatggtcccaagcgcggggacttctgttttcccccgccccacaaccgagacggcttctccctggcccccaagagaacagcgtgcagagctcggcatgcggccggcaacatctcgagccaaccggtactatcgatatgagggggcctggccaagccgattgtgcggtggccatcggtagaccactgggtgaagtcgtcacgcttagagtgcttgagagctcccttaattgttccgcaggagatatgcttttgctttggggtcgactgacttggagaaaaatgtgcaggaagctgttggacatgactttctcctcaaagactaataccctggtggtgcgacaaagatgtgggaggccgggtggtggtgtgctgttgcgttacggtagccagcttgcacctgaaaccttttacagggaatgcgatatgcagctgtttggaccctggggagaaatcgtgagcccttcactctcacccgcaacttcgaacgccgggggttgtcgcctcttcattaatgtcgctcctcacgcaaggatcgcgatacacgcacttgctaccaatatgggggctggaaccgagggagcaaacgcatcgtacattctgattcgggatactcattcacttaggacgactgcatttcacgggcaacaggtgctttactgggaatcggaaagcagccaagctgagatggaattttccgaaggttttcttaaggcccaggcatcccttcgaggacaatactggaccctccagtcgtgggtgcctgagatgcaggatccccagtcctggaagggtaaggaaggtacc

SEQ ID NO: 5630 - DNA, 4281 bp, synthetic construct
  misc_feature 1..4281: note = source = /note="Description of Artificial Sequence: Synthetic coding sequence"
  source 1..4281: mol_type = other DNA
atgcaccagaggcatccaagagcccggtgtccacccttgtgcgtggctggaatcctcgcctgcgggtttctcctggggtgttggggaccctctcatttccagcagtcatgtttacaggccctcgaaccacaggcagtatcatcttacctctctcccggggcacccctgaaagggagacccccctctccaggattccagagacagcgccagcgccagcggagggctgctggagggatcctgcacctggaactgctggtcgctgtcggacctgatgtgtttcaggctcaccaggaggatacagaacggtatgtactcactaacctcaatataggagccgaactgctcagggatccctctcttggagcacagtttcgagtccatctcgtaaaaatggtcatcctcactgaacctgaaggagcccctaatatcacagctaacctgacatcttctctcctcagtgtatgtggatggtctcaaacgataaacccagaagatgatacagatcccgggcacgcagatcttgtgctatatataactcgattcgatctggaactccctgatgggaatcggcaggtcagaggggtgacacagctaggaggagcatgttctcccacatggtcttgtctcataactgaagatactgggttcgatctgggagtgactatcgcccacgaaatcggacactcattcgggctcgaacatgatggagcccctggatccggatgcggaccatcaggacacgtgatggcttccgatggagctgcaccccgggcagggctggcctggtcaccttgttcacgacggcagctactctctttgctctcagccggaagagccaggtgtgtgtgggatccccctagaccccagcccggatctgcaggacacccccctgatgcccagccagggttatattattccgcaaatgaacagtgccgagtagcgtttggacccaaggccgtcgcatgtacattcgcaagggaacatctggatatgtgccaggctctgtcatgtcatacagacccactagaccaatctagttgttctcgtctgctagtccctctgctcgatgggactgaatgtggagttgagaaatggtgttccaaggggcggtgccgatcattagttgaactcacaccaatcgcagctgtgcacgggcgctggtcttcttggggaccccggtctccctgttcccgcagttgcgggggaggggtggtaactagacggcgacaatgcaacaatcctcggcccgcttttggaggaagagcttgtgtgggagcagatctccaggccgaaatgtgtaacacacaggcttgcgaaaagacacaactagaattcatgtcgcaacagtgtgctagaactgatgggcagcctctgcggtcttctccaggaggagctagtttctatcactggggagcagccgtcccacactctcagggagatgctctctgccgtcacatgtgtagggcaataggggaatcctttataatgaaacgtggggattcattcctcgatggaacacggtgcatgccatctggacctcgcgaagatgggactctatccctctgtgtctccgggtcttgtagaacttttggatgtgatggaagaatggattctcagcaagtctgggataggtgtcaggtgtgtggaggagataactctacttgctctccgcgcaaagggtccttcacagcaggacgcgcacgggagtatgttacatttctcactgtgacacctaacctcacttctgtttatattgctaaccataggcccttattcacacatctagccgttcggatcggagggcgttatgtcgtagcagggaaaatgagtatctcccccaatacaacttatccatcgcttctagaggatggacgggtggagtacagggtggctctcactgaagaccgcctcccacgactagaagaaattagaatttgggggcctcttcaggaagatgccgatatccaggtgtatcggcgatacggggaagagtatggaaatctgacacggcccgatattacatttacttacttccagccaaagccccggcaggcctgggtgtgggctgcagtcagagggccctgttccgtctcatgtggggcaggactgaggtgggtaaactactcctgtctcgatcaggccagaaaagaacttgtcgaaacagtacagtgccagggatctcagcagccacccgcatggcctgaagcttgcgtgcttgaaccatgcccaccttattgggcagtaggagattttggaccttgttcagcctcctgcggaggggggctgagggaacggcctgttcgctgcgtcgaagcgcagggatccctactgaaaacgctcccccccgcaaggtgccgggcaggggcacaacagcccgccgtagcccttgaaacttgcaacccccagccctgtcccgctcggtgggaagtttcagaaccctcatcatgcacaagtgcagggggggctgggctggctttagaaaacgaaacatgtgttccgggagctgatgggctcgaagctcccgtcactgaaggacccgggtctgtcgatgaaaaacttccagctcccgaaccttgtgtagggatgagttgcccacctggatgggggcacttggatgcaacatctgccggagagaaagcaccctctccctgggggtctataagaactggggctcaggctgcacacgtatggactcccgcagcagggtcatgctccgtatcatgtgggaggggactcatggaattacgctttctatgtatggatagtgctttaagggtccctgtacaggaagaactttgtggactcgcctcaaaaccaggatcaaggcgggaagtctgtcaggcagttccatgccccgctaggtggcagtataaattagcagcctgttctgtgtcatgcgggcgaggggtcgttcgccgaatcctctactgtgctagagctcatggagaggatgatggggaagaaatccttctcgatacacagtgtcagggactgcctcgaccagaaccccaggaagcctgttctcttgaaccctgtccccctcgctggaaagtcatgtcactcggaccatgctccgcctcttgtggactggggactgcgagaagatccgtggcctgtgtgcagctcgatcaggggcaggatgttgaggtagacgaggctgcctgtgccgcactggtgagaccagaagccagtgtgccatgtctcatagctgattgcacatatcggtggcatgtaggaacatggatggagtgcagtgtttcctgcggggatgggatacaacggcgcagggacacttgtctaggaccacaggcccaggcacccgttcctgcggatttctgccagcacctaccaaagccagttacagtgagggggtgctgggcaggaccttgcgtagggcagggaacaccaagtctcgtacctcacgaagaagccgccgctcccggacggactactgccactccggctggagcatctctcgaatggtctcaggcgagaggactgcttttttctccagcaccccagccacgaaggctcctgccaggacctcaagaaaattccgtccagtcttcagcttgcggaaggcagcatctcgaacccacagggacaatagatatgagggggccaggacaggctgattgtgccgtggcaatcgggcgcccactgggagaagtcgtgacactgcgggtactggaatcttctcttaattgttccgccggagatatgctgcttctatggggaagactaacatggcgcaagatgtgtagaaagctacttgatatgacgttttcctcaaaaactaacacattagtagttaggcaacgctgcgggagaccagggggaggagtcctgctgaggtatgggagtcagctcgcacccgaaacattctacagggaatgcgatatgcaactttttggaccatggggggaaatcgtttccccatcgcttagtcctgccacatccaacgcgggaggatgtcgcctgttcataaacgtcgctccacatgcaaggatcgccatccacgctttggctacaaacatgggagccgggacagagggggcaaacgcctcctatatattgatacgagacacacactctctgcggacaacagcctttcatgggcagcaggtactctattgggaatctgaatcttctcaggccgaaatggaattttccgaggggtttctgaaagctcaggcttctctccgggggcagtattggacactccagtcctgggtccccgaaatgcaggatcctcagagttggaagggaaaagaaggaact

SEQ ID NO: 5631 - DNA, 4281 bp, synthetic construct
  misc_feature 1..4281: note = source = /note="Description of Artificial Sequence: Synthetic coding sequence"
  source 1..4281: mol_type = other DNA
atgcatcaacgccacccccgggcgcgatgcccacctctgtgcgttgcgggtatcctggcgtgcgggttcctgttgggttgttggggcccgagccattttcaacaatcctgtctgcaggccctcgagccgcaggcagtgagcagctacttgtcacctggcgcaccactgaaaggtcgccctccgagcccaggctttcagaggcagcgccagcggcagcgtcgcgccgccggcggcattctgcatctggaattgctggtcgctgtgggtccggacgtgttccaagcacaccaagaggataccgaaagatacgtcctgaccaatttaaacataggtgccgagttattgcgggaccctagccttggcgcgcaattccgtgtccacctggttaaaatggtcattctgactgagcctgagggcgcgcctaatatcacggccaatctcactagcagtctgctctctgtctgcggttggagccagacaatcaatccagaagacgacacagatccgggccacgccgatctcgttctgtacattacgcgcttcgacctggaattgccagatgggaatcgccaggtgcgcggtgtaacgcagctgggtggagcctgcagccctacgtggagctgcctcattaccgaggatactggttttgatctcggagttaccatcgcgcacgaaatcggacacagcttcggcttagaacatgatggcgcaccggggtccgggtgtggtccatccggtcacgttatggcgtccgatggtgccgctccaagagctggtctggcttggagcccgtgttcccgtcgacagctgctgtcattattgagtgcaggccgcgcgcgatgcgtgtgggacccgccacgcccacaacctggctccgcgggccaccctccggacgcgcagcctggcctgtactactccgcgaacgaacagtgtcgagtggcattcggcccgaaggcagtagcgtgcaccttcgctcgcgaacacttggacatgtgccaagcattgagctgccatactgacccgttggatcagagctcatgctcccgcctgctcgtgccgctgctcgatggtacggagtgtggggtcgaaaaatggtgtagcaagggtagatgccggagcctggtggagctgacaccgatcgcagcagtgcacggtaggtggtcctcctggggtccacgcagtccgtgctctaggagctgcggtggtggagtcgtgacccgccgacgccagtgtaacaacccgcggccagcatttggtggtagggcgtgcgtcggagcagacctgcaggcagagatgtgcaatacgcaggcgtgcgaaaagacccagctggaattcatgagccagcagtgtgcccgaactgacggccagccgctacgcagctcgccgggaggcgcgtccttttatcactggggtgcggcagtgcctcatagccagggagacgccctgtgtcgccacatgtgccgcgccattggtgaatcttttataatgaaacgcggcgactcatttctggacggtacccggtgcatgccatccggtccacgtgaagacggtacgttgagcctgtgtgtgagcggttcctgccgtacgttcggctgcgacggtcgcatggattctcagcaagtgtgggacagatgccaagtttgcggtggtgacaatagcacttgtagtcctcgcaaaggctcattcaccgcgggccgcgcccgcgagtacgtgacctttttgactgtgactccaaatttgacctctgtgtacatcgcaaaccataggccgctgttcacccacctcgcagttcgcataggtggtcgttacgtggtcgctggtaagatgtcgatctcccccaacaccacgtatccttcgctgcttgaagatggacgtgtcgaataccgcgtggcgctgactgaggatcggctacctcgtcttgaggaaattcgcatctggggaccccttcaggaagatgcggacattcaggtttatcgccgctacggcgaagagtatggcaacctgacccgcccagacattacttttacatactttcagcctaagccgcgacaggcctgggtttgggccgcagtgcgcgggccgtgcagcgtgtcctgtggagcgggtctcagatgggttaattacagctgcctggatcaagcgcgcaaagagctggtagagacggttcaatgccagggttctcaacagcctcctgcttggccggaggcttgcgttttggagccgtgccctccgtattgggctgttggtgacttcggcccgtgtagcgctagctgtggcgggggcctccgagagcgccctgttcggtgtgtcgaggcccagggaagccttctgaagacgctcccgccggcacgttgcagagcgggtgcccagcagcctgcagttgcactggagacatgtaatccacaaccttgcccagcacggtgggaggtctcggaaccatcttcctgtactagcgcaggtggtgcggggttggcgctggagaacgaaacttgtgtgccaggagcagatggcctggaggctccggtgaccgagggccccggtagcgttgacgagaaactgccagcgcccgaaccgtgtgtcggtatgagctgccccccggggtggggacacctggatgccaccagcgcgggcgagaaagctccgtcgccttggggcagcatccgaacgggcgcgcaagcagcccacgtgtggacgccggctgcgggttcctgcagcgtgagctgtggacgcggtctgatggagcttcgctttctctgtatggattcggctctgcgagtccccgttcaggaagagctgtgcggtctggcctccaagccaggctcgcgtcgggaggtgtgtcaagcggtgccgtgcccggcccgttggcagtacaaactggcagcgtgctctgtgagctgcggccgcggggtggttaggcgcatcctgtattgtgccagggctcatggggaagatgacggagaagaaatcttactcgatacccagtgccagggtttgccgcgcccagaaccgcaggaggcgtgttcactggagccatgcccgccgcgatggaaggtgatgagcctgggtccctgcagcgcctcgtgtggactcggtacggcgcgcagatctgttgcctgcgtgcagctggaccaaggtcaagatgttgaggtcgatgaggccgcctgtgctgccttggtgaggcctgaggcctctgtgccgtgtttgatcgcagactgcacctatcgctggcacgtcgggacctggatggaatgctctgtgagctgcggtgatggaattcaacgccgccgtgatacctgcctgggaccgcaagcacaagcaccagtgccggccgacttttgtcaacacttgcctaagcccgttaccgttaggggctgctgggccggtccttgcgtgggccaaggtaccccatctctggtgccacatgaagaggcggcagcacctgggcgcacgactgccaccccggctggcgcgtctctggaatggagccaagcacgtggactgctgtttagcccagctccccaacctcgtcgtctgctgccaggccctcaagaaaatagcgtgcagagctcagcgtgtggccgccagcacctggagccgaccggtacaatcgatatgagaggtccaggtcaagcggactgtgcagttgcgattggtcgtccgttaggggaagttgttaccctcagagtcctggaatcaagcctgaactgcagcgctggtgacatgctcctgctatggggccgcctgacctggcggaagatgtgccgtaaactgctggatatgacctttagtagcaaaacaaacaccttagtggttcgccagcgttgtgggcggccaggaggcggggttttgctccgctatggttcgcagttggcaccggagactttctatcgtgagtgtgacatgcaactgtttggcccatggggcgagatagtcagcccgtctctcagccctgcaacctccaacgcgggcgggtgccgcctgttcattaatgtggccccgcacgccaggattgcgattcatgcactggcaacaaatatgggcgcaggtactgaaggtgcgaatgcttcatatatccttatccgcgacacccacagcctgcgtacaacggcgttccacggtcagcaggtgctgtactgggaaagtgagagctcacaggcagaaatggagtttagcgagggatttttgaaggcgcaggcgagcctgcgtggccagtactggacgctgcagtcctgggttccagagatgcaggaccctcaaagctggaaaggcaaagagggtacg

SEQ ID NO: 5632 - DNA, 4281 bp, synthetic construct
  misc_feature 1..4281: note = source = /note="Description of Artificial Sequence: Synthetic coding sequence"
  source 1..4281: mol_type = other DNA
atgcatcaacgccacccgagggcgagatgccctccgctgtgcgtcgctggcattctggcatgtggcttcttgctcgggtgttggggcccgtcgcattttcagcaatcatgtctccaggcactggagccacaagcagtgagcagctacttgagcccaggagcgcctctgaagggtcgcccgccgtcccctggctttcagcgacagcgccagaggcaaagacgcgccgccggcggtatcctccatttggagcttctggtggctgtgggacctgatgtctttcaggcccaccaagaggacaccgagaggtacgtgctgaccaacctgaatatcggtgcggagctcctccgggacccgtccctcggtgcgcaatttagagttcacctggtgaagatggtgatcctgaccgaaccggaaggagcaccaaacataaccgccaacctgacctcttcgctgctctcggtgtgcggatggtcccagaccatcaacccggaggacgacactgacccgggacatgcggacctggtgctgtacattacccggttcgacctcgagctcccggacggaaatagacaggtgagaggagttacgcaactgggaggagcctgctccccgacctggagctgcctgatcaccgaggacaccggattcgacctgggagtgaccatcgcccatgagattggtcattcgtttggactcgaacacgatggagccccgggatcgggctgtggaccctcaggacatgtgatggcttcagacggagccgccccaagagcgggacttgcctggtccccgtgttcacggagacagctgctcagcctcctctcagcaggacgggcgcgctgcgtgtgggacccacctcgcccgcagccagggtccgccggacatccgcctgacgctcaaccgggactctactactccgcaaacgaacaatgtcgcgtggctttcggaccgaaggctgtggcgtgtactttcgcacgcgaacaccttgatatgtgccaagccctctcgtgccacactgacccgctggaccaaagctcatgctcccggttgctggtgcccctgctggatggaactgaatgtggagttgaaaagtggtgctccaaaggacgctgccgcagcctggtggagctgaccccgattgccgccgtgcacggacgctggtcatcctggggaccacgctcaccgtgctctcgcagctgtggcggaggagtggtgactcgcagacgccaatgcaacaatccccgcccggcctttggcggtcgcgcctgcgtgggcgccgatctgcaagctgaaatgtgcaacacgcaggcatgcgaaaagacgcagttggagttcatgtcgcagcaatgcgcccgcaccgacggacagccgctcagatcctccccgggaggagcgtccttctaccactggggggccgccgtgccgcactcccagggagatgcgctttgtcgccatatgtgccgggctatcggcgagtccttcatcatgaagcggggagattcgttcctggacggtaccagatgcatgccgagcggaccacgggaagatggcactctgagcctgtgcgtgtcgggctcttgccgcacgttcggatgcgacggaagaatggactcccagcaagtgtgggacagatgtcaggtctgtggaggtgacaattccacttgctccccgcgcaagggctccttcaccgctggacgcgctcgcgagtacgtcaccttcttgaccgtgaccccgaaccttacctcagtctacatcgccaatcacaggcctctgttcacgcatctggccgtccgaatcggaggtaggtacgtggtggcaggcaagatgtccatctcaccgaacacgacctacccatcgctcctggaagacggccgcgtggagtaccgtgtggcattgactgaggatagactgccgcggctggaagaaattcggatctgggggccgctgcaagaagacgcagacatccaggtgtaccgccggtacggagaagaatacggcaatctgactcggcccgacatcacgttcacctactttcaaccgaaacctcgacaagcatgggtttgggccgcggtgcgcggaccgtgctcggtgagctgcggggccgggctgcgctgggtgaactattcctgccttgaccaagctcgaaaggaactcgtggagactgtgcagtgccaaggatctcagcaaccaccggcctggcccgaggcgtgtgtcctggagccgtgcccgccgtactgggccgtgggggacttcggaccatgctcagcgagttgcggcgggggcttgcgggaacggcccgtgcggtgcgtagaagctcagggttccctcctgaagacccttcctccggcgaggtgcagagccggagcccagcaacctgctgtggctctggagacttgcaacccacagccgtgtcctgctagatgggaagtctcagaaccgtcgtcctgcaccagcgcaggaggggccggcctcgctctggagaatgagacttgcgtcccgggagcagacggactggaggccccggtcacggaaggcccggggtcggtggatgaaaagctgccggcacctgagccatgcgtgggcatgtcatgtcctccaggatggggacatctggatgcgacctcagcaggtgagaaagcgccatcgccatggggtagtatcagaactggagctcaagccgctcacgtctggaccccagccgccggtagctgctcagtctcgtgcggccggggactgatggaactgcggttcctgtgtatggattcggcactcagagtgcccgttcaggaagaactttgcggactcgcctcgaagcccgggtcacgcagagaagtctgccaggcagtgccatgccccgcgcgctggcaatacaagctggctgcctgttcagtgtcgtgcggacgcggtgttgtccgacggatcctgtactgcgcaagagcccacggagaagacgacggagaagaaatcctgttggacacccagtgtcagggactgcccaggcctgagccgcaggaagcatgctccctcgagccgtgccctccgaggtggaaggtgatgagcctgggcccgtgtagcgccagctgtggccttggaactgctcggcggtccgtcgcatgcgtccagcttgaccaggggcaagacgtcgaagtggacgaagccgcgtgtgcagcacttgtgcggcctgaggctagcgtcccttgcctgatcgctgactgcacgtaccgctggcacgtgggaacctggatggagtgctcggtgtcctgcggagacggaatccagcggaggagagatacctgcctcggaccgcaagcacaagccccggtcccggccgacttctgccagcaccttccgaagcccgtgactgtgcgcggatgctgggcgggcccgtgcgttggacagggaacgccatcactggtgccccacgaggaagcagcggcaccaggaaggaccactgcaactccagctggcgcgagcctggaatggtcccaggcccgggggctgctgttctcgcctgccccccaaccgcgccgattgctgccgggtccgcaagagaactcagtccagagctcggcttgcggtcggcagcatctggaaccgaccggcacgatcgatatgcgcgggccagggcaagcggactgtgcggtggccattggtcggcctcttggagaagtggtcactctccgcgtgctggagtcctccctcaactgctcagcaggagacatgctgctgctctggggtcggttgacctggaggaagatgtgccgcaaattgctggacatgaccttctcctcaaaaaccaacactctggtcgtcagacaacggtgcggacgcccgggaggaggagtgctcctgcggtatgggtcgcagctggcaccggaaaccttctatcgcgaatgcgacatgcagctgtttggcccttggggagagatcgtgagcccgagcctgtcacctgcaacctccaacgccggcggttgcagactgttcatcaacgttgctccgcatgcccgcatcgctattcacgcactcgctactaacatgggagctggcaccgaaggagcgaacgcgtcatacatcctcatcagagatactcacagtcttcggaccaccgcgttccacggccagcaggtgctgtactgggaatctgagtcctcacaagcggagatggaattctcggaaggattccttaaggcacaggcttccttgcggggccagtactggaccctgcaatcctgggtgccggaaatgcaagacccgcaatcgtggaagggaaaagagggaacc

SEQ ID NO: 5633 - DNA, 4281 bp, synthetic construct
  misc_feature 1..4281: note = source = /note="Description of Artificial Sequence: Synthetic coding sequence"
  source 1..4281: mol_type = other DNA
atgcaccagaggcacccgcgggctcgctgcccgcctctgtgtgtggcaggaatcctcgcctgcggatttctgctgggatgttggggtccgtctcatttccagcaatcatgcctccaggcattggagcctcaggcagtgtccagctatctctcaccgggagctcctctgaaggggcggccaccgtcaccgggttttcaacgccagagacagaggcaacggcgggccgctggaggaatacttcatctggaactgctggtggctgtcgggcctgacgtgttccaggcgcatcaggaagatactgagcgatacgtgctgaccaacctcaacataggagcagagctcttgagggaccctagcctgggagcacaatttcgggtccacctggtcaagatggtcatcctgactgagcccgagggagccccgaacatcaccgccaacctgacttcatcgctgctgtcggtttgtggttggtcccagacgatcaaccctgaggacgataccgaccctggtcatgctgacctggtcctctacattactcggttcgaccttgagctgccggacggcaatcgccaagtgaggggtgtgacccagctgggaggagcgtgctctccgacttggtcgtgtttgatcaccgaagatactgggttcgacctcggagtgactatcgcgcatgagatcggacactccttcggcttggagcacgacggcgctcccggctccggatgcggaccttcgggtcacgtgatggcaagcgacggagcggcgccgcgcgctggcctcgcctggtcgccctgctcgagacgtcagctcctttcactcctgtccgcaggaagagcccgttgcgtgtgggacccgccgaggccacaaccggggtcagctggacacccaccagatgcgcaacctggactgtactattcagcgaacgaacagtgccgggtggccttcggaccaaaggcagtggcttgcacctttgcccgcgagcatctcgatatgtgccaagccctctcttgtcataccgatccgctggaccagtctagctgttcgcgcctgctcgtgccgctgctggatggaactgaatgtggggtggaaaagtggtgctccaaagggcgctgcaggtccctggtggaactgaccccaattgccgccgtgcacgggagatggtcaagctggggcccgagatcaccatgttccaggtcctgcggtggaggcgtggttacccgccggcgacagtgcaacaaccccagaccggcgtttggagggcgcgcttgtgtcggagccgacctgcaagctgaaatgtgtaacacccaggcgtgcgaaaagactcagctggagttcatgagccaacagtgtgcccggaccgacggacagccgctccgatcctcaccggggggtgcctccttctatcactggggagcggcagtgccacactcccaaggcgatgccctctgtagacatatgtgccgcgccatcggagaatcgtttatcatgaaaagaggggactccttcctggacggcacgcgctgcatgccgtccggaccgcgcgaggacggcaccctctcgctgtgcgtgtccggttcctgtagaaccttcggatgtgatgggcggatggactcccaacaggtgtgggaccggtgccaagtctgcggtggggataactcgacctgcagcccccgcaaaggatcattcaccgccgggagagctagggaatacgtcactttcctcaccgtgacccctaacctgacctcggtgtacatcgcgaaccacagaccgctgttcactcacctcgcagtccgcattggtggacggtatgtggtcgccggaaaaatgtcgatttccccgaacactacttatccttcgctgctcgaggacggaagagtggaataccgggtcgcgctgaccgaagatcggctccctagactggaagaaatccgcatctggggaccactccaagaggatgccgatatccaggtgtaccggaggtacggagaggaatacgggaacctgactagacctgacattaccttcacttactttcaacccaaacctagacaggcttgggtctgggccgccgtgcgcgggccctgctcagtgtcttgcggagctggactgagatgggtgaactattcctgcctggatcaagcccgaaaggaactggtggaaactgtgcagtgccagggatcgcaacagccgccggcgtggcctgaggcatgcgtgctggagccgtgtcctccttactgggccgtcggggactttgggccgtgttcggcttcgtgtggtggagggctgcgggaacgcccggtcagatgtgtcgaggcccagggcagcctgctgaaaaccctgccgcccgcgcggtgccgggccggagcacagcaaccagccgtcgccctggagacttgcaacccgcaaccttgtccggcaagatgggaagtctccgagccttcgtcctgcacgtccgcgggtggcgccggcttggctctggaaaatgaaacttgcgtgccgggagccgacgggctggaggccccagtgaccgaaggtcctggctccgtggacgaaaaactgcccgcgcctgaaccttgcgtcggaatgtcatgtccgccggggtggggacatcttgatgctacctcggccggcgagaaagcaccgtcgccatggggaagcattcggaccggcgctcaggcagcccacgtgtggactccggcagcggggagctgctcggtgtcatgtggacggggactcatggaacttcgcttcctctgcatggactcggcgctccgggtgccagttcaggaggaactttgcggactggcctcaaagccgggctctcgccgggaagtgtgtcaggccgtgccttgcccggcacggtggcagtacaaactggccgcttgcagcgtctcgtgcggaaggggagtggttcggaggatcctgtactgtgcacgcgcccatggggaggatgatggcgaagaaatcctgttggacacccagtgtcagggtttgccgcgccctgaaccccaggaagcatgctccctcgagccgtgcccgcctcgctggaaagtgatgtctctgggaccatgctcggcaagttgtggtctgggtactgcgaggcggtcggtggcatgcgtccaactggatcagggacaggatgtggaagtggacgaagccgcctgtgctgctctggtcaggcctgaggcttccgtcccatgcttgatcgccgactgcacctaccgctggcatgtgggaacttggatggaatgctccgtgagctgtggtgatgggatccaacgccggcgcgacacctgtctggggccgcaggcgcaggccccagtgccggcagatttctgtcagcacctgcctaaaccggtgactgtccggggatgctgggccggaccgtgcgtgggccagggcacgccaagcctggtcccgcacgaagaggccgcagcgccagggcgcactactgccactcccgcaggagcctcactcgaatggagccaggcgcggggactcctcttctcaccagcgcctcagccccgcagacttcttccgggtccgcaagagaactcagtgcagagcagcgcatgcgggcgtcagcacctggaaccgactggaaccattgacatgagaggaccgggacaggcggactgcgctgtcgccattggccgcccattgggggaggttgtcactctcagggtccttgaaagctcgctcaactgttcggctggggacatgcttctcctgtggggtcgcctgacttggcgtaagatgtgccgaaagctcctcgacatgacttttagtagcaagaccaacacccttgtggtccgccagagatgcggaaggcccggcggaggcgtgctgctgcggtacggatcacagcttgctccagagactttttaccgcgagtgcgacatgcagctcttcggaccgtggggtgaaatcgtgtcgccgtccttgtccccggccacttcgaatgccggaggttgccgcctgttcattaatgtggcaccacatgcgcgcatcgccatccacgctcttgcaacgaatatgggagcaggaactgaaggagcgaacgcgtcatacatcctgatccgggatacgcattcccttcgcaccaccgctttccatggacagcaagtgctgtactgggaatcggagtcgtcccaagccgaaatggaattcagcgagggattcctcaaggcgcaggccagcctccggggacaatactggaccctgcagagctgggtccctgagatgcaagatccacaatcgtggaagggaaaggagggcact

SEQ ID NO: 5634 - DNA, 4281 bp, synthetic construct
  misc_feature 1..4281: note = source = /note="Description of Artificial Sequence: Synthetic coding sequence"
  source 1..4281: mol_type = other DNA
atgcatcagaggcatcccagagctaggtgcccacccctgtgtgtcgctgggatcctggcatgcgggtttttacttgggtgctggggaccctctcactttcagcagagttgtctgcaggcactggagccccaagccgttagtagctacctgtcaccgggagcgcccctgaagggtcgacctccaagccccggttttcaacgtcagagacagaggcagagaagagctgctggtgggatcttgcacctggagttgctagtggccgtgggtccagacgtgtttcaggcccaccaggaggatactgagagatatgtcttgactaacctgaacattggcgccgaactgctccgagatccctccctgggggcccaattcagagtacacttggtaaagatggtaatacttactgagcctgagggggcgcccaacatcacagccaacctgacttccagcctgctgagtgtttgcgggtggtcccagaccattaaccctgaggatgacaccgatcctggtcacgcggacctggtcctgtacatcacccgatttgacttggagttaccagatgggaatcggcaagtccgaggggtgacacagttgggtggggcctgctcccccacctggtcctgcctgatcaccgaggacacgggctttgacctgggcgtgaccattgctcatgaaattggacactcttttgggctcgaacatgatggggctcctgggtcaggctgcgggccgtctggacatgtgatggcgtctgatggcgctgccccccgtgcaggcctcgcttggagcccgtgcagcagaaggcagcttctgtcactgctgagcgccggacgtgctcggtgtgtgtgggacccccctaggcctcagcccggctctgccggccatccacccgacgctcaacccggactgtactatagcgcaaacgagcagtgtcgtgtggccttcggaccaaaggctgttgcctgtactttcgcaagagaacatctggacatgtgccaggccctcagctgtcataccgaccctttggatcagtctagctgtagcaggcttcttgttccccttttagatggcaccgaatgtggcgtggaaaaatggtgcagcaaaggccggtgccgctccctggtcgagctgacaccaatcgctgccgtgcacggtagatggtcttcctggggtccccgctccccttgctccaggtcctgcggagggggcgtggttacgcgcagacgtcagtgtaacaatccgcgacccgcctttggcggaagggcctgcgtgggggccgacctccaagcagaaatgtgcaacacccaggcttgtgagaagacacagctggagtttatgtcccagcaatgtgctagaactgacggacagcccctacgttcctcacctgggggcgcgtctttttaccactggggcgccgcagtccctcactcccaaggcgatgctctgtgtaggcatatgtgtagagcgatcggggaaagttttattatgaagcgaggggactcattcctggatggcacccgttgtatgccgtccggacctcgcgaggacgggaccctgtctctttgcgtgtccggatcttgccgaacgtttggttgcgatggaagaatggacagccagcaggtgtgggaccggtgccaggtctgcgggggcgataactccacatgctctcctagaaaagggtcttttaccgcgggtcgcgcgcgggagtacgttacgtttctaactgtcactcctaaccttacatccgtctacattgccaatcatcggcccctgttcacacacctcgctgtccgcataggtggacgctacgtggtggccggcaagatgagcatctctccaaatacaacctaccccagccttttagaggacggaagggtagaatacagagtggcccttaccgaggatagacttccaagactcgaggaaataaggatttggggccctttgcaggaagatgctgacattcaagtgtatagaagatacggagaggaatacgggaacttaacccgacccgacatcacattcacatactttcaacccaaaccccgacaagcttgggtgtgggcagccgtgagaggaccttgctcggtctcatgcggcgcaggcctccgctgggttaactacagctgtctggatcaggcgaggaaggagttagtagagacagtgcagtgccagggtagccaacaacctcccgcatggcctgaggcatgcgtcttagaaccatgtccaccttattgggccgtgggggattttggcccgtgcagcgcctcttgcggcggcggactcagggaaagacccgtgcgatgtgtagaagcccaaggctctcttcttaaaacactgcccccagctagatgccgtgcaggcgcacagcagccggccgttgccctggagacatgtaacccacagccctgccccgctcgctgggaggtgagcgagccttctagttgtacctccgccggcggcgccgggctcgccctggagaacgagacttgcgtacctggagctgacggcctggaggctccggtaactgaggggcctggctctgtggacgagaaactgcctgcccccgaaccctgcgtgggcatgtcttgtcccccgggctggggccacctggacgcaacttccgcgggcgagaaagcacctagcccttgggggagcattcggaccggcgcgcaagcagctcatgtatggacccctgccgcaggctcctgcagcgtctcatgcggacgaggtctaatggaattgagattcctatgcatggacagcgcactgcgggtgcctgtgcaggaagaactgtgtggcctcgcttcaaaacccgggtcgcgccgggaggtctgtcaggcagtcccatgccctgccagatggcagtacaagctggcagcatgctcagtgagttgtggacgcggtgtggtgcggcggatactgtactgtgccagggcccatggagaggatgatggagaagagatcctgctggatacccaatgtcaggggttaccaagaccggaaccgcaggaggcttgctctctcgagccatgtcccccaagatggaaagtcatgagtctcggaccctgttccgcctcttgtggactgggaaccgcacggcgcagtgtggcctgcgtgcaacttgatcagggtcaggacgtggaagtcgacgaggctgcttgcgcagccctcgttcggcctgaagctagcgtgccctgtctgatcgcagattgcacttaccggtggcacgttggcacgtggatggagtgttccgtatcttgcggggacgggatacagcgtcgcagggacacgtgtctcggcccacaagctcaggcaccggtgccggccgacttctgtcagcatcttcctaagccagtgaccgttcgagggtgttgggctggcccatgcgtcggacaggggacccccagcctggttccccacgaagaagctgccgcccctggacgcacaacagcgactccggccggcgcgagcctggagtggtcccaggcacgtggattgctttttagccctgcgccccagccgcgccggctgctccccggtccccaggagaattctgtgcagtctagcgcctgcgggcgtcagcatcttgagcctaccggcactatagacatgagaggccctggacaggcagactgcgccgtcgcaatcgggagaccgcttggtgaggtagtcacgctcagagtgctggagagctctcttaactgttccgcaggcgacatgctgctgctttggggtcgcctcacctggagaaagatgtgtcgaaagctgttagatatgaccttcagcagtaagaccaatactttagtggtccgacagcggtgtggccggccagggggaggtgtgctgcttagatatggatcccagctagcccctgaaacattttatagggagtgcgacatgcagctgtttggcccatggggagagatagtcagcccctccctgagtccagcaacgtcaaacgcgggaggatgtcgactctttatcaacgtggccccccacgcccgcatagcaatccatgcgctggcaactaatatgggtgccggaacggagggggccaacgccagctacatcctcatacgggacacacacagcctccgtacaactgctttccacggacagcaagtcttatattgggagtctgagtcatcccaggcggaaatggagttttccgagggtttccttaaagcacaggcaagcctgcggggtcagtattggacacttcagtcttgggtgcctgaaatgcaagacccacagtcttggaaagggaaagaagggacg

SEQ ID NO: 5635 - DNA, 4281 bp, synthetic construct
  misc_feature 1..4281: note = source = /note="Description of Artificial Sequence: Synthetic coding sequence"
  source 1..4281: mol_type = other DNA
atgcaccaacggcatccaagagcgcggtgtcctccgctttgcgtggccggaatactcgcctgtggctttcttcttggttgttggggtccatcccatttccagcaatcatgtctgcaggcactggagccacaagcagtgtcatcctatctttcaccgggggcacctcttaaaggtagaccaccctcgcccgggtttcagcgtcagagacagcgacagagaagggcggccggagggatcctgcatctggaacttttggtggcggtcggacctgacgtgttccaagcgcaccaggaggatactgaacgctacgtgctgaccaacctgaacatcggagcagagcttcttagggatcccagcttgggcgcacaatttcgggtgcatctggtgaagatggtgatccttaccgaaccagaaggtgcacccaacattacggcaaaccttaccagctcacttctctccgtctgtggttggtcccagactattaaccctgaagatgatactgatccgggtcatgccgacctcgtcctgtacatcactcgcttcgatctggagcttcctgatggaaacagacaagtgcgcggtgtgacccagcttggtggcgcttgctccccaacctggtcgtgccttataaccgaggacactgggttcgatctcggagtgacgattgcgcatgagattggtcactcctttgggcttgagcatgatggcgctccaggaagcggatgtggaccttcaggacacgtgatggcatcagacggtgcagcgccgagagcaggcttggcatggtccccgtgttcccgtagacagttgctgagccttctttccgcaggtcgagctaggtgcgtgtgggaccctccaagaccgcaacccggatctgcaggacatccccctgatgcacagccaggactgtactactcggcaaatgagcagtgccgcgtggccttcggaccaaaagcagtcgcatgtacttttgcaagagaacatcttgatatgtgtcaggcattgagctgtcatactgaccccttggaccaaagctcatgttcaagactcctcgtccccctgcttgacggaaccgaatgcggagtggaaaaatggtgctccaaaggtcgctgccgctcgctggtcgaactcacccctatcgcagcagtccacgggcgttggtcgtcctggggacctcgcagcccctgttcaagatcctgtggcggaggagtggtcactcgcagacggcaatgcaataaccctcggcctgcgtttggaggtcgcgcatgcgtcggagcggatttgcaagcagaaatgtgtaatacccaagcgtgtgagaaaacccaacttgaattcatgagccagcagtgtgcccgcactgatggacaaccactcaggtcgtcgcccggcggtgcgtcgttttaccactggggagcagcagtgcctcattcccaaggcgacgccctctgccgccatatgtgtcgcgcgataggagagagcttcatcatgaaaagaggtgactcgtttcttgacggtacccgttgcatgccatccggacccagagaagatggaactctgtccctctgtgttagcggatcgtgtagaacctttgggtgtgatggacggatggactcgcagcaagtgtgggacagatgtcaagtgtgtggtggtgataactcaacgtgttcacctaggaagggatcatttaccgcaggccgcgctagagagtacgtcacgtttctgactgtgactcctaaccttacgtccgtgtatatcgccaaccataggcctctctttacccaccttgcagtgagaatcggtggacggtacgtggtggcaggaaagatgagcatttccccaaacaccacttacccatcgctgcttgaagatggacgcgtggagtacagagtggctcttacggaagatcggctcccccgcctggaggaaataaggatttggggaccacttcaagaagatgcagatattcaagtctaccgtaggtatggcgaggaatacggaaatcttacccgacctgatattaccttcacctactttcaaccaaaaccacgccaagcatgggtttgggccgcagtccggggtccctgctccgtctcgtgtggagccggactgcgatgggtgaattactcgtgtctggatcaagccaggaaggaactggtcgagactgtccagtgtcaaggatcccaacagcccccagcatggccggaagcgtgtgtactggagccctgtccaccttactgggcggtgggagattttggcccttgtagcgcaagctgcggcggaggtctgagagagcgacctgtgcgttgcgtggaagcccaaggttcactgcttaagaccctcccccctgctcgatgcagggcaggtgcccagcagccagccgtggcacttgaaacgtgcaacccgcagccatgtccagcgagatgggaagtctctgaaccttcaagctgtaccagcgcggggggagcaggacttgcacttgaaaatgagacttgcgtgccaggtgccgacgggctggaagcacctgtcactgagggacctggatctgtcgacgagaaactgcccgcaccagagccatgtgtgggaatgtcctgtccacccggatggggacacctcgatgcaacctcagctggagagaaagccccaagcccttggggatcgatccgtactggagcacaggcagctcatgtgtggacccccgcagcaggcagctgttcggtcagttgtggtcgcggactgatggaacttcggttcctgtgcatggactccgcccttagagtgccagtccaagaagaactctgcggtctggcctccaagcctggatctaggagagaagtctgtcaagccgttccctgtcctgcaaggtggcagtacaagctggcagcttgttccgtgagttgcgggcgaggtgtcgtgcgcagaattctgtactgtgcaagagcacatggagaggacgatggagaagaaattcttctcgatactcaatgtcagggacttccaagacctgaaccccaagaggcctgtagcctcgaaccctgtcctccccggtggaaggtgatgagcttgggtccttgctccgcctcatgcggactgggaaccgcaagacgctcggtggcatgtgtgcaacttgatcaaggtcaggacgtggaagtggatgaggcagcatgtgcggcacttgtccgccccgaagccagcgtgccttgtcttattgctgactgtacctaccgctggcatgtgggaacttggatggaatgctctgtgtcctgtggagatggaattcagagacgacgtgatacctgtcttggtccacaggcacaagcgcccgtcccggccgacttttgtcagcatcttccaaaacctgtgaccgtgcgtggatgttgggcgggtccttgcgtcggacaaggcaccccttcccttgtgcctcacgaagaagcggcagcacctggtagaactactgcaacgccagcgggcgcaagccttgaatggtcacaggccagagggctgctgttttccccggcacctcaaccaaggagactcctgccgggaccacaagaaaactcggtgcagtcgtcggcgtgtggacgacagcatcttgaacccacggggactattgacatgagaggtcctggacaggcggattgcgccgtggcaattgggcgaccactcggggaagtggtgactcttcgcgtgctggaatcgtccctgaattgttcggccggagatatgctgcttttgtggggaaggcttacctggcggaaaatgtgtagaaagttgctcgatatgaccttcagcagcaagaccaataccctggtcgtgagacaaaggtgtggtaggcctgggggaggcgtgctcctcagatacggttcccagctcgctccagaaaccttttaccgtgaatgtgacatgcaactctttggcccatggggggagatcgtgtcaccttccctgagccctgccacctcaaacgccggagggtgtaggctgttcattaacgttgctccacatgcaaggattgcgattcacgcactcgccaccaacatgggtgccggaactgaaggtgccaacgcgtcttacatcctgatcagggatactcattcgcttcgtaccactgcatttcatggacaacaggtgctgtattgggaatcggaaagttcgcaagcagagatggaattttcagagggatttcttaaagcacaggcttccctgcgcggacagtactggacgctgcaatcgtgggtgcctgaaatgcaggatccacaaagctggaagggaaaagaaggtacc

SEQ ID NO: 5636 - DNA, 4281 bp, synthetic construct
  misc_feature 1..4281: note = source = /note="Description of Artificial Sequence: Synthetic coding sequence"
  source 1..4281: mol_type = other DNA
atgcatcagcggcatccacgcgcgcggtgtcctcccctctgtgtcgcgggcatccttgcgtgcgggtttttgctggggtgttgggggccctcccattttcagcagagctgcctgcaagcgcttgagccgcaggccgtgtcatcatacctttcaccgggagcccctctgaaaggtcgcccgccatcccctggcttccaaaggcaacggcaacgccagcggcgggctgctggcggcatccttcacctggagctgcttgttgcagtggggccggacgtgtttcaagcccaccaggaagatacggaaagatatgtgctgaccaacctcaacatcggggccgaactgcttcgggaccctagcctcggagcccaattcagagtgcatcttgtgaagatggtgatcctgaccgaacccgagggagcgccaaatatcaccgccaacttgacctcatcccttctgtccgtctgcggatggtcccaaaccatcaacccggaagatgatactgatccaggtcatgctgacctcgtcctctacatcacccgatttgatttggaactgcccgacggaaacagacaggtccgcggcgtcacccaactgggcggagcctgtagtccgacgtggagctgcctgattacggaggacaccgggttcgatctcggagtgaccatcgcgcatgagattggacactcgtttggtctggaacatgacggtgcaccgggatcggggtgcgggccatcagggcacgtgatggcgtcggatggcgcagcccctcgcgccggactcgcctggagtccgtgctcgcggcgacagctcctctccctgctcagcgccggtcgggcccgctgcgtgtgggaccctcctcgaccacagccgggttcggcaggacacccgcctgacgcccaaccgggactgtactactccgcgaatgaacagtgccgtgtggcattcggtccaaaggccgtcgcctgcactttcgcccgtgagcacctcgacatgtgccaggcgctttcctgccacaccgacccactggatcaaagctcgtgctcgaggctgctggtacccctgctggacggaaccgaatgtggagtggagaagtggtgctccaagggtcgatgccggagcttggtcgagctgactcccatcgcggcagtgcacggacggtggtcatcctggggaccaagatccccatgctcgaggtcttgtggcgggggagtggtcactcggcgacggcaatgcaacaacccaagaccggccttcggaggacgggcatgcgtgggagcagatctgcaagccgaaatgtgtaatactcaggcctgcgagaaaactcagctggagtttatgagccagcagtgtgcgcggaccgacggacagcccctgagatcatccccgggaggcgcctcattctaccactggggtgcggccgtgccgcactcgcaaggcgacgcactgtgccggcatatgtgccgagcgatcggagaatctttcatcatgaagcggggtgatagcttcctggatggaaccagatgtatgccgtcggggccgagagaggacggtaccctgtcgctttgtgtgagcggctcatgcagaaccttcggatgcgacggtcgcatggactcacagcaggtgtgggacagatgccaagtgtgcggaggtgacaattcaacctgctcgcctcgcaaggggtcgtttaccgccggccgcgcgcgggaatatgtcactttcctgacggtgacccccaaccttactagcgtctacatcgcaaaccaccgcccacttttcacccacctggccgtccggattggtggacgttacgtggtggcagggaagatgtctatcagcccaaatactacctacccatccctgctggaggatggtcgggtcgaataccgagtggcactgacggaggaccgcctcccccgcttggaggaaatcaggatctggggtccccttcaagaagatgcagatattcaggtgtacagacgctacggagaggagtacggaaatctcacgcgcccggacatcaccttcacctacttccagcctaaaccacggcaggcttgggtgtgggcagccgtccgaggcccgtgcagcgtgtcctgcggagcaggtttgcgctgggtgaactactcgtgccttgaccaagcacgcaaggaactggtggaaactgtccagtgccagggctcgcagcagccacccgcctggccggaagcctgtgtccttgagccctgcccaccttactgggctgtgggcgattttggaccttgctccgcctcctgtggaggaggtctgcgcgaacgcccagtacgctgtgtcgaggctcagggatccctcttgaaaactttgccgccagctaggtgcagggcgggagcccagcaaccagccgtcgcgctggagacttgcaatccccagccttgccctgcccggtgggaagtctcggaaccaagctcttgcacctcagccggcggagcgggcctggcgttggaaaacgagacgtgcgtgccgggcgcggacggactcgaggccccggtcacggaggggcccggttcggtcgacgaaaagctgccggcccctgaaccatgtgtgggcatgtcgtgtccgcctgggtggggccatctggatgccacttcggcgggcgaaaaagcgccgtctccgtgggggtcgatacgcactggagcgcaggccgcccacgtctggactccggctgcgggctcttgctcggtgagctgtggtaggggtctgatggaactccgctttctgtgcatggactcagctctcagagtgcccgtgcaggaggaactctgcggactcgcgtccaaacctggttcccgccgggaagtctgccaggcagtgccttgtcccgcgcggtggcagtacaaactcgcagcttgttccgtgtcatgcgggcggggcgtggtccgtagaatcctctactgcgcacgcgcacacggagaggacgacggcgaagagatcctgctggacacccagtgtcaaggactcccacggccggaaccgcaagaggcatgttccctggaaccgtgtccgccaaggtggaaagtcatgtcgctcggaccgtgcagcgcttcctgcggccttggcactgctcgccgcagcgtcgcgtgcgtgcaactggaccagggtcaagacgtcgaagtggacgaggccgcgtgtgcagccctggtcagaccggaagcgtccgtcccgtgtctgattgcagactgcacttaccgctggcacgtgggaacctggatggagtgctccgtgagctgcggagacggaatccagaggcgccgcgatacttgtctgggccctcaggcgcaagcccctgtccctgccgacttctgtcagcacctcccaaagcctgtcaccgtgcgcggatgctgggccggaccgtgcgtcggccaagggaccccttctctcgtgccgcatgaggaagccgcagcgcccggacggacgaccgccaccccggcgggcgcgtcgctggagtggagccaggcccggggactcctcttctcaccggctccgcaaccaaggcggctgctgcccgggccacaggagaatagcgtgcagagctccgcgtgcgggcggcaacacctcgagcccaccggtactatcgacatgaggggcccaggccaagcggactgcgcagtggctatcggtcgcccactgggggaagtggtcactctcagagtcttggagtcctccctgaattgtagcgccggagatatgttgctcctttgggggagactgacgtggagaaaaatgtgcagaaagttgctggatatgaccttctcgagcaagactaatactctcgtcgtcaggcagcgctgcggacggcccggtggaggagtgctgttgcgctacggatcccaacttgccccggagactttctatagagagtgtgatatgcaactgtttggcccgtggggagagatcgtttccccgtcgctgtccccagcgacttcgaacgcgggcggatgccggctgttcattaacgtggcgccgcatgccaggatcgccatccacgcccttgcgaccaacatgggtgctggcactgaaggcgctaacgcatcgtacatcctcattagagatacccactcgctgcgaaccaccgctttccatggacagcaggtcctttactgggaaagcgagtcgtcgcaggctgagatggagttttcagaggggtttctgaaggctcaagcctccctgagaggtcaatactggactctgcagtcatgggtgccagaaatgcaggacccccaatcctggaagggcaaggaaggaacc

SEQ ID NO: 5637 - DNA, 4281 bp, synthetic construct
  misc_feature 1..4281: note = source = /note="Description of Artificial Sequence: Synthetic coding sequence"
  source 1..4281: mol_type = other DNA
atgcaccagcgccacccgcgggctcgctgcccgccactgtgtgtcgcgggaatcctggcctgcggcttcctgctcggatgctggggaccaagccatttccagcaatcatgtctgcaagctctggaaccacaagctgtgtcgtcgtacctgtcaccgggggccccgctgaagggacgaccaccgagccctgggtttcagagacagcggcagcgccagcgccgcgccgccggtgggattctccacctcgagctcctggtcgccgtgggccccgacgtctttcaagcgcaccaagaggataccgagagatacgtcttgaccaatctcaacatcggagcggagctgctgcgagatccatctttgggtgcccagttcagagtgcatctggtcaagatggtcattctgacggagcccgagggggcaccgaatatcaccgcgaaccttacctccagcctgctctcagtctgcggctggtcgcagactattaacccggaggacgacaccgacccaggccacgccgatctcgtgctttacatcacgaggttcgatctcgagcttccggacgggaatagacaggtgcgcggcgtgacgcagcttgggggcgcctgctctccgacctggtcttgcctgatcaccgaagatacgggattcgaccttggagtgaccatcgcgcatgagatcggccactccttcgggcttgaacacgacggagcacctgggtcaggatgtggcccgtcaggacatgtcatggcatccgatggagccgcaccaagggccggcctggcctggagcccatgctccagacggcagctgctctcccttctctcagcaggtagagcacgctgcgtgtgggacccgccaagaccgcagccgggaagcgccgggcacccaccagacgcacagcctggactgtactactctgccaacgagcagtgccgggtcgccttcggacctaaggccgtggcgtgcacgttcgcccgcgagcatctggacatgtgtcaagccctgtcctgccacactgacccacttgaccagagctcgtgctcccgccttctggtgccactgctcgacggcaccgagtgcggagtggaaaagtggtgcagcaaaggacgctgcagatcgctggtcgaactgaccccgatcgctgcagttcatggaaggtggagctcatggggaccgcggtcgccttgttcaagatcttgtggaggcggcgtcgttactagacgacggcagtgtaataacccacgacccgcctttggaggacgcgcttgtgttggagcggaccttcaagctgaaatgtgtaatacccaggcttgtgagaaaacgcagctggaattcatgtcacagcagtgtgctcgcaccgatggccagcctctgagatcctccccgggaggcgcttctttttaccactggggagccgcagtgcctcattcccaaggtgacgcgctctgtaggcacatgtgcagagcgatcggtgaatcgttcatcatgaagcgcggggactcgttcctggacgggacccgctgcatgccttcgggaccgcgcgaggacggaactctctccttgtgcgtgtccggatcctgccgcaccttcggatgcgatggacggatggattcccagcaagtgtgggatcggtgccaggtgtgcggcggagataactccacgtgctcccctcgcaaaggatccttcaccgcgggacgcgcgcgggaatacgtgaccttcctgactgtgactccgaatctgacttcggtctacattgctaatcatcgccctctcttcactcatctcgctgtcaggatcggaggccgttacgtggtcgctgggaaaatgtccatctcgcctaacactacctacccaagcctccttgaagatggacgggtcgagtaccgggtcgctctgaccgaggacaggctcccgcgcttggaagagattagaatatggggaccgctgcaggaagatgcggatatccaggtctaccggcgctacggcgaagagtatggaaacctgactcgcccggatatcactttcacgtacttccagcctaagccacgccaggcatgggtgtgggccgcggtccgggggccttgctccgtgagctgcggggcaggactgcggtgggtgaactacagctgtttggaccaggcgcggaaagaacttgtcgaaaccgtgcaatgccaaggatcgcaacaaccgcccgcgtggccggaggcatgcgtccttgaaccttgtcccccttactgggcagtgggagatttcggtccctgttcggcttcctgcggcggaggactgcgcgagcgcccagtgcggtgtgtggaggcccaaggatcgttgctgaaaacgctgccaccggccagatgccgcgcaggggcccagcaaccggccgtggcccttgaaacctgcaatccccagccgtgcccagcgagatgggaagtgagcgaaccctcatcgtgcactagcgcaggaggagcaggcctggctctggagaacgaaacttgtgtgccaggtgcggatggtctggaggcccccgtcaccgaaggacctggctcagtggatgaaaagctgcccgccccggagccctgcgtcggaatgagctgcccgccgggatggggacacctggatgcaaccagcgcgggtgagaaggccccgtccccgtggggctccatccgcactggtgcccaagcggcccacgtgtggaccccagcggcgggaagctgttcggtttcttgcggaagaggcctcatggagctcagattcctgtgcatggactcagccctgcgcgtgcctgtgcaagaagaactgtgcggactggcaagcaaacctggatcgcgccgggaggtgtgccaagccgtcccctgccccgcccgctggcaatacaaactggcggcctgcagcgtgtcctgtggccggggagtggtgcgcaggattctctactgcgcacgcgcccacggtgaggatgatggggaggagatattgcttgacacccaatgccagggactcccccgcccggaaccacaagaagcctgctcgctggagccatgcccgccacggtggaaggtgatgtcgctcggtccatgcagcgcttcatgcggactgggaaccgccaggcgctccgtggcctgcgtgcagctggatcagggacaggacgtggaagtggacgaagccgcttgcgctgccctcgtcaggcccgaagcctccgtgccgtgcctgatcgccgattgtacctaccgctggcacgtgggaacttggatggaatgcagcgtctcatgcggagacggaatccaaaggagacgcgacacctgcctcggcccccaagcacaagcgccagtgccggcggatttctgccaacatttgcctaagccggtgaccgtgaggggttgctgggcgggaccatgcgttggacagggaaccccatcactggtgccgcacgaggaagcagccgcccctggtcggactactgcaactccagcaggcgccagcctggaatggtcgcaggcaagaggcctcctgttctccccggccccgcagccgaggagattgctgcccgggccacaggaaaactccgtgcagtcgtccgcctgcggccggcagcacctggaaccgaccgggactatcgacatgaggggcccaggtcaggcagactgtgccgttgcgatcggacgtccgctgggagaagtcgtgactctgcgcgtgctcgaatcgagcctgaattgctctgctggagacatgctgctgctttggggccgcctcacctggcggaagatgtgccgcaaactccttgacatgacgttttcatcaaaaaccaatactctggtggtgagacagaggtgcggccgaccaggtggaggcgtgctcctgcggtatggcagccagctcgctcctgaaaccttttaccgagaatgtgatatgcaactcttcgggccgtggggggaaatcgtctccccttccctgtcgccggctacctcaaatgccggaggatgccgccttttcatcaacgtggcaccgcacgccaggatcgcaatccatgctctggccaccaatatgggagcggggaccgaaggagccaacgcctcctacatcctcattagggatactcattcgctgagaaccactgctttccacggacaacaggtcctgtactgggagagcgagtcctcgcaagccgaaatggagttctcggaagggtttctcaaggcacaggcctctttgcggggacagtactggaccttgcagagctgggtgccggagatgcaggacccgcaatcgtggaagggaaaggaaggaact

SEQ ID NO: 5638 - DNA, 4281 bp, synthetic construct
  misc_feature 1..4281: note = source = /note="Description of Artificial Sequence: Synthetic coding sequence"
  source 1..4281: mol_type = other DNA
atgcatcagaggcacccacgcgcacgttgtcctccactgtgtgtggcagggattttggcgtgtggcttcttgctaggctgttggggaccatctcactttcagcagtcctgcctccaggccctagagccccaggcggtttcatcgtacttgtctcccggtgcgccactgaaaggcagaccgccttctccaggattccaacgccagaggcagaggcagcggcgggcagccgggggcattctccaccttgagttactggtcgccgtaggtccggacgtattccaggctcatcaggaggacacagaaaggtacgtcctcacaaatctaaacattggcgctgagttgctgagggacccttcacttggcgcacagtttagagtccacctcgtgaaaatggtcatcctcaccgaacccgagggggcgcctaacattacagccaatctcaccagtagcctgctcagcgtgtgcggatggtctcagaccataaaccctgaggatgatacagacccggggcacgcagatctggttttatacattactcgctttgatctagaactgccggacggaaatcgccaggtgcggggcgtcacacagctcgggggagcctgctctcccacatggtcctgcttgatcaccgaggatacaggcttcgatctgggcgtaacaatagcacacgaaatcggacattcctttggtctggagcatgacggagcacccggctccggatgtggacctagcggccacgtgatggcatcagatggggcagcaccccgggccggcttagcttggagcccatgttcaaggcgtcagctcctaagccttctctccgccgggcgggcacgctgcgtgtgggaccctcctcggcctcagccgggctccgccggacaccctccggacgcgcaaccaggcctgtactatagcgccaatgaacagtgccgggtcgcatttggccccaaggctgtggcatgtactttcgcgagagagcacttggatatgtgtcaggcgctctcctgtcacactgacccacttgaccagagctcctgttccagactgctggtgcccctgcttgatggaacagagtgtggggtcgagaaatggtgctctaagggacgttgtcgaagcctggtagagttaacccctatcgcagccgttcatggccggtggagttcatggggacctagaagtccctgctcgcgatcatgtggagggggcgtcgtgacacgcagacgccagtgcaacaacccgaggcccgcgtttggagggcgggcctgtgtgggagcagacctgcaggcagagatgtgcaacacacaggcatgcgaaaaaactcagcttgagtttatgagtcagcagtgcgcgaggaccgacgggcagcctctgcgctcttcaccaggcggggcaagtttctatcactggggcgcagcagtcccacatagccagggcgatgccctgtgccggcacatgtgccgcgccatcggcgagtctttcatcatgaagcggggggacagcttcctagacgggactagatgcatgccaagcggcccacgggaagacggtacattaagtctgtgcgtgagtggtagttgtaggaccttcgggtgtgacgggcgtatggactcccaacaggtgtgggatcgttgccaggtttgtgggggggataacagtacctgttctcccagaaagggttcctttaccgctggtcgagcaagagaatatgtgaccttcctaaccgtgactccgaacctgactagcgtgtatatagccaaccacaggcctcttttcacacatctggcagtgcggatcggaggtaggtacgtcgtagctgggaaaatgtccatcagtcctaacaccacctacccatcacttttggaggacggacgggtcgagtatcgggttgcactcactgaggataggctgcccaggctggaggaaatcagaatctgggggcccctgcaggaggacgcagacatacaggtgtatcgccgctacggggaagagtacggcaacctgactcgccctgacataacttttacatacttccagcctaagcctcggcaggcctgggtatgggctgctgtgagggggccctgcagtgtctcttgcggagccggcttaaggtgggtgaactactcgtgcttggaccaggcccgaaaggagcttgtcgagactgttcagtgccaggggagccagcagcctcccgcctggccggaagcttgcgttctggagccctgtcctccatattgggccgtgggggactttggaccttgttctgcatcttgcggtggcggattgagggaaagaccagttcgttgcgtggaagcacagggttctctgctgaaaaccctgcccccagctaggtgtcgtgcaggagctcagcaaccagccgtcgcactagagacctgcaacccacagccttgccctgcacgatgggaggtttcagagccctcctcttgtacttccgccgggggtgctggcctggcactcgaaaatgagacttgcgttcccggcgctgacgggttagaggcacccgttactgaaggcccgggcagcgtcgacgagaagttgccggcgcctgagccctgcgtgggtatgtcttgtcctcccggctggggccacttagatgccaccagtgcaggggaaaaggcaccgagtccctggggaagtattagaactggcgcccaggcagcccatgtttggactccggccgccgggtcctgctccgttagctgtggacgtggcctgatggaattacgattcctgtgtatggatagtgcactccgagtccctgtgcaggaggagctgtgtggtctggccagtaagcctggcagtcgacgcgaggtgtgccaggcagtcccatgccccgccaggtggcagtacaaacttgccgcctgctccgttagttgtgggagaggtgtcgtacgccgaatcctgtactgtgcccgagcgcatggtgaagatgacggcgaagaaatactccttgacacccaatgccaggggttaccccgaccagagccgcaagaggcctgtagcctcgagccctgccctccacgctggaaagtcatgtccctgggcccttgcagcgctagctgcggcctcggaaccgccagacgatctgtggcttgtgtccagctggaccaaggccaggacgttgaggtggatgaggccgcatgcgccgccctcgtccgacctgaggcatctgttccttgcttaattgcagactgtacctatcggtggcacgtcggcacctggatggagtgtagtgtgtcatgcggagacggtatccagcggaggcgggacacctgcctaggtccgcaagcgcaagcaccagtgcccgcagatttctgtcagcacctgcccaagccagtgacagtgcgcggctgttgggccggaccgtgtgtgggccaggggacccctagtttagtaccacacgaggaggccgccgctcccggccgtacaacagctactccggcaggagccagcctggaatggtcacaggcccgcgggcttttattcagtccagcccctcaacctcgtcgtcttctgccagggcctcaagagaactccgtacagtcaagtgcgtgcggccgtcaacacttggaacctactggaaccatcgatatgcgggggcccggacaggccgattgcgcagtagcaattggacgccccctcggtgaggttgtaacactccgggtactggagtccagtctgaattgttcggctggtgacatgctgctcctgtgggggcggttaacctggcggaagatgtgtcggaaactcttagatatgactttttcatctaagacaaacacactcgtcgtaagacaaagatgcgggcggcccggtgggggggtcctgctgcgctacggaagtcagctcgcccccgagactttttatagagaatgcgatatgcaactcttcgggccatggggcgagatcgtctccccatccctgtccccggctacgagcaacgccggaggctgccgcctcttcattaacgtagccccacatgcacgcatcgccattcacgccctggctactaatatgggagccggaaccgagggcgccaacgcttcgtacatcttgataagggacacccatagcctgagaacgaccgcatttcacgggcagcaggtcctgtattgggaaagcgagtcatcgcaggctgaaatggagttctccgaagggtttcttaaggcccaggcctcccttaggggtcagtattggactctgcagagttgggtgcccgaaatgcaagaccctcaatcttggaaggggaaagagggtaca

SEQ ID NO: 5639 - DNA, 4281 bp, synthetic construct
  misc_feature 1..4281: note = source = /note="Description of Artificial Sequence: Synthetic coding sequence"
  source 1..4281: mol_type = other DNA
atgcaccaacgtcatcctagagcaagatgtccaccactttgtgtagctggaattttagcatgtggatttcttcttggttgttggggaccatcacattttcaacaatcatgtcttcaagctttagaaccacaagctgtatcatcttatttgtctccaggagcacctttaaaaggtagaccaccatctcctggatttcaacgacaaagacaaagacaaagaagagctgctggaggaatattacatttagaacttttagttgcagttggacctgatgtttttcaggctcatcaagaagatactgaaagatatgtattgactaatttaaacataggggctgaattacttcgagatccaagtttaggagctcaatttcgtgttcatttggttaagatggtcattcttacagaacctgaaggagcacctaatataactgcaaatttaacttcatcacttctatcagtttgtggatggagtcaaactattaatccagaagatgatacagatccaggacatgctgatttggttctttatattacaagatttgatcttgaacttccagatggtaatagacaagttagaggagtaactcaattaggaggagcatgttcacctacttggtcatgtcttattactgaagatacaggattcgatttaggagtaacaatagctcatgagattggacatagttttggtcttgaacatgatggagcaccaggttcaggatgtggaccatctggacatgtcatggcaagtgatggggctgcaccacgtgctggtctagcatggtcaccatgttcaagaagacaacttttgtcattattaagtgcaggtcgagctagatgtgtttgggatcctccaagaccacaaccagggtcagctggacatcctcctgatgcacaaccaggactttattatagtgctaatgaacaatgtcgagttgcctttggtccaaaagcagttgcttgtacatttgctagagaacatttagatatgtgtcaagcattatcatgccataccgatccattagatcaatctagttgttctcgtttacttgttccattattggatggaactgaatgtggagttgaaaaatggtgttctaaaggaagatgcagatcattagttgaattaacaccaatcgctgcagtccatggaagatggagtagttggggacctcgtagtccatgtagtagatcatgtggtggtggagtagttacacgtagaagacaatgtaataatccaagaccagcttttgggggaagagcttgcgtaggtgctgatttacaagctgaaatgtgtaatacccaagcttgtgaaaaaacacaacttgaattcatgtctcaacaatgtgcaagaactgacggacaacctcttagatcatcccctggtggagcatcattttatcattggggtgctgctgttccacattcacaaggagatgctctttgtagacatatgtgtagagctattggtgaaagttttattatgaaaagaggagattcatttttagatggaactagatgtatgccttctggaccaagagaagatggaactttaagtttatgtgtttcaggatcctgtagaacttttggatgtgacggacgaatggattctcaacaagtttgggatagatgtcaggtatgtggtggggataatagtacatgtagtccacgtaaaggttcatttactgcaggaagagctagagaatatgttacatttcttactgttacacctaatcttacttcagtatatattgctaatcatagaccattattcacacatttagctgtcagaattggtggtagatatgttgttgctgggaaaatgagtattagtccaaatacaacatatcctagcttattagaagatggaagagttgaatatagagtggcacttactgaagatagattaccaagattagaagaaataagaatttggggacctcttcaagaagatgcagatattcaagtttataggagatatggagaggaatatggaaatttaactagaccagacataacttttacttattttcaaccaaagccaagacaagcatgggtttgggcagctgtacgaggtccatgtagtgtttcatgtggagctggattaagatgggttaattacagttgtttagatcaagctagaaaagaacttgtagaaacagttcaatgtcaaggatctcaacaaccaccagcttggccagaagcttgtgttctcgaaccttgtccaccatattgggctgttggtgatttcggaccatgtagtgcatcttgtggaggaggactaagagagagaccagttagatgtgttgaagcacaaggatctttacttaaaaccttaccaccagcaagatgtagagctggtgctcaacaaccagctgtagctttagaaacatgtaatccacaaccatgtcctgcacgatgggaagtatctgaaccatcttcatgtacatcagctggaggagctggacttgccttagaaaatgaaacatgtgttccaggggcagatggacttgaagcaccagttactgaaggaccaggttctgtggatgaaaaattacctgctcctgaaccatgtgttggaatgtcatgtcctccaggatggggtcatttagatgctacaagtgcaggtgaaaaagctccttcaccatggggttcaatacgtacaggagctcaggcagctcatgtatggactccagctgcaggatcttgtagtgttagttgcggtagaggacttatggaacttagatttttgtgcatggatagtgctttaagggttcctgttcaagaggaactttgtggtttagcatctaaaccaggttctagaagagaagtttgtcaagcagttccatgtccagctagatggcagtataaacttgcagcttgttctgttagttgtggacgtggagttgttcgtcgtattttatattgtgctagagctcatggtgaagatgacggagaggaaattcttttagatactcaatgtcaaggacttccaagacctgaaccacaagaagcttgttcacttgaaccatgtccaccaagatggaaagtcatgtctcttggaccatgttcagcttcttgcggacttggtacagcaagacgttcagtagcttgtgttcaacttgatcaaggacaagatgtagaagttgatgaagctgcttgtgctgctttagtccgtcctgaagcttctgttccatgtttaattgcagattgtacttatagatggcatgtaggtacttggatggaatgtagtgttagttgtggtgatggaattcaaagaagaagagatacttgtcttggacctcaagcacaagcaccagtacctgcagatttctgtcaacatttaccaaaaccagttacagtcagaggatgttgggctggaccatgcgttggtcaaggtactcctagtttagtaccacatgaagaagcagctgctccaggaagaacaacagcaacaccagcaggagcatctttagaatggtcacaagctagagggcttttatttagcccagcaccacaaccaaggcgtttgttaccaggaccacaagaaaattctgttcaaagttctgcatgtggacgacaacatttagaaccaacaggtacaattgatatgagaggaccaggacaagcagattgcgctgttgctattggaagaccattaggtgaggttgttacacttagagttttggaatcatctttaaattgttcagcaggagatatgttacttctttggggaagattaacttggagaaaaatgtgtagaaagcttttggatatgacattttcatcaaagactaatactcttgttgttagacagagatgtggtagaccaggggggggagtgttattacgatacggatcacaattggcaccagagactttttatagagaatgtgacatgcaactttttggaccatggggagaaattgttagtccaagtttgtcaccagctacttcaaatgctggtggatgtaggttatttattaatgtagcaccacatgcaagaatagctattcatgccttagcaactaatatgggtgcaggaacagaaggtgcaaatgcaagttatattcttattagagatacacattctttacgaactacagctttccatggtcaacaagttttatattgggaatcagagagttctcaagctgaaatggaattttcagaaggatttttaaaagctcaagcttctttaagaggacaatattggactttacaatcttgggttcctgaaatgcaagatccacaatcatggaaaggtaaagaagggaca

SEQ ID NO: 5640 - DNA, 4281 bp, synthetic construct
  misc_feature 1..4281: note = source = /note="Description of Artificial Sequence: Synthetic coding sequence"
  source 1..4281: mol_type = other DNA
atgcatcaaagacatcctcgtgctagatgtcctccgctgtgcgtggccggaattctcgcgtgtgggttcctgctgggctgttgggggccatctcacttccaacagagttgtcttcaggcactagaaccccaagcagtgtcttcctacctttcacccggagctcccctaaaaggccgaccgccctcgcctggtttccagcgtcaaagacagcgacagaggcgcgcggctggcggcattctgcacctggagttgctcgtcgccgtgggcccggatgtgtttcaagcacatcaggaggacaccgagcgatatgttctgacaaatctgaacatcggggctgagctactccgggaccccagcctcggcgcacaattccgggtgcatctggtgaagatggtaatcctaaccgagccagagggcgctcctaacattactgccaatttgacgagcagtttattgagcgtgtgtggttggtcacagaccatcaatcccgaagacgacactgaccccgggcacgctgatctggtgttgtatatcacccggtttgatctcgagctgccagacggaaaccgtcaggttaggggcgtgactcagctcgggggtgcctgctctccgacctggtcttgcctcatcaccgaggacaccggcttcgatctgggcgtgaccatcgcacacgagatcgggcactccttcgggttagagcacgacggagcaccgggaagcggatgcggacctagcggccacgtgatggcatccgatggggcggctccgcgtgcgggcctggcgtggagcccctgctcaagacggcagttgctgagtttgctgagcgccggtcgtgcgaggtgcgtgtgggacccaccccgccctcagccagggtctgctgggcacccccccgacgcccagcccgggctttactactcagcgaacgagcagtgccgtgttgccttcgggcctaaagccgtggcttgcacctttgccagagaacacttggatatgtgccaggcactgtcgtgccacaccgatcccctggatcagagctcatgcagtaggctgctggtgcctctcctggacggtaccgaatgtggggtcgaaaagtggtgctctaaaggacgatgtcggagtctcgtggaactgactccaattgcagctgtccatgggaggtggagtagctggggacctcggagcccatgtagtcgctcctgcgggggaggagtggtaacgaggcgcaggcagtgcaacaaccccagaccggctttcggtggacgcgcttgcgtgggagccgatcttcaagcagagatgtgtaatactcaggcctgcgaaaaaacacagttagaattcatgtcacagcagtgcgcaaggaccgatggccagcctttgaggtcttcacccgggggcgccagcttttaccactggggagctgccgttccccattctcagggggacgccctgtgtcgacacatgtgtagggcaatcggcgaaagctttattatgaaacgtggcgattcgttcctggatggcacgcggtgtatgccatcagggccccgcgaggacgggactctgagtctgtgcgtgagtgggtcttgcagaaccttcggatgtgatggccgcatggattctcagcaggtgtgggatcgctgccaggtgtgtggcggagacaattccacctgcagcccacgcaagggctcctttacagcaggcagggctcgggagtatgtcactttcctgaccgtgactccgaatctgacgtctgtctatatcgccaaccataggcccctcttcactcatctagctgttagaattggcgggcgatacgtggtggccgggaagatgagtatttctcccaatacaacataccccagcctgctggaagacggccgggttgagtaccgcgtagccctcactgaggatcgactcccccggttggaagaaatccggatctggggaccattgcaggaggacgccgacatccaggtgtaccggcgctacggtgaggagtacggcaatctgactagaccggacataaccttcacgtacttccagccgaagccacggcaggcatgggtgtgggctgcagttcgcggaccctgtagtgttagctgcggagccggcttacgctgggtgaattactcctgccttgaccaagccaggaaagagctggtggagaccgttcagtgccagggctctcagcagccacctgcttggccggaagcgtgcgtcttggagccatgtcccccatactgggcagtgggcgattttggaccatgcagcgccagctgcggcggcggtctgagagaaaggcccgtacgttgtgtggaggcccagggatccctgctcaaaaccctcccacctgcgaggtgccgagcaggagcccaacaacctgccgtggccctcgagacctgtaacccacagccctgtccagccagatgggaggtttcggagcccagttcatgtacctcagctggcggcgctggcctagctctggagaatgaaacctgtgtgcccggagcagatggcctggaagccccagttaccgaaggaccaggctccgtggatgaaaagttacctgccccagaaccatgcgtggggatgagctgcccacctggttggggccatctcgacgctacttccgctggggaaaaggctccctccccctggggctctatcaggaccggggctcaggccgcgcacgtgtggacaccggctgctggctcttgctccgtgtcctgtggcaggggcctgatggagctaaggtttctgtgcatggatagtgctttacgtgtcccagtgcaggaggagctgtgtgggctcgcctccaaacccgggtctcgtagagaggtatgtcaggctgtgccctgtccggccaggtggcagtacaagctggccgcctgcagcgtgtcttgcggccgcggcgtagtcagaaggatcttatactgcgcccgtgcgcacggggaagatgatggggaagagatactgctggatacacaatgtcagggcctaccaagacctgagcctcaggaagcttgctctctcgaaccgtgtccaccaaggtggaaggtgatgagcctgggaccatgctctgcaagctgcggcttaggaactgctcgcaggagtgtcgcctgcgtccagctggatcagggccaggacgtggaggttgatgaggcagcttgcgctgccctagtcagaccagaggcttccgtgccgtgcctcatcgctgactgtacctacaggtggcacgtaggaacgtggatggaatgtagcgtatcttgtggggacggcatccagcgacgacgagacacctgtctcgggccccaggctcaagcacccgtcccggccgacttctgtcagcacctcccgaagccagtgacagtacgcgggtgctgggctggcccctgcgtgggccaggggaccccttcgctggttccccatgaggaggccgccgcacctggccgtacaactgctacaccagcaggagctagtctggaatggagtcaagctagaggcctgctctttagtccagcccctcagcctcggcggctcctgcccggtccacaggagaattccgttcaatccagcgcctgtggtcgccagcacctcgaacccacgggaactattgatatgcgagggccgggtcaggcagattgtgcagtggcaattggtcggcccctgggcgaggtggtcacccttcgtgttttggaatccagcttgaactgttcggcgggcgacatgcttttactgtggggtaggcttacatggcgtaagatgtgcagaaagctgctcgacatgacatttagttctaagaccaacacgttagtggtccgacagagatgcggcagaccagggggcggggtcctgctgagatatggatcacaattggccccagagacgttctaccgggagtgtgatatgcagctgttcggcccttggggcgagatagttagcccctccctaagccccgctacgtccaacgctggcggatgtcgcttatttataaacgtggcgcctcacgcacgcatagccatccatgctctggcgactaatatgggagccggaacagagggagcaaatgcttcctatatcctcatcagagatacccattcactccgtaccacggccttccatggacagcaagtgttatactgggagagcgagagcagtcaagctgagatggagtttagcgaaggcttcctgaaggcacaggccagcctccgaggccagtactggactctccagtcatgggtgccagagatgcaggacccccagtcttggaaggggaaggaaggcacc

SEQ ID NO: 5641 - DNA, 4281 bp, synthetic construct
  misc_feature 1..4281: note = source = /note="Description of Artificial Sequence: Synthetic coding sequence"
  source 1..4281: mol_type = other DNA
atgcaccaacgccatccgagagcaagatgcccaccactctgcgtcgcaggaatactggcatgtggttttctgctggggtgttggggtccctcgcacttccagcagagctgcctccaagcactggaaccacaggccgtgtcatcgtacctttcccctggtgcccctctcaaaggcaggccgccatcaccaggcttccagcggcaaaggcagaggcaaaggcgtgccgcaggggggattcttcaccttgaacttctggtggcagtgggacctgacgtgttccaggctcaccaggaggacactgaacgttatgtcctcactaacctcaacatcggggcagagctgctcagagatccgagcctgggtgcccaatttcgagtgcatctggtgaagatggtgattctgaccgaaccggagggcgcacctaatatcactgcaaaccttacttcatctctgctcagcgtgtgtggatggtcgcagaccataaaccccgaggacgatacggacccaggccacgccgatctcgtcctgtacattacccgcttcgacttggagctgcctgatggcaatcggcaagttcgaggggtgacccaacttggaggggcatgttctcctacttggagctgtcttatcaccgaggacactggctttgacctcggggtgaccatcgcacatgagattggacactcatttggtctggaacatgatggggcccccgggtcgggatgtggaccttctggtcacgttatggcatcagacggagccgcgcctcgggcgggactcgcatggtccccttgctccagacgacagcttctctctctgctttccgcgggccgagcacgttgtgtgtgggatccaccaaggccacagcctggttcggcaggacatccacccgatgcacaaccaggactctactactccgcgaatgagcaatgtcgcgtggcgtttggtcctaaggcagttgcatgcactttcgcccgggagcatcttgatatgtgtcaagcgctgagctgccatactgaccctctggatcaatcgagctgctcgcgcctgcttgtcccacttctggatggtaccgaatgcggagtcgaaaaatggtgttccaagggtaggtgtcgatcactggtggagctcacccctatagctgctgtgcatggccggtggtcgtcgtggggaccccgtagcccatgttcgagatcatgcggtggaggagtcgtgaccagacgacgacagtgtaacaacccaagacctgcattcggaggacgggcctgtgtgggtgcggaccttcaagcagagatgtgcaacactcaggcatgcgaaaaaactcagcttgaattcatgagccaacagtgcgcaagaaccgacggtcaacctttgcgctcctcgccaggcggtgcatcattttaccattggggtgcggcagtccctcattcgcaaggagacgccctttgtagacatatgtgtagagcgattggcgagtcattcatcatgaagcgtggagatagctttcttgatggaactcgatgtatgccttccggacccagagaggacggaaccttgtccctttgcgtctccgggtcctgtcggacgtttggatgtgacggtcgaatggattcgcagcaggtgtgggatcgttgtcaggtctgtggaggagacaactcgacctgtagcccaagaaagggctcgttcactgcagggcgggcaagggagtacgtcacttttcttaccgtgaccccaaacctcacgagcgtgtacattgccaaccacaggcccctttttactcatctggctgtgcggattggcggccgatacgtcgtggccggaaagatgagcatctcgcctaatactacctacccttccctgctggaagatggacgggtggaataccgggtcgcacttactgaagatcggcttccacgtctggaagaaattagaatttggggaccactgcaggaagatgcagatatacaggtctaccgccggtacggagaggaatacggaaaccttactcggccagatattaccttcacttactttcagcctaagcctcgacaggcctgggtgtgggcagccgtgcgcggaccttgctcagtgtcgtgcggtgctggtttgcgatgggttaactacagctgtctggatcaagcacgaaaggaactggtggaaacggttcaatgtcagggctcgcaacaacctccggcctggccagaggcttgtgtccttgaaccatgccccccttactgggcagttggggacttcggcccttgttccgcctcatgtggtggtggtctgcgcgagcgtcccgtgcgctgtgtcgaagcccaaggatcgctgcttaagactctgccccctgcacgttgtagggcgggagcacaacaacctgcggtggcgctggaaacgtgtaatcctcagccctgccccgcccgttgggaagtttcagaaccttcgtcgtgtacttcagcaggaggcgcaggtcttgcccttgaaaacgaaacctgtgtgcctggggcagatggactggaagcacctgtgactgaggggccgggatcagttgatgagaaacttcccgcacctgaaccttgtgtcggcatgtcctgccctcctggatggggccacctggatgcaacctcagctggtgagaaagcaccatcaccgtgggggtcaatacggaccggagcacaagctgcgcacgtgtggactcctgccgccggatcgtgttcggtgtcctgtggtaggggtctgatggaactgcgcttcctgtgtatggattcggctctgcgggttccagtgcaagaagaattgtgcggactggcaagcaaaccgggctcgagacgcgaggtgtgtcaagcagtcccatgtcctgccagatggcaatacaaattggcagcctgttcggtgtcgtgtggaagaggagtggtgcgccggattctttactgcgcgcgggcacatggggaagatgatggtgaagaaatccttcttgatactcagtgtcaaggccttccccggcctgaaccgcaggaagcatgtagcctggaaccctgtcctccccggtggaaagtgatgtcgctcgggccttgctccgcgtcatgcggtctgggcaccgctagaagatcggtggcgtgtgtccaactcgaccagggacaagatgtggaggtggacgaggccgcttgtgcagcgctggtgcgacccgaggcttcagtcccatgccttattgcagattgcacctatagatggcatgtgggaacctggatggaatgctccgtcagctgcggagacgggatccagcgacggcgggatacctgcttgggacctcaggcccaagcaccagtgcctgccgacttttgtcagcaccttccaaaacctgtgaccgttcgtggatgttgggcaggaccctgcgtggggcaaggaaccccttccctcgtcccccacgaggaagcagcggcaccgggccggaccacggcaacgccggcaggtgcctcgcttgagtggtcccaagcaaggggactgctctttagccccgctccacagccaagacgcctcctgccaggaccgcaagagaatagcgtgcagtctagcgcctgtggtcgccagcatcttgagccaaccggaactattgatatgcggggacctgggcaggcggactgtgcagtggctattgggaggccactcggagaagtcgtgactcttcgtgtgttggaatcatcgctcaactgctcagccggtgatatgctcctgctttggggtagacttacttggcgaaagatgtgtaggaaattgctcgatatgactttctcttcaaagacgaatactctcgtggtgagacaaagatgtggaaggcctggtggcggtgtgcttcttagatatggaagccagcttgctcctgaaaccttttaccgagaatgcgatatgcagctctttggcccttggggtgagatcgtgagcccttcactttccccagcaacttcaaacgcagggggatgccgtctgttcataaatgtggcacctcatgcaagaattgcgatccatgccctcgctactaacatgggtgcaggtaccgagggtgcaaatgcgtcctacatccttattagagacacccattcccttcggactacggcctttcatggtcaacaagtgctgtactgggagtctgaatcatcccaagctgaaatggaattttccgaaggctttctcaaggctcaagcatcgctgagaggacaatactggacgcttcaatcctgggtcccggagatgcaggacccccagtcatggaagggaaaggagggaacc

SEQ ID NO: 5642 - DNA, 4281 bp, synthetic construct
  misc_feature 1..4281: note = source = /note="Description of Artificial Sequence: Synthetic coding sequence"
  source 1..4281: mol_type = other DNA
atgcaccagcgacatcccagagcccgctgcccccctctttgtgtagccggtattctggcttgcggttttctgctgggctgttggggcccatctcattttcagcaaagttgccttcaagcccttgaacctcaagctgtgagttcttacctgagtcccggggccccactgaaaggaagacccccttcacccggcttccagagacagcgccaacgccaaaggagggcggctggagggatcctccatctggaactcctggttgccgtcggccctgatgtttttcaggctcatcaggaggacacagaacggtacgttttgaccaacttgaatattggcgccgaactgctgcgcgacccctccttgggggcacagtttcgcgtgcacttggtgaagatggtgatcctgacggaaccagagggagcgccaaacattaccgctaacctgacttcttccttgctgtcagtatgcggttggtctcagactatcaaccccgaagatgatactgaccccgggcatgcggaccttgtgctgtatatcacgagatttgatctggagctgcctgacggtaacagacaagttaggggggtcactcagcttggaggagcatgtagtccaacttggtcttgcctcatcacagaagacaccggattcgacctgggggtaaccattgcgcacgagatcggccatagtttcggactggaacacgacggagcacctggctccgggtgcggaccaagcggccacgtaatggcctccgatggggcagctcctcgggctggcctggcatggagcccttgttccaggcggcagcttctctcactgctcagcgctggcagagcccggtgcgtttgggatcctccaagaccacagcccggctcagcaggccaccctccagatgctcagcctggactgtactattctgcaaacgaacaatgtcgagtggccttcgggcccaaggcagtagcgtgtactttcgccagggagcacttggatatgtgccaagctctgagctgccatactgatccgttagatcaaagttcctgttctcgcctcttagtgccactcttggacggcaccgaatgtggcgtggagaaatggtgcagcaaaggcaggtgcagatctttggtggaactgactccaatcgctgccgttcacggaaggtggagctcttggggacctcgtagcccatgtagtagatcttgtggcgggggggtcgtaacccgcagaagacaatgcaacaacccaaggcctgcttttggcggacgcgcttgcgtaggcgctgacctgcaagctgagatgtgcaacacccaagcttgcgaaaaaacacagcttgagtttatgtcacagcaatgcgctcggaccgacggccagccacttaggagtagccccggtggagccagcttttaccactggggcgctgccgtgcctcatagccagggagacgctctctgcaggcacatgtgcagagctatcggggagagttttatcatgaagaggggagacagcttcttggatgggaccaggtgtatgccgtccggccctagagaagatggaactctgagcctgtgcgtcagcggctcctgcagaacatttggttgcgatggaagaatggatagtcaacaggtgtgggaccgctgccaggtttgtggaggggataatagcacctgtagcccaagaaagggctctttcaccgcagggagggcccgggagtacgtgactttcttgaccgtgacccccaaccttacttctgtgtatattgctaaccatcggcctctctttacccatctggccgtccgaatcggaggacgatacgtagtagctggcaaaatgtccattagtcctaacactacatacccctctctgctggaggatggcagggttgagtaccgcgtggccctcactgaggatagactgcccagacttgaggaaatccggatctggggacctcttcaggaggatgcggacatccaggtttataggagatatggagaagaatacgggaacctaacaaggcccgacattacgttcacctacttccagccaaagcccagacaggcttgggtctgggcagccgtcagagggccctgtagcgtcagctgtggagcgggattgagatgggtgaattactcttgtctggaccaggctagaaaagaattggtggagactgtacagtgccagggaagtcagcaaccacccgcttggcccgaagcttgcgtcctcgagccgtgtccgccttactgggccgtgggagatttcggtccctgcagcgcttcttgtggcggaggcctgcgggaacgaccagtgagatgtgtggaagcccagggaagcttgctgaagaccctccctcccgcaaggtgccgtgctggtgctcagcagccagccgttgccctggagacctgcaaccctcaaccttgccccgctaggtgggaggtttcagagccttcctcttgtacatctgcaggtggggcgggtttagctctcgagaacgaaacctgcgtccccggcgctgacggattggaggctccagtcaccgaaggcccaggctctgtcgacgagaagttgcccgcacccgaaccctgcgtgggaatgagctgtccacccggctggggtcatctggacgctacaagtgctggcgagaaggctccgtccccgtggggcagcattaggacaggagcacaggccgcacacgtgtggactcccgcagctggcagctgctctgttagctgcgggcgagggctaatggagctccgtttcctgtgcatggactctgcacttagggtcccggtgcaagaggaactttgcggtctggcgagcaaacccggctcacggagagaagtctgtcaagctgttccttgccctgcaaggtggcaatataaactggcagcatgcagcgtgagctgcggaagaggagttgtgaggcgcatcctctactgtgcacgggctcatggggaggacgatggagaggagatacttctggatacacaatgccaagggttgcctagacccgagcctcaggaagcctgtagtttggaaccctgccctccacgatggaaagtcatgtctttgggtccttgttctgcctcttgtgggctgggtactgcaagacggagtgtagcttgcgtgcaactcgaccaagggcaggatgtggaagtggatgaggcagcttgtgcggctcttgtacgtccagaggcgagtgtgccctgcctgatcgctgattgcacctaccgttggcatgtgggaacttggatggagtgtagcgtgtcttgtggggacggcatccaacggagacgtgatacatgcttaggtccacaagctcaggcgccagtccctgcagacttttgtcagcatcttccgaaacccgtgactgtcaggggatgctgggcaggaccatgtgttggccagggaacaccttcactcgtcccccatgaggaagcagctgcccccggcagaaccactgctacacccgccggagcttcactcgagtggagccaggcgcgcggcttgctgtttagtcccgcgccccaaccacgcagactgcttccaggcccacaagagaatagcgtccaatccagcgcttgtggccgccagcacctggaacccaccggaaccatagatatgaggggtccaggacaggccgattgtgctgtcgcaatcggcaggcctctcggggaagtagttactttgcgcgttcttgagtcttccctgaactgctccgccggtgatatgctcctgctgtggggaaggctgacttggaggaaaatgtgcaggaagcttctggatatgaccttctcgagcaaaactaacaccctggtcgtgcggcagcgttgcggacgtcccggggggggagtacttttgcgctacggaagccaacttgcacctgaaacattttacagggaatgcgatatgcaactgtttggcccatggggcgagatcgtgagccccagccttagtccagccacatcgaacgcaggaggttgccggctttttattaatgttgctcctcacgctagaatcgcaatccacgccttggctaccaacatgggagcaggcaccgaaggcgctaacgcgtcatatattctaatcagagatacacatagcctcagaactaccgcctttcacggccaacaagtgctttactgggagtccgagtcttcacaagcagaaatggagttcagcgaaggattcttgaaagcacaggcatctctgaggggacagtactggaccctgcaaagttgggtaccagaaatgcaagatccacaatcatggaagggcaaggagggaacc

SEQ ID NO: 5643 - DNA, 4281 bp, synthetic construct
  misc_feature 1..4281: note = source = /note="Description of Artificial Sequence: Synthetic coding sequence"
  source 1..4281: mol_type = other DNA
atgcaccagcgccaccccagagcccggtgtccccccctctgcgtagccggcattttggcatgtggtttcctgttgggctgctggggaccctcccattttcagcaatcctgcctgcaagctctagagccccaggcagtctccagctacttaagccccggcgctcctctaaaggggcggcccccctcacccggattccagcgccagagacagaggcagcgccgagctgccggcggcatacttcacctggagctgcttgtggcggtgggccccgatgtgtttcaagcccaccaagaggatacagaacgttatgtgttgaccaacctaaacattggagccgaactgctaagagacccctccctgggggcccagttccgggtacatcttgtgaagatggtcatcctgactgagccagaaggggctcctaatattacagccaatctcactagctctttactatcagtgtgtgggtggagtcaaacaataaacccagaggacgacacagatcccggccacgcggacttggtgctgtacatcacccggtttgatctggaactcccagacggcaatagacaagtcaggggagtgactcagttgggaggggcatgctccccaacgtggagctgcctcatcaccgaagatacaggtttcgacctgggcgtaaccatcgcccatgagatcggtcatagcttcggactggagcacgacggggcccccgggtctggatgtggaccaagtggacacgtaatggctagcgacggggccgcacctcgtgccggacttgcttggtccccctgttctcggcgtcagctgctaagcctgctgtcagccggacgtgcacgttgcgtgtgggatccgccacgaccccagcccggatctgccgggcatcctcccgatgcacagcccggactgtattactcagccaatgagcagtgtcgggttgcctttggtcctaaggcagtggcttgcacctttgcgagggagcacctcgatatgtgccaggctctgtcttgtcatacggatcccctggatcagagcagctgctcaaggcttctggtgcctttgctggacggaactgagtgtggtgtcgagaagtggtgctccaaggggcggtgtcggagtttggtcgaactcaccccaattgccgctgtccatggtcggtggtccagctggggccctcgctcgccttgcagccgcagttgcggcggcggcgtggtgacaagaagaaggcagtgcaacaacccgcggccggcattcggcggcagggcgtgcgtcggagctgatttgcaggcagaaatgtgcaatacgcaggcttgcgagaagactcagctcgagtttatgagtcagcaatgcgcacgcacagatggccaaccgctccgatcttcacctggaggcgcatcattttaccattggggcgctgcggtccctcattctcaaggtgatgcactgtgtcgccacatgtgtcgcgcaattggagagagcttcataatgaaaagaggtgacagttttctggatggcacaagatgtatgccttccggaccaagggaggacggtactctctctttatgcgtgtcagggagctgcagaacctttggttgtgatggccgaatggacagccaacaggtctgggaccggtgccaggtatgtggaggggacaattcaacctgttcacctaggaaagggtcattcaccgctggcagagcgagggagtacgtgacattcctgacagtaacacccaacctgacttccgtgtacatcgcaaaccacagacccctgtttacacacttggccgtgcgcatcggcggtcgttatgtggtcgcaggcaaaatgtccatctctcccaacacaacttacccgagcctccttgaagacggccgggtcgaatatcgcgtcgcactaactgaggataggttgcccaggctggaggagatacgtatctggggacctctccaagaggacgctgatattcaggtctaccggcgatatggggaagaatacgggaatctgactcgcccagatataacgttcacttactttcagcccaagcctagacaggcctgggtatgggcagcggtccgaggaccatgttccgtgagctgcggggccggtcttaggtgggtaaactactcatgcctggaccaggcccggaaagagttggtggagaccgtacagtgtcagggtagtcaacaacctccagcttggcccgaggcctgtgttctagaaccttgtcctccctactgggccgtaggcgattttggtccctgtagcgcatcatgcgggggtgggctcagggagaggccagtacgttgcgtagaggcccaagggtccctgctgaaaaccctgcctcccgccaggtgccgcgccggcgcgcaacagccagccgtggcactcgaaacatgcaacccccaaccatgccccgctcggtgggaagtgtctgagccttcttcttgcaccagtgctggtggggctggtctggcactggagaatgaaacatgcgtgcccggtgctgatggtttagaagctcctgtcaccgaaggtcccggcagcgtcgacgaaaaactccctgcccccgagccctgcgtgggcatgtcctgcccgcctggttgggggcacttagacgctacctctgcaggggagaaagcccccagcccatgggggtccatacgcactggtgcccaggccgcccacgtgtggaccccagcggctggttcgtgctccgtgagttgtgggaggggcttgatggaactgcgttttctgtgtatggactctgcgttacgtgtacctgtgcaggaggagctgtgcgggctggcctcaaagcccggatcacgacgtgaggtctgccaggcagtgccttgtcctgcccgatggcagtataagctggcagcttgctcagtaagctgcggccgcggagtggtccggagaattttatactgtgcgcgcgcccacggagaggatgacggggaggagattctcctggacactcagtgccagggcctgcctcgccccgaaccccaggaggcctgctcactggagccttgtccaccaaggtggaaagtcatgtctctgggtccttgctcggcatcgtgtgggctcggtaccgcccgaaggagtgttgcctgcgttcaactggatcagggacaggatgtggaggtggacgaagccgcatgcgctgctttggtgcggcccgaggcttccgtcccttgccttatcgctgattgtacataccgatggcacgtaggaacttggatggaatgctcagtgtcctgtggggatgggatccagagacgccgtgacacttgtcttggtccacaggcgcaagctcccgtgcccgcagatttttgtcagcatctgcctaagcccgtcacggtgaggggctgttgggccgggccatgcgttggccaggggaccccttctctcgtgccccacgaggaggcagcagcacccggcaggacgacggcaacaccagcaggagcttcacttgaatggtctcaagcccgggggttacttttttcccccgctccacagcctcgaaggttgctgccgggacctcaggaaaactccgtgcagtcgtccgcatgcgggcgccaacatctcgaacccaccggcacaattgatatgcggggaccaggacaagccgattgtgctgtggctattggccgcccacttggagaggtggtgaccctgagagttctcgagtccagtttgaactgctcggcgggagacatgctcctactctggggcaggttgacctggcgtaagatgtgtaggaaactcctggatatgaccttctcctcaaagactaacacccttgtggtgagacagcgatgcggacggcccggtggtggcgtcctcctgagatatggctctcagctggctcccgagactttttacagggagtgcgatatgcagctttttggcccctggggagaaattgtttcgcctagcctgtcaccggcgacttcaaatgctggcggttgtcggctctttataaatgtggcaccgcacgcccggatcgcaatccatgcacttgcaacaaacatgggggctggtaccgagggagccaacgccagttacattcttattagagacactcacagcctccgaaccaccgctttccacggacagcaggtcctgtactgggagtcggaatcgtctcaagcagaaatggaattctcagagggatttttgaaagcccaggcatcacttcgtggtcaatactggacgctccagtcctgggtgcccgagatgcaggatccacagtcttggaaaggtaaggagggcact

SEQ ID NO: 5644 - DNA, 4281 bp, synthetic construct
  misc_feature 1..4281: note = source = /note="Description of Artificial Sequence: Synthetic coding sequence"
  source 1..4281: mol_type = other DNA
atgcaccagcggcacccccgcgcccggtgtccccccctgtgcgttgcggggattctcgcctgtggatttttgctgggatgctggggcccatcacattttcagcagagttgcctacaggctcttgagccccaggcggtgtctagctacctctcacctggggcacctcttaaaggccgaccaccttcccctggctttcaaagacagaggcagcgtcagaggagggccgcggggggtattttacatctggagttgcttgtggccgtaggacccgacgtctttcaagcccatcaggaggatacagagcgctatgtgctgaccaacctgaacatcggggccgaactgctcagggatccaagtctgggagcccaattcagagttcacctcgttaaaatggtgattctgactgagcccgaaggcgccccaaacattaccgccaatctgacttcgagtcttctgtccgtgtgcggctggtcacagactataaatcctgaggatgatacagaccctggccacgctgatctggtgctttatataactcgcttcgacttggaactccccgatggcaatagacaggtgcggggtgttactcagttagggggcgcttgtagcccgacgtggagttgtctcattaccgaagatactggtttcgatcttggagtgaccatagcgcacgaaattggtcactcctttggcctcgaacacgacggagctccagggtcaggctgtggaccctctggacacgttatggcgtctgacggcgcggccccgagggccggactggcttggagcccctgcagcagacgtcagctcctctcactcctatccgccggcagagcaagatgtgtctgggatccaccccgaccccaaccaggatctgcaggacacccccctgacgcgcagccagggctctactactccgccaatgaacagtgtcgcgtggcattcggacccaaagctgttgcatgtacattcgctcgcgagcatctggacatgtgtcaggctttgagctgccatacggaccccctcgatcaatcttcatgctcgagactcctggtgcccctgctagacgggacagaatgcggcgtggagaaatggtgctccaagggccgttgccggtctctcgtggaactgacaccaattgcagcggtgcacggcagatggagcagttggggacctcgaagtccctgcagcagatcctgtgggggaggcgtggtcacaaggcgcaggcagtgcaacaatcctcgtcctgccttcggtggaagagcctgtgtgggggcagacttgcaggcggaaatgtgtaacacacaagcttgtgagaaaacccaactggagttcatgtctcagcagtgtgcaagaaccgacggtcaaccactccggagcagccccggcggggcgtctttctaccactggggggctgccgtgcctcactctcaaggagacgcattatgccggcacatgtgtcgcgcaattggcgagtccttcataatgaagagaggggactccttccttgacgggacgcgctgcatgccatccggcccaagggaggacgggactctcagtctgtgcgtcagcggctcatgtagaacctttggttgtgacggaagaatggactctcaacaggtgtgggaccggtgccaagtctgcgggggcgataacagcacctgctcacccaggaaggggtcgtttaccgctggacgagcgcgggagtacgttaccttcctgacagtgaccccaaatctcacgtctgtgtacattgccaaccataggcctctttttacgcaccttgccgtgaggatcggggggagatacgtggtcgcgggtaagatgagtatcagcccaaatacaacatacccgagcctccttgaggatggcagagtggagtacagggtcgcattaactgaggacaggctgccccgacttgaggagatacgcatttggggccccctccaggaggatgcggacatccaggtgtatcggcgctacggcgaggaatacgggaatctgactcgtcccgacatcacctttacgtacttccaaccaaagcctcgacaggcgtgggtgtgggccgcagttagggggccttgtagcgtttcttgtggggcaggattaaggtgggtcaactacagttgtctggaccaggccaggaaagagctcgtggagactgtccagtgccagggatcccagcagccaccagcttggccagaggcatgcgttcttgaaccatgtcctccttattgggccgtaggggatttcggcccgtgctcggcctcctgcgggggggggctgagagaacgacccgtcagatgtgtggaagctcaaggctctcttttaaagacacttccacctgctaggtgccgagctggagcccagcaaccagcagtagctttagaaacgtgcaacccccagccctgtcctgcccgctgggaagttagcgagccctcttcttgcacaagcgcaggtggcgcaggcctcgccttggaaaatgagacctgtgtgccaggcgcggacggcctggaggcaccagtgaccgagggccctgggtccgtggacgagaagctaccagcccctgaaccatgcgtggggatgtcctgcccgccaggttggggacacctcgacgcaacgtctgcaggcgaaaaggccccctccccctggggctccatacgtacaggagcacaggccgctcacgtgtggacacctgccgcagggtcctgtagcgtcagctgcggccgcggcctcatggagcttcgcttcctgtgcatggatagtgccctgagagtgccagtgcaggaagaactgtgtggccttgcatcaaagccgggctcacgacgggaagtctgtcaggccgtgccatgccctgcccgatggcagtataagctggctgcctgcagcgtttcgtgtggtcgaggggtggtgcgacggatcctgtactgtgcacgtgcacatggagaggacgacggggaggagatcctgctggacacccagtgtcaaggcttacccagaccagagccacaggaagcatgctcactggaaccttgtccccctcgctggaaggtgatgagcctgggaccttgttctgcgagctgtgggctcggaacagctcggcggtccgtcgcctgtgtgcagttggaccaaggacaggacgtagaggtggatgaggccgcttgtgccgctttggtcaggccagaagcctcagtcccatgtctgattgcagactgcacatacagatggcatgtcggcacttggatggagtgttccgtctcctgcggcgatggaatccagcgcagaagagacacctgcctcggcccccaagcccaagcccccgtgccagcagacttctgccagcacctgccgaagcccgtcacagttcggggttgctgggctggaccctgtgttggacaagggactccttcgttggtcccccatgaagaggccgctgcacccgggcgcacaactgctacgccggcgggtgcctccttagagtggtctcaagcgagaggactcctgttttctccagcaccgcagcctcgcagattgctacccggcccacaggagaacagtgttcaatcctctgcctgtggacgccagcatctagagccaacgggtaccattgacatgagaggccctggccaggctgattgtgcagtcgcaattggaagacccctcggggaagtggtaacgctgcgcgtgctcgagtcttctctcaactgctcggcgggcgacatgctcctgctgtggggtagactgacgtggcgaaagatgtgtaggaaactgcttgacatgaccttctcctcaaagacaaacaccctcgtcgtcaggcagcgctgcggccgtccaggtggcggggtgctgcttagatacggctcccagcttgcacctgagaccttctatcgcgagtgtgacatgcagttgtttgggccctggggagagatcgttagcccatcattgtcacctgctacttccaacgccgggggctgtcggctgttcattaatgtggcccctcacgcacgaatcgccattcacgctttagccactaacatgggcgccgggactgagggagccaacgccagttacattctgatcagggacacccattccctgcggaccacagcttttcatggccagcaggttctctactgggagtctgagtcttctcaggcagagatggagttctctgaggggttccttaaggcccaggcatcactcagaggccagtattggacactgcagagctgggttccagagatgcaggatcctcaatcttggaaggggaaggaagggacc

SEQ ID NO: 5645 - DNA, 4281 bp, synthetic construct
  misc_feature 1..4281: note = source = /note="Description of Artificial Sequence: Synthetic coding sequence"
  source 1..4281: mol_type = other DNA
atgcatcagagacacccacgggctagatgcccccccctgtgtgtggctgggatcctggcctgtgggtttttactcggatgttgggggccctctcatttccagcaatcttgcctccaggccttagagccacaggccgtctcctcttatctgtctccaggggcccctcttaaaggaaggcccccctctcccggattccagcggcagcgacagagacagagacgggccgctggggggatcctgcatcttgagctgctcgtggcagtgggacctgatgtgttccaggctcaccaggaagatactgaaaggtatgttctgactaacttaaacatcggggcggagctgttacgggatcccagtctaggggcgcagtttcgggttcatctggtgaaaatggtgatactcacagaacccgaaggagctccaaatatcactgcaaacctaacatctagtctcctgtccgtgtgtgggtggagtcagactatcaatcccgaagatgatacagatcctgggcatgctgatctagttctctatataacacggttcgatctggaattacccgacggaaaccgacaggttagaggggttactcagctcggaggggcatgttctccaacttggtcatgtctcatcactgaagatactggatttgatctgggggttactatagcccatgaaataggacactcttttgggctcgaacatgatggagctcctgggagtggatgtgggccctccggacacgtcatggcctctgatggagccgcacctagggctgggcttgcatggtcaccctgttctcgacggcagctgctgtctctattgtctgctggaagggcgaggtgtgtgtgggaccctcctcgacctcagccaggatctgcggggcacccacctgatgcccagcctgggctctattattctgccaacgaacagtgtcgggtggcctttggacctaaagctgtagcttgcactttcgctagagaacacctcgacatgtgtcaggctctgtcttgccatacagatcctctggaccagagttcatgctctcgcctacttgtgccactgctcgatggaactgagtgcggggtggagaaatggtgttctaaagggcgttgcagatctctggtggagctcactcctatagccgctgtccacgggcgatggtccagttggggacctaggtctccctgctcgcgaagttgcggaggaggagtcgtcacacggcggcgacagtgtaataaccctcggcctgcatttggagggagggcatgtgtcggggctgatttgcaggctgaaatgtgtaacacacaggcatgtgagaaaacacagcttgaatttatgtctcagcagtgtgcccgaacagatgggcagcccctgaggtcttcccctgggggagcatctttctatcactggggagccgccgtgccacacagtcagggagatgctctatgtagacatatgtgccgcgcaatcggggagtccttcatcatgaaacgaggggacagttttctggatggaacgcgctgtatgccctcagggcccagagaggatggaacactgagtctttgtgtctccgggagttgtaggactttcggatgcgacggacgcatggattctcagcaggtgtgggatcgttgccaggtatgcgggggagataactcaacatgttctccccgaaaaggatctttcacagccggacgggctagagagtatgtgacattcttgactgtgactcctaatctgacatccgtatatatagctaaccatcgacctctgttcacacatttagccgtaagaataggagggagatacgtggtggccgggaaaatgtccatatcaccaaacacaacgtatccctcactcctcgaggatgggagggtagaataccgtgttgccctaactgaagataggctacccagactagaggaaataagaatctggggaccccttcaggaagatgcggatatccaggtctataggaggtatggggaagaatatgggaatctaactagacccgacattacttttacttatttccagcccaagcccagacaggcttgggtctgggccgctgttcgaggaccctgttccgtaagttgtggagctggactccgctgggtgaactatagttgtctggatcaggcccggaaagaattagttgaaactgtgcagtgccaggggtcccagcagccccccgcctggcccgaagcgtgtgttctcgaaccatgccccccctattgggccgtcggagattttggaccctgctccgcatcttgcggaggaggacttcgggaacgacctgtgaggtgtgtcgaagcacaggggagtctgttgaaaacactcccacccgccagatgtcgagctggagcacagcagcctgctgtagcactcgaaacgtgcaacccacagccctgcccagctcggtgggaagtgtccgaaccttcttcatgcacttccgctgggggagctgggctcgccctcgaaaacgaaacatgcgtaccaggggccgatggattggaagctcccgttacagaagggcccgggtccgtggatgaaaagctccccgctcctgaaccttgtgtggggatgtcttgccccccgggatgggggcatctggatgctactagtgccggagaaaaagctcccagtccttggggatccatacggactggggcacaggccgcacacgtctggacaccagccgcagggtcttgttctgtgtcatgcgggcggggacttatggaactgaggttcctttgtatggactctgccctcagagttccagtccaggaagagctctgtgggttagcctctaaacctggatcaaggagagaagtgtgccaggccgtcccttgtcctgctagatggcagtataaactggcagcttgttccgtgagttgtggaagaggggtggttcggcgtatcctttactgtgcaagagcccatggagaagatgatggagaagaaattcttcttgatactcaatgccagggactacccaggcctgagccccaggaagcctgctcattagagccttgtcccccccggtggaaagtgatgtcactcgggccctgttccgctagttgcggacttgggacagctcgtagatcagttgcttgtgtacagcttgatcaggggcaagacgttgaagtagatgaagccgcctgtgctgccttggtgcgcccagaagcctcagtaccttgtctgatcgccgattgcacatataggtggcatgtggggacttggatggagtgctcggtgtcatgcggggacgggatccagcgcaggagagatacatgcctggggccccaggctcaggctcccgtgcctgcagatttctgtcagcacctaccaaaacccgtcacagtccgcggatgctgggctggaccatgtgtggggcaaggaacaccttctctcgtacctcacgaagaagcggctgccccaggacggactacagcaactccagcaggggcctctttggagtggtcacaggccagggggctgttattcagtcccgcaccacagcctaggcggctcctgcctggaccacaggagaactccgtgcagagttcggcctgtgggcggcagcatctggaacccactgggacaatagatatgagggggcctggacaggcagattgcgccgtggctatcgggcggcctctcggagaagtggtgactctcagggtgcttgaatcttcccttaattgtagtgccggggacatgcttttactctggggacgccttacatggaggaaaatgtgtagaaaattgctcgatatgactttttcatccaaaactaatacactcgtggtgaggcagaggtgcggacgccccggaggaggggtgctgctgcgatatggatctcagctcgcccccgaaacattctatcgcgaatgtgacatgcagctgttcgggccttggggggaaattgtgtcgccttcattatcccccgctacttcaaatgccgggggatgtcgactcttcatcaacgtggcccctcatgctcggatagctatccacgcccttgctactaacatgggggctggaacagaaggagctaatgcctcttatatactcatccgcgatactcactccctgcgaacaacagcttttcatgggcagcaggtgctatattgggaatcagaatcctcacaggccgaaatggagttttcagaagggtttcttaaagctcaggcttcactccgagggcagtactggacactccagtcttgggtgcctgagatgcaggatccacagagttggaagggaaaagaagggaca

SEQ ID NO: 5646 - DNA, 4281 bp, synthetic construct
  misc_feature 1..4281: note = source = /note="Description of Artificial Sequence: Synthetic coding sequence"
  source 1..4281: mol_type = other DNA
atgcatcaaagacacccgcgggcgaggtgccctccattgtgtgtcgctggaattctggcatgcggattcctgctgggatgttgggggccgtcacactttcagcagtcatgcctgcaggctctggagccgcaggccgtgtcgtcctacctgagccctggcgcccccctgaagggccggcctcctagcccagggttccaacgccaacgccaaaggcaaagacgtgctgcaggaggaatcctgcacctggagctgctggtcgccgtcggtccagatgtattccaggctcaccaggaggacaccgaacgctacgttctcactaacctgaatattggagcggagctcctgcgggatccttccctcggagcccagttccgggtgcaccttgtcaaaatggtgatcctcaccgaaccggagggagcgccaaatatcacggccaacttgacgagctcgctcctgtcagtctgcggatggtcccaaacgatcaacccagaggacgataccgatccagggcacgccgaccttgttctctacatcactcggttcgacctggaactgcccgatggcaatcgccaggtccgtggagtgacccagctcgggggagcctgtagcccgacctggtcctgtctgataacggaggacaccggttttgacctcggcgtgactatcgcccacgaaattggacattcattcggcttggagcacgacggagctcctggaagcggttgcggaccgtcgggacacgtgatggcttccgatggagcggcaccgcgcgcaggactggcctggtcgccctgcagtcggcgccaactgctgtcactcctttcggccggtcgggcccggtgcgtctgggacccgccgcgcccccaaccaggcagtgcgggacatccgcctgatgcccaacccggcttgtactactcggctaatgagcagtgtcgagtggctttcggaccgaaggcggtggcctgcaccttcgcgcgcgagcacctggatatgtgtcaggcgctgagctgccacacggatccgctggaccagtcgtcctgttcccggctcctggtcccgctgctggacggtactgaatgcggcgtcgagaagtggtgctctaagggaagatgccgctcgttggtggaactgactcctatcgccgccgtgcatggtcgctggagctcttggggacctcggtcgccttgcagtaggagctgcgggggaggcgtggtgactcgccggcgacagtgcaataacccaaggccggcattcggaggacgcgcctgcgttggtgcggatttgcaggcggaaatgtgcaacactcaagcatgcgaaaagacccagcttgagtttatgtcgcagcaatgcgcacgcactgacggccaaccccttcgctccagccccggcggcgcatcgttctaccattggggcgctgcggtgccgcactcccagggggacgccttgtgccggcatatgtgccgcgcgatcggagaatccttcatcatgaaacgcggagattcgttcctggacggaacccgctgcatgccgtcaggcccaagggaagatggaaccctgtcattgtgcgtgtccggctcatgtcggacttttggatgcgacggaagaatggactcacagcaggtctgggaccgctgccaggtctgtggaggagacaattcgacgtgttccccgcggaagggatcgttcaccgccggcagagcaagagaatacgtcacctttctgaccgtgactccgaaccttactagcgtctacattgcgaatcaccgccccctcttcactcacctcgctgtgcggatcggaggaaggtacgtggtggcggggaagatgtctatcagcccaaacaccacttacccgtcccttctcgaagatgggcgggtggaataccgagtcgcactgactgaggaccgcctcccgagactggaggagattcggatctggggtccactccaggaggatgcggacatccaggtttatcgtcggtatggcgaggagtacggaaatctgaccagaccagatatcacttttacctacttccagccgaagcctcgacaggcttgggtgtgggcggcggtgagaggcccatgctctgtaagctgtggggctggtctgcggtgggtgaactactcctgcctcgaccaagcccgtaaggagctggtggaaacggtgcagtgtcaaggatcgcagcagccgccggcctggccagaggcctgtgtcttggaaccatgtccaccgtactgggcggtgggcgacttcggcccttgttccgccagctgcggcgggggacttagagaacgcccagtgaggtgcgtggaggcgcaggggtcactcctcaaaaccctgccgcctgcgcggtgccgggcgggtgcacagcagccagcagtcgctctggaaacctgtaacccgcaaccatgccctgcacggtgggaggtcagcgagccgtcgtcatgcacttcagcaggcggagctggactggcactcgagaacgagacttgcgtcccgggagcagacggactggaagcgccggttactgaaggaccgggctccgtggatgaaaaacttcctgctccggaaccgtgcgtgggtatgtcctgccctcctggatggggccacctcgacgccacctcggcaggagaaaaggccccaagcccgtggggttcgataagaaccggagctcaagctgcccacgtgtggaccccggctgccggatcgtgctccgtgagctgcgggcgcgggctgatggaactccgcttcttgtgcatggacagtgccttgcgcgtgccggtccaagaagaactgtgcggccttgcctctaagccaggctctcggagagaagtgtgccaggcagttccatgtcctgcacgctggcagtacaaactggccgcctgctctgtgtcctgcggcagaggcgtggtgcggcggatcctttactgcgcacgggcacatggcgaggatgacggcgaagaaatcctccttgacactcaatgtcaagggctgccaaggcccgaacctcaggaggcttgctccctcgagccctgccctccaagatggaaggtgatgtctctgggcccatgctcagcttcatgtgggctgggtactgccagacggtcagtggcctgcgtgcagctggatcagggacaagacgtagaagtggatgaggcggcgtgcgctgctctcgtcagaccggaggcttccgtcccgtgcctgatcgccgactgcacgtacaggtggcatgtcggaacctggatggaatgttcagtgtcgtgtggggacggaatccagagacgtcgggatacctgtctgggaccacaggcccaggcgcctgtcccggccgacttctgccaacatctgccaaaaccggtgaccgtgagaggctgctgggccggtccttgcgtaggacagggaactcctagtctggtgccgcatgaggaggccgccgcccccggacgcaccaccgccactccagctggcgcgtcactcgaatggtcgcaggccagggggctcttgttttcgccggccccacaaccacgccggctcctgccgggaccccaggagaattccgtgcaaagcagcgcctgcggaaggcagcatctggaacctaccggcacgatcgacatgagagggcctggacaagcggattgcgcagtggccattggtcgcccgcttggtgaagtggttactctgcgcgttttggagtcgtcactcaactgctcggcgggtgacatgctgctgctctgggggcgccttacctggcgcaagatgtgtcgtaagctcctggatatgacttttagctccaagaccaacaccctggtggtgagacaacgctgcgggaggccgggtggcggagtgctcctgcggtacggatcgcagctcgccccggagactttctatcgggaatgtgacatgcaactgttcggaccatggggggaaatcgtgtcaccgtcgctgtccccagccacctcgaacgccggaggatgccgacttttcatcaatgtcgccccccatgcccgcatagcgatccacgccctcgcgactaacatgggagcagggaccgaaggtgctaacgcctcgtacatcctgattcgcgacacccactcgctgcgcaccactgcatttcacggacagcaagtcctgtactgggaatcggaatcctcccaggccgaaatggagttctccgaaggtttcctcaaagcccaggcgtcgctccgcggccagtattggacccttcaatcgtgggtgccggaaatgcaagacccgcagtcgtggaagggaaaagaaggcact

SEQ ID NO: 5647 - DNA, 4281 bp, synthetic construct
  misc_feature 1..4281: note = source = /note="Description of Artificial Sequence: Synthetic coding sequence"
  source 1..4281: mol_type = other DNA
atgcatcagcggcatcctcgcgcgcggtgccccccgctttgcgttgccggaatcctcgcttgcggcttcttgctcggctgttgggggccttcccatttccagcaaagttgcctgcaagcactggagccgcaagccgtgtcttcctatctatcgccaggcgccccgcttaaaggccgacctccctccccgggatttcaacggcagcgacaacgccagcgccgtgcagcgggagggatcctgcatttagagcttctcgtcgctgtaggcccagacgtcttccaggcccaccaagaagataccgagcggtatgttctcactaacctcaatataggtgctgagctcctgcgggacccctccctcggagctcagttccgcgtccacctcgtcaaaatggttatactcaccgagcccgagggtgcgcctaatattacggctaacttgaccagcagcctgctctccgtgtgcggatggtcccaaaccattaaccccgaggatgatacagaccccggccatgctgacttggtcttgtacattacacggtttgacctggagttgccggatggcaatagacaagttcggggagtgactcaactaggaggcgcttgctccccaacttggtcgtgcctcattacagaagatactggcttcgaccttggggtcactattgcccacgaaattggacactcgtttggactggaacatgatggagccccaggctccggttgcggccccagcggccatgtgatggcatcggatggggcagctccgagggctggactcgcgtggtcgccatgcagcagaagacaattacttagtctgcttagtgcaggacgcgcgcggtgtgtgtgggacccccctcgtcctcagcccgggtcagccggacacccgccggacgctcagccgggtctctattactcggctaacgagcagtgccgtgtggcgttcggccccaaagcggttgcctgtacttttgcacgagagcatctggatatgtgccaagccttatcgtgtcacactgacccgctcgatcaaagctcatgcagtcggctcctggtgccccttcttgacggtacggaatgtggagtggaaaagtggtgctctaagggacgctgcagatcgctagtagaacttactccgattgcggcggtgcacggacgatggtcctcttgggggccccgttcgccttgctctcggtcatgcggaggcggggtggtaacgcgcagacgccaatgcaataaccctcgaccggccttcgggggtcgggcgtgtgtgggcgcagatttgcaggcagagatgtgcaatacgcaagcatgcgagaagactcaactggagtttatgtctcaacaatgcgctcggacggatggtcaacctctgcgaagctcccctgggggtgctagcttctatcattggggtgccgctgttccacacagtcaaggggatgcgttgtgtcgtcatatgtgtcgtgccatcggtgagtcattcatcatgaagcgaggagactcatttcttgacggaactcggtgcatgccctccggcccccgtgaagatggcacactttcgttgtgcgtcagtggtagctgtcgcacattcggctgcgacgggcgcatggatagtcagcaggtctgggacagatgccaggtatgtgggggcgataacagtacatgttcgcctcgaaaaggtagttttacggctggccgggcccgggaatacgttacgtttctgactgtaactccaaacctgacgtccgtctatattgccaatcaccggccactatttacccatcttgctgtgcgcatcggtggccggtacgtggtagccggcaaaatgtccatcagtcctaatactacctacccttccctgttggaggatggacgagttgagtatagagttgccctcaccgaagatcgtttacctcgactagaagagatccgcatctgggggcctctgcaagaggatgcggacatccaagtttatcgtcgctacggtgaggagtatggcaacctaacgcgtcctgatatcacttttacgtattttcagcccaaaccgcgacaagcctgggtctgggcggctgttcgcgggccgtgctcggtcagctgtggcgctggacttcggtgggtgaactattcatgcctcgatcaagctcggaaggagctagtcgagacagtgcaatgtcagggctctcaacaacctcctgcatggccggaggcttgtgtcctagagccatgtccgccgtattgggcggttggagatttcggaccttgcagtgccagttgtggagggggactaagggaacgtcctgtgcgatgcgtagaggcccaggggtcactgctaaaaacgctccctccagcacgatgccgagcgggggcacagcagcctgcggtagcgctcgagacttgtaatcctcaaccctgcccggcccggtgggaggttagcgaacctagttcttgtacgtcggcaggtggggccggcctagcactcgaaaatgagacctgtgttccgggtgcagatggtctggaggcccccgtcactgaaggccccggctcagtcgatgaaaagcttcccgcacccgagccatgtgtgggtatgtcttgccccccgggatggggacacctggacgcaacatccgctggcgaaaaagccccttcgccgtggggatccattcgtactggtgctcaggcggcgcacgtctggacaccagcagctggttcctgttctgtttcatgtggaagaggtctcatggaacttcgcttcctctgtatggacagtgctctccgcgtgccagtccaagaagagctttgcggcctagcgagcaagcccggatcgaggcgagaagtttgtcaggcggttccttgtcccgctcggtggcaatataaattagcagcttgtagcgtgtcctgcggcaggggagtagtccggcgtattctttactgcgctagggcacatggcgaggatgatggagaggaaatactacttgatacccagtgccagggactgcctcgtccggaaccgcaggaagcatgcagcctcgaaccttgtcctcccagatggaaagtgatgtctctgggcccttgttcggcttcttgcggacttggcaccgcaaggcgctcggtcgcatgcgtccagctcgaccagggccaggacgttgaggtggacgaggccgcctgcgccgccctcgttcgccctgaggcatccgtcccatgtctaatcgccgattgtacgtatagatggcacgttggtacgtggatggagtgtagtgtctcctgtggtgatgggattcagcgtcgccgcgatacgtgcttgggccctcaagcacaggctccagtccccgccgacttctgccaacatctaccaaaaccagtcaccgtgcgcggttgctgggcaggtccatgcgttgggcaaggaacgccctcacttgtgccgcacgaggaggcagctgctccaggaaggacgactgccacaccggcaggcgcttctctggagtggtcccaggcccgtggtttgctgttctcgccagcgccccagccacgcaggctgttacctggcccgcaggagaatagtgtccaatcgtctgcatgcgggcgccaacaccttgagcccacggggacgatagatatgcgagggccgggccaagctgattgcgcggtggctataggtcggcctctcggtgaggtagtcaccttacgcgttttagagtcttctctaaattgtagtgccggagatatgttgctcttatggggtcgcctaacctggcgaaagatgtgtagaaagcttttggatatgacattcagttcgaaaaccaatacattggttgtccgccagcggtgtggtcgacccggtgggggagtgctattacgctacggttcccagttggcgccggagacattttatcgtgaatgtgacatgcagttgtttggcccttggggtgaaatcgtcagtccgtctctttcacccgcgactagcaacgctggcggatgtaggttgtttatcaatgtggcaccgcatgcccggattgcgatccacgctctcgcgacaaatatgggtgctgggactgaaggcgcaaatgcgtcctatattctgattcgcgatacccactctcttcgtaccaccgcctttcacggtcagcaggtgttgtattgggagtccgagtcgagccaggcagagatggaattcagcgagggttttctaaaagcgcaggctagccttcgaggacaatactggaccctccagagctgggttcctgagatgcaggatccccaaagctggaaagggaaagaaggtacg

SEQ ID NO: 5648 - DNA, 4281 bp, synthetic construct
  misc_feature 1..4281: note = source = /note="Description of Artificial Sequence: Synthetic coding sequence"
  source 1..4281: mol_type = other DNA
atgcaccagcgccatccaagagcccgatgcccacctctgtgcgtggctggaatcctggcttgcggtttccttctcggatgttggggaccatcgcatttccagcaatcctgcctgcaagccctggagccgcaggcagtgtcatcttacctgagcccgggggctccgttgaagggacgcccaccatcacccggattccagagacagagacagaggcaaaggcgcgcagcgggcggaatcctgcacctggaacttcttgtggcagtgggacctgacgtatttcaggcacaccaagaggacactgaacgctacgtcctcactaaccttaacattggcgcagaactcctccgcgatccatccttgggtgcccaattccgtgtgcatcttgtcaaaatggtcatcctgacggaaccagaaggcgcccccaacataaccgccaacctgacctcgtcgctgctgagcgtgtgcgggtggtcacagactattaacccggaggatgatactgaccctggacacgccgacctcgtcctctacattacccgattcgacctcgagctgccggacggtaaccgccaagtccggggagtcactcaactcgggggtgcctgttcgccgacttggagttgcctgatcactgaggacaccgggtttgaccttggagtcaccatcgcccacgaaatcggccatagcttcggccttgagcacgatggagcccctggttcaggctgcgggccgtcagggcacgtgatggcatcagacggtgcagccccgagggctgggcttgcttggtcgccctgttccagaaggcagctgctgtctctcctgtcagccgggagggctcggtgcgtgtgggatccgcctcggccacaacctggatcggccgggcatccacccgacgcccagccgggactttactactcggcgaatgaacaatgccgcgtggcattcggacctaaggccgtggcttgcaccttcgcccgggaacatctcgatatgtgccaggctctgtcgtgccacaccgacccgctggatcaatcctcgtgctcgcgcttgctggtgcctttgctggacgggaccgagtgcggtgtggagaagtggtgctccaagggccgttgccgctcgctcgtcgaattgactcctatcgctgcggtgcatggccggtggtcctcatggggaccacggtcaccatgctcccggtcgtgtggagggggcgtggtgacccgccgacggcagtgcaacaacccgaggccggccttcggcggacgcgcctgcgttggcgctgacctgcaggcggagatgtgcaatactcaagcgtgtgaaaagacccaattggaattcatgtcgcagcaatgcgctaggaccgatggtcagcctctcaggagctcgccagggggagcctcattctaccactggggagcggccgtgccacatagccagggcgacgccctctgcagacatatgtgccgtgctatcggggaatcattcatcatgaagagaggagattcgttcctcgatggcacgaggtgcatgccatcgggcccgagggaggacggtaccttgtccctctgcgtgtccggatcgtgtcgcactttcggatgcgacggacgcatggattcgcaacaggtctgggataggtgccaagtgtgtggcggtgataattccacctgctcaccccgcaagggatcgttcaccgccggacgggctcgggaatacgtcactttcttgaccgtgactcctaatcttacttccgtgtacatagcgaaccacaggcccctgttcactcacctcgccgtccggatcggtggacggtacgtggtggcgggcaaaatgtcgatttccccgaataccacctacccgtcgctgctggaagatggccgcgtcgaataccgagtggcgctgactgaggaccggttgccacggctggaagagatcaggatctggggaccgctccaggaggatgcagatatccaggtctatcggcggtacggggaagaatacgggaatcttacgcgcccagacattactttcacctactttcaacctaagcctcgccaggcgtgggtgtgggctgccgtgagggggccatgctcagtgagctgcggagccgggcttcgatgggtgaactactcgtgcctggatcaggcccgcaaggagctcgtggaaaccgtccagtgccagggatcacagcagccacctgcctggccagaggcctgtgtcctggaaccatgtccgccatattgggcagtgggtgatttcggaccgtgctcagcgtcgtgcggaggcggattgcgcgaaaggccggtgagatgtgtggaggcccagggctcgcttcttaagacgctccctccggctcggtgccgggccggggcccaacagccggcggtggccttggaaacctgtaacccacagccatgcccggcgcgctgggaagtgtcggaaccttcgtcctgcacctcagccggaggcgcaggcctggcactcgaaaacgaaacctgtgtgcccggagcagacggactggaggccccagtcaccgagggtcccggctcggtggacgagaaactgccagcaccggagccgtgcgtgggtatgagctgccccccggggtggggacacctggatgccaccagcgcgggcgaaaaggctccatcaccgtggggcagcatccggaccggagcccaggccgcacatgtgtggactcctgcagccggttcgtgttcagtcagctgtgggaggggactcatggagctgagatttctctgcatggactccgccctcagagtgccggtgcaggaggaattgtgcgggctcgcatccaagcccggctcgcgcagagaagtctgccaggctgtgccttgccccgcgcggtggcagtacaagctcgccgcctgttcggtgtcctgcggccgcggggtcgtgcgccgcatcctctattgtgcgcgggcgcacggggaggatgatggagaagagatcctgttggacacgcaatgccagggactccctaggccggaaccgcaggaagcctgctcactcgaaccctgcccacctcggtggaaagtgatgtcgctgggtccgtgctcggcgtcgtgcggtctgggtacggcacgtcgcagcgtggcctgtgtccagctcgaccagggacaggatgtcgaggtggacgaagcggcttgcgcagccctcgtacgcccggaagcgtcggtcccatgcctcatcgcagattgcacctacagatggcatgttggaacctggatggagtgctccgtgtcatgcggagacggaatccaacgcaggagggacacctgtctgggaccacaggcacaagcccccgtccctgctgacttttgccaacacctgcctaagcctgtgaccgtccgcggatgttgggcgggaccatgcgttggccaaggaactccgtcattggtgccccacgaggaagcggcggcccctggaagaaccactgcaacccccgcgggagcatcgcttgaatggtcacaggctagaggcctgcttttctcgcccgcaccacaaccaagacggctgctcccgggaccgcaggagaacagcgtgcagagcagcgcctgcgggagacagcacctggagccgactggaactatcgacatgcgcggcccagggcaggcggactgcgcggtggcaatcggacgcccgctcggagaggtggtgactctccgcgtccttgagagctcactgaactgtagcgccggagacatgttgcttctgtggggacggctgacctggaggaagatgtgcaggaagctgcttgatatgaccttctcctcgaaaactaatactctggtggttcggcagagatgcggccgcccaggaggtggggtgctgctgaggtacggatcccaactggccccggagactttttaccgcgagtgcgatatgcagctgtttggaccttggggagagatcgtgagtccgtcactcagcccagcgacctcaaatgccggagggtgtagactgttcattaacgtggccccacatgcacgtatcgcaatccacgcccttgcaacgaacatgggagctggaaccgagggcgctaatgcgagctacattctgatccgggacactcattccctccgcaccactgcatttcacggacagcaagtcctgtactgggagagcgaatcgtcccaagcagagatggaattctccgagggatttctgaaagcccaggcgtccctgagaggccagtactggactctgcagagctgggtgccggaaatgcaggatccacagtcgtggaaaggaaaagagggaacg

SEQ ID NO: 5649 - DNA, 4281 bp, synthetic construct
  misc_feature 1..4281: note = source = /note="Description of Artificial Sequence: Synthetic coding sequence"
  source 1..4281: mol_type = other DNA
atgcatcagagacacccaagagcgagatgtcctccgctttgcgtggcgggtatcctggcgtgcggtttccttttggggtgctggggaccttcgcactttcagcaatcatgcctgcaagcactggaaccgcaggcagtgtcgtcgtacctttcgccaggtgcacctctgaaggggcgtcctcctagccctggatttcagcgtcagaggcagcgacaaagaagggcagctggaggaattcttcacctggaactgctggtcgcagtgggaccggacgtgtttcaagcacatcaggaagataccgagagatacgtgctgacgaaccttaacattggggccgaactccttcgtgatcccagcctgggagctcagttcagagtgcatcttgtgaagatggtgatactgaccgaaccagagggagcgcctaacatcaccgcaaacttgacctcatcactcctttccgtctgtggctggtcgcagactatcaaccctgaagatgacactgatcctggacatgcggatctcgtgctgtacattacccggtttgacctggaactccctgatgggaatagacaggtgagaggtgtcacccaacttggtggtgcgtgttccccaacttggagctgcctgatcactgaagatacgggctttgacctcggagtcactattgcccacgaaattggccactcgtttggtcttgagcacgatggagcgcctggttcaggttgtgggccttcggggcatgtgatggctagcgatggggcagccccaagagccggactggcctggagcccatgttcccgtaggcaacttctttcactgctgtccgctgggcgcgcaagatgtgtgtgggaccctccaagaccccaaccaggtagcgcaggacatccccccgatgcacaacctggtctttactacagcgcaaacgaacaatgccgcgtggcatttggaccgaaggcagtggcgtgtacctttgcgcgcgaacatctggatatgtgccaagcattgtcctgccacactgacccgcttgaccagtccagttgtagccgacttcttgtccctcttcttgacggcactgaatgtggtgtcgaaaagtggtgtagcaagggaaggtgccggagccttgtggaattgactcccatagctgcagtccatggaagatggtcctcgtggggaccacgcagcccttgcagtcggtcgtgtggaggaggtgtggtcacccgccgtaggcagtgtaataacccacggcctgcattcggtggtcgggcatgcgtgggtgcagacctgcaggcagagatgtgtaatactcaggcatgtgaaaaaactcaactggagtttatgagccaacaatgtgctaggacggatggacagccacttagatcctcaccaggtggcgcatccttctaccattggggggcggcagtcccacatagccaaggggacgcactgtgccgccatatgtgccgcgcgatcggagaatcgttcataatgaaacggggtgattcctttctggacggaacccggtgcatgccgagcggtcctcgagaggacggaaccctgtctttgtgtgtgagcggatcctgtagaacttttgggtgtgatggtcggatggatagccaacaagtgtgggacaggtgccaagtctgcggaggcgataattcaacctgttcgcccagaaagggatccttcaccgcaggccgggcccgcgaatacgtaacgtttcttaccgtgacgcctaacctgacctccgtgtacatcgccaatcacaggccgctgttcactcatcttgcagtgagaataggaggacgttacgtggtggcaggcaagatgtcgatctcaccaaatactacctacccttcgctgctcgaagatgggcgtgtggagtaccgcgttgctctgactgaggatcgactgcctcggcttgaagagattcgaatttggggacctcttcaggaagatgctgatatccaggtctatagaagatacggtgaagagtacgggaacttgacccggcctgatattaccttcacctacttccaacctaagcctagacaggcttgggtgtgggcagccgttcgcggaccatgttccgtgtcctgtggagcaggtctgagatgggtcaactactcatgcctggaccaagccaggaaagaactcgtggaaactgtgcagtgccaaggttcccagcaacctcccgcatggccagaagcctgcgtgctcgagccttgcccaccctactgggcagtgggagattttggaccttgctcggcatcctgtggcggaggcttgagagagcgccctgtgcggtgtgtggaggcacaaggttcgctgctcaagaccctcccccctgccagatgccgggccggtgcacaacagccagcagtggcgctcgaaacctgcaatccacagccatgtcccgcgcgctgggaagtctccgaacctagctcgtgcacgtccgccggtggcgcagggctggcactggagaatgaaacctgtgtgcctggagctgacggactcgaggcgccagtgacggaagggcctggtagcgtggatgaaaagctgcctgcacctgaaccctgcgtcgggatgtcgtgcccacccggatggggtcaccttgacgcgacctccgcaggtgagaaggcaccatccccctgggggtctatcagaaccggggcgcaggcagcccacgtgtggacccctgcagcgggttcctgctccgtctcctgtggccgtggacttatggaacttcggtttctttgtatggacagcgctcttcgtgtgccagtgcaagaggagctctgcggactggcaagcaaacctggcagccgccgcgaggtgtgtcaagcagtgccgtgtccagcgcggtggcaatacaagctggcagcctgcagcgtgagctgcggccgcggggtcgtcagaaggatcctctactgcgcgcgcgcccatggcgaggacgatggggaagagattttgctggatacccagtgtcaaggactcccgcgccccgagcctcaagaagcatgctccctcgagccttgtcccccacggtggaaggtgatgtctctcggaccttgttcagctagctgcggtctggggaccgcccgtcggagcgttgcatgtgtgcagctggaccaaggacaagacgtcgaagtcgacgaagccgcatgtgcggcgctcgtgcgccctgaagcgtcggtaccatgtctcatcgcagattgtacctaccgttggcatgtgggaacgtggatggagtgttcggtgagctgtggcgatggtattcagcgtcggagggacacctgtctggggccccaagcccaagcaccagtgcctgctgatttctgtcaacatctgccgaaacctgtcactgtccggggttgctgggcaggtccctgtgtggggcaaggtacgccttcccttgtgcctcatgaagaggccgcagccccaggaagaaccactgcaacgccagcaggggcgtcactggaatggtcacaggcaagaggactgctttttagtcctgcacctcaacccagacgcctgctgcccgggccgcaggaaaactccgtgcaatcctccgcatgtggtaggcagcaccttgaacctacgggtactattgatatgcgcggtccagggcaggcagactgtgcggtggcaattggtaggcccctgggcgaagttgtcaccctgagggtgctggaaagctcgttgaactgttcagcaggcgatatgcttctgctttgggggagattgacctggcgtaaaatgtgtagaaagctgttggacatgacgttttccagcaagactaacaccctggtggtccgccagaggtgtggcagacccggaggtggcgtgctgctcagatatggctcccaactcgcaccagaaaccttttacagagagtgcgatatgcagctgttcggtccgtggggagagatcgtctcaccctcgctgtcccccgccaccagcaatgcaggaggatgtcggctcttcataaatgtcgcacctcacgcccgaattgccatccatgctctggccaccaatatgggtgcgggaaccgagggagcgaacgcgagctacatacttattcgggatacccattcccttcgtaccactgcattccatggacagcaggtgctttactgggaatcagaatcctcccaagcagagatggaattttccgaaggtttcctgaaagcccaagcaagcctcagaggccaatactggacccttcagtcctgggtgcctgaaatgcaagacccccaaagctggaagggaaaagaaggtact

SEQ ID NO: 5650 - DNA, 4281 bp, synthetic construct
  misc_feature 1..4281: note = source = /note="Description of Artificial Sequence: Synthetic coding sequence"
  source 1..4281: mol_type = other DNA
atgcatcaaagacacccgcgcgcgcgctgtccgccgttgtgcgtggccgggatcctggcctgcgggttcctgctgggatgttggggaccatcacacttccagcaatcgtgtctccaggccctggagccccaggcggtgtcgtcctacctgtctcctggtgcgccgctgaaggggaggcccccgtcacctggattccagagacagcggcagagacagagacgcgctgcgggagggatccttcatctggaacttctggtggccgtcggtccagacgtgttccaggcccatcaggaggacactgagagatacgtgctcaccaacctgaatatcggagccgaacttctgagggacccatccctgggagcccagttcagagtgcacctcgtgaagatggttatcttgactgaacctgaaggtgctcccaacatcactgctaacctgacttcctccctcctgtcggtgtgtggctggagccagacgatcaatccggaagatgacaccgacccgggacacgcggatctcgtgttgtacatcacccggttcgacctggagttgcccgacggaaacagacaggtgcggggcgtgacccagctcggaggcgcttgctcccctacttggtcctgtttgatcaccgaggatactggattcgatctgggagtcaccatcgcccacgaaatcggccactcattcggtctggaacacgacggagccccagggtcgggatgcggaccgtccggtcacgtgatggcatctgatggagccgcaccgagggcgggcctcgcttggtcgccgtgcagccggaggcaattgctctcactcctgtcggctggacgcgcgcggtgcgtgtgggacccaccccgaccccaaccgggatccgcaggacacccaccagatgcccaacctggcctttactactccgccaatgaacagtgccgggtggcgttcggcccgaaggcagtggcttgcaccttcgcaagagaacatctggatatgtgccaagccctgtcatgccatactgacccccttgatcagtcatcctgctcgcggctgcttgtgccgctgctcgatggaactgagtgcggagtggagaaatggtgcagcaagggtagatgccgcagcctcgtggaactgactccgatcgccgccgtccacgggagatggtcatcctggggaccccgatcaccatgttcaagatcgtgcggcggaggtgtggttacgaggaggaggcagtgcaataacccccgacccgcgtttgggggccgggcttgcgtcggagcagatcttcaggccgagatgtgcaacacccaagcctgtgagaaaacccagctcgaattcatgtcccagcagtgcgccaggactgacggacagcctctcaggagctcgcctggaggagcctcattttaccattggggggccgccgtgccccactcgcagggagacgccctgtgtaggcatatgtgccgcgccatcggagaaagtttcatcatgaaaaggggagactcattcctcgacggaactcggtgcatgccatcaggtccccgcgaagatggcactctcagcctgtgcgtctcaggcagctgtcggacgttcgggtgtgacggacgcatggacagccagcaggtgtgggatcgctgccaagtttgtggcggggacaactcaacttgctcaccgagaaaggggagcttcactgcaggacgtgcacgggaatacgtgactttcttgactgtgactccaaaccttactagcgtgtacattgcgaaccaccgccctctttttacgcacctggcagtccggatcggaggacgctatgtggtggccggaaagatgtcgatttcgcccaacaccacctacccgtcgctgctggaggacggacgggtggagtaccgggtcgccctcaccgaggaccgcctgccaagactcgaagaaatccgcatttggggccctctccaagaggatgcggatatccaggtgtaccgccggtacggtgaagaatacggcaatctcaccagacctgacatcactttcacttacttccagccgaagccgcggcaggcctgggtctgggccgccgtccggggaccatgctcagtgtcgtgcggagcaggacttcggtgggtcaattacagctgtctggaccaggcccgcaaggaactcgtggagactgtgcagtgccagggttcccagcagccgcctgcgtggccggaggcgtgcgtgctggaaccgtgccccccgtactgggccgtgggtgacttcgggccgtgctccgcctcatgcggaggaggactgagagaaaggcccgtgcgctgtgtcgaagcgcagggatcgctcctgaaaaccctgccgccggcacggtgcagggccggcgcgcagcagccagccgtcgctctcgaaacttgcaatccacaaccgtgcccggcgcgctgggaagtgtccgaacctagcagctgtaccagcgcgggaggcgcgggccttgcgttggaaaacgaaacttgcgtgcctggagctgatggactggaggccccagtcaccgaaggccctggatcggtggacgagaagctcccggctccggaaccttgcgtgggcatgtcgtgcccgccaggatggggacacctcgatgccacttccgcaggagagaaggctccgtcaccgtggggctccatccgaaccggtgcccaagcggcgcatgtctggactcccgcagcaggatcgtgctcagtgtcctgcgggaggggacttatggaattgagattcttgtgcatggactcggctctcagagtgcctgtccaggaagagctgtgcggactggcatctaagcctggatcgcgccgcgaggtctgccaagccgtcccctgcccggccagatggcagtataagctggctgcctgtagcgtgagctgcgggcgcggcgttgtgagacgcattctgtattgtgcccgagcgcacggagaagatgatggcgaagagatccttttggacacccagtgccaaggcctgcccagacctgaaccgcaggaggcatgctccctggaaccatgcccgcccagatggaaagtgatgagcctgggaccgtgcagcgctagctgtggcctcggaactgcacggaggtcagtggcgtgtgttcagctggatcaaggacaggatgtcgaggtggacgaagcagcctgcgccgcgctggtgaggcctgaggcatcagtgccgtgtctgatcgctgactgcacctaccggtggcacgtgggtacctggatggaatgcagcgtgtcatgcggggatggaatccagaggcggcgggacacttgtctcggaccacaggctcaggccccggttccggcagacttctgccagcatcttcccaaaccggtgactgtgcggggatgctgggcagggccgtgcgtggggcagggaactccgtcacttgtgccacatgaagaagccgcagcgcctggacggacgaccgcaaccccggctggcgcctcgctggaatggagccaagcccgcggtctgctcttctcgccggcacctcagccgagacgtctccttccgggaccgcaagagaattccgtgcagtccagcgcctgcggccgtcaacacctcgaaccgaccggtacgatcgacatgagaggtccgggccaggcagattgcgctgttgctatcgggcgcccgctcggagaggtagtgactctgagagtgcttgagagctccctgaactgctcagcgggcgatatgctcctgctttggggacgtctcacctggcgcaagatgtgccggaaactgctggacatgaccttcagctctaagactaatacgctggtcgtccgccagcgctgcgggcgacctgggggcggagtgctgctgcggtacggctcccagctggcgccagaaaccttttatcgcgagtgcgacatgcagctgttcggaccatggggagagatagtttcaccttcgctgagcccagccacgtccaacgcgggcgggtgtcggttgttcatcaacgtggccccgcatgctcgcattgcgatccatgccctcgcgactaacatgggggcaggaaccgaaggcgcgaacgcttcgtacatcctcatccgggatactcactccctgcgaactactgcatttcatggacagcaggtgctgtactgggagagcgaatcaagtcaggcggaaatggaattctcggaaggattcctgaaagcccaagcatccttgcggggccaatactggaccttgcagtcctgggtgcctgagatgcaagacccacaatcatggaagggtaaagaaggaacc

SEQ ID NO: 5651 - DNA, 4281 bp, synthetic construct
  misc_feature 1..4281: note = source = /note="Description of Artificial Sequence: Synthetic coding sequence"
  source 1..4281: mol_type = other DNA
atgcatcaaaggcaccctcgagcaaggtgtccaccactctgcgtagccgggatcctggcgtgcggatttctcttagggtgttggggaccatcacattttcaacagagctgcttacaggccctcgagccgcaggccgtttccagctacttgagtcccggagctccgttgaaaggtcgaccacccagccctggtttccagagacagagacagcgacagaggcgagccgcaggcggcatcctacatcttgagctcttggttgctgtggggccagatgtattccaggcacatcaagaggacacagagcgctacgtgcttacgaacctcaacattggcgcagaactgctcagggatccgagcctcggcgctcagtttagggtgcatctggttaagatggtgatcctcacagagcctgaaggagcaccaaatatcactgctaacctcacctcatcgctgctgtcagtgtgtggctggagccaaaccattaatcctgaagatgacaccgatccaggccacgccgacttggtgctctacataacacgcttcgatttggaactgcccgacgggaatcgccaagttagaggcgtgactcagctggggggtgcctgtagtcccacgtggagttgcctgattaccgaagatacagggttcgatcttggggttacaatcgcccacgagattggccactccttcggtctcgaacatgatggcgctcctggatcaggatgtggaccttccggccatgtcatggcttcagatggtgctgcgccacgcgccggtctggcttggtcgccctgttcacggcgccagctcctgagcttgctgagcgccggcagggccaggtgtgtgtgggacccacccagaccccagcctgggtcagcaggccacccccccgacgcccagccaggcctgtattatagcgcgaatgagcaatgtcgcgtcgcgttcgggccaaaagccgtggcatgcactttcgcacgcgaacacctggatatgtgccaagcattgtcgtgtcatacagacccactggatcagtcctcttgtagtcgcctcctcgttccattgctagatggaactgagtgcggcgtagaaaaatggtgctctaagggacgatgtaggtcattagtggaactgacacctatagcagctgttcacggcagatggtcctcgtggggtcccaggtccccctgctctcgaagctgtggcggtggagtagtgactcgtagacgacagtgcaataatccaaggcccgcctttggtggccgggcttgcgtgggcgccgatttgcaggctgaaatgtgcaacacccaggcctgtgagaagacccagttggagttcatgtcacaacagtgcgctcgcactgatggtcagcctttaagatcttcgcccggcggtgcctccttttaccattggggagcggcggtgccacattcccagggggacgcgctctgccgtcatatgtgcagagccatcggcgaaagttttattatgaagagaggcgatagtttcttagacggcacgaggtgcatgccatctggccccagggaggatggaaccttgtcgttgtgtgtttcaggatcctgccggactttcgggtgtgacggacgaatggactcccagcaagtgtgggaccgctgccaggtttgcggtggggataattcaacctgttcccctcggaaaggtagcttcactgcaggtcgagcccgagagtatgtgaccttcctgactgtcacccctaatctgacatctgtctatatcgcaaaccaccgtcctctgttcacacacctcgccgtgaggataggcggtaggtatgtcgtcgccggcaagatgagtatttcccccaataccacctatccctcacttcttgaggatggcagggtcgagtaccgggtagcccttactgaggataggcttccccggctggaggaaatacgtatatggggccctctgcaggaggacgccgatattcaagtttatcgtagatacggcgaagagtatggaaatctcacaagaccggacattacctttacctatttccaaccaaagccacgtcaagcgtgggtctgggcagccgtgaggggcccgtgctcagtcagctgcggagcagggttacgatgggtcaactactcctgtttagaccaagctcgcaaggagctcgttgaaaccgtacagtgccagggctcccagcaaccccccgcgtggccggaggcctgtgtgcttgaaccatgccctccatattgggcggtgggtgattttggaccttgttcagcatcttgtggtgggggactgagagagcggcccgttaggtgtgtggaggctcaggggtctctcttgaaaacactcccacctgctagatgtcgggctggagctcagcagccagccgttgccctggagacttgtaatcctcagccgtgtcccgccagatgggaggtttcggagccatcctcatgcacatctgctggtggagctggcctggcgcttgaaaatgagacctgcgtgcctggagccgatggactggaggcccctgtgacagaagggcccggatctgtggacgaaaaacttcccgctccagaaccatgcgttgggatgtcctgcccccctggctggggacatctggatgccacctcagctggagagaaggcaccaagcccatgggggagcatcagaactggagcccaagctgcacacgtgtggactccagccgctggaagctgcagtgtgagctgtgggagaggtctgatggagctgagatttctttgcatggactcggcactgagagtacccgtgcaggaggagctgtgcgggctggcctcaaagcctggctctaggagagaggtctgtcaggccgtcccgtgccccgcccggtggcagtataagctggctgcctgctcggtttcctgtggtcggggggttgtcagaagaatcctatactgcgccagagcccatggagaagacgatggagaggaaatactcctcgacactcagtgccagggcctcccacggcctgaacctcaggaggcgtgttccctggagccctgtcccccaagatggaaggtaatgagtctgggtccatgttctgcgtcctgcggtttgggcaccgcacgaagaagtgtcgcttgcgtgcagctggaccagggccaagatgtggaggttgatgaggcggcatgtgcggcactcgtgaggccagaagcttctgtcccctgtctgatcgctgactgtacttatcggtggcacgttggtacttggatggagtgcagtgtcagctgcggtgacggcattcagagacgccgggacacttgccttggcccacaagctcaggcacccgttcctgctgatttctgtcagcatttgcccaaacctgtgacagtgagaggatgttgggcgggcccttgtgtcggccaggggaccccctcacttgtgccgcatgaggaggccgccgctcctggtcgcactactgctacacccgccggtgcaagcctggaatggagtcaagccaggggcttgctgttttctcctgctccccagcctcgccgactgttgcctggcccgcaggaaaatagcgttcagtcctctgcatgcgggcggcaacaccttgagcccacggggaccattgacatgagggggccggggcaggccgattgcgccgtggccattggaaggcctctcggagaagtagtcactctgcgcgtgctggaaagttccctgaattgctctgctggggacatgcttctgctctgggggaggctgacctggagaaagatgtgcagaaagctcctggacatgacattttcgtctaaaaccaatactctggtcgtacggcagaggtgtggaagacccgggggaggtgtcctgctccggtatggctcacaattagcgcccgagaccttctacagagaatgcgatatgcagctttttggtccctggggggagattgtgtcaccatcccttagccccgctactagcaacgccggcggctgccgccttttcatcaatgtggccccccacgcacgcatcgcgattcatgccttggccaccaatatgggcgccgggaccgaaggtgccaatgcatcttacattctaatacgtgacacccatagcctgcgaacgacggcttttcacggccaacaggtgctgtattgggagagcgagtcatcacaggctgaaatggaattcagcgaaggttttttaaaagctcaggcttctttacggggccaatactggacacttcagtcttgggtgcctgaaatgcaagatccccagagttggaagggaaaggaggggacc

SEQ ID NO: 5652 - DNA, 4281 bp, synthetic construct
  misc_feature 1..4281: note = source = /note="Description of Artificial Sequence: Synthetic coding sequence"
  source 1..4281: mol_type = other DNA
atgcaccaacgccatcctagggctagatgtccgccactgtgtgtggccggcattctggcctgtgggttcctgcttggatgctggggaccctcccatttccagcagagctgcttgcaagcactggagccacaggcggtcagctcatacctcagccctggcgcccccctgaaaggaagacctccctcacccgggtttcagcgacagcgacagcgccagaggagagccgccggcggaattctgcacctcgagttacttgtcgctgtgggccccgacgtcttccaggcccaccaggaggacacggaacgatatgttttaaccaacctgaacataggggctgaactgctccgagacccgtccctcggcgcccagttcagagtccacctagtgaagatggtgatcctcacggaacccgagggagctcctaacataacggcgaacctgacttcctctttgctgtcggtatgtggctggagccaaaccataaaccccgaagatgatactgatcctgggcacgctgacctagtgctttatattacaaggttcgacctcgaactccccgatgggaacaggcaggtgcgtggtgtgactcagctggggggagcctgtagtcccacctggtcctgcctcattaccgaggataccggatttgatctgggggtgaccattgctcacgagataggccatagcttcgggctcgagcatgacggagcaccagggtcaggctgcggtcccagcggccacgtcatggcctcagacggggcggccccaagggccggcttggcgtggtccccctgcagtcgacgacagcttctgagcctcctatccgccggcagggcacggtgcgtatgggatcctcccagaccacagcctggttccgctggccatcctcctgatgcgcagcccgggctttactattccgctaatgaacagtgtagagtagccttcgggccgaaggccgtggcttgcactttcgccagagagcacctggacatgtgtcaggccctcagttgccacactgaccccctggaccaaagctcttgctcacgattgctcgtccctctactggacggtaccgagtgtggggtcgaaaagtggtgtagcaaaggccgctgccgatctctggtggagctgacacctatcgcagccgtgcatggaaggtggtcaagctggggaccgaggtctccttgttccagatcatgcggcggaggtgtcgttacacgacgacgccagtgcaataacccgagacccgcgttcggggggcgcgcctgcgtcggtgcggacctccaggcagaaatgtgcaatactcaagcatgcgagaaaacccaacttgagttcatgagtcagcagtgcgctcggactgatggtcagccgctgcgcagctcgcctggcggggcatcgttctatcattggggggctgccgtgcctcatagccaaggcgatgccctctgtcgacacatgtgccgagcaatcggagagagttttattatgaaaaggggagactccttcctggatggtaccaggtgtatgccatccggacctagagaggacggcaccctttcattgtgcgtgagtggtagttgcaggacatttgggtgtgatgggaggatggattcccaacaggtctgggaccgatgtcaagtgtgtggcggggacaactccacctgttcacccaggaaaggaagttttacggcaggtcgtgcacgagagtacgtgaccttcctgacagtcactcccaatctgacctcggtctatattgccaaccatcgaccactgtttactcacttggcagttcgaatcggcggccgttacgtagtggctggcaaaatgtcaatatcccctaacacaacctatccctcattgcttgaggatggtagggtggaatatagagtagctctcactgaggatcgcctcccacggctggaggaaatccgtatttggggaccactgcaagaggatgcagatattcaggtgtacagacgatacggcgaggaatatgggaacctcactagaccggatataacctttacttacttccagcccaaaccaagacaggcatgggtatgggccgctgtgagaggtccttgcagtgtaagctgtggcgcgggacttagatgggtaaactattcttgcctggatcaagccaggaaggagctcgtggaaacagtgcaatgccagggtagccaacagcctccggcttggcctgaagcttgtgttctggaaccttgtcctccatattgggccgtgggtgacttcggtccttgttctgcctcttgtgggggtggactccgagagcgcccagtgcgatgtgtggaagcccagggcagcctcctgaagaccctgcctccggcgcggtgtcgggctggcgcacaacagccagccgtagctttagagacttgcaatccccagccctgccccgctaggtgggaagtgtccgagccatcttcctgtacttccgccggcggggcaggcctggctctggaaaatgagacatgcgtgccaggggccgatggcttggaggcccccgtgacagaaggaccagggagtgtcgacgaaaaactgccagccccagaaccttgtgtcgggatgtcttgccccccaggatggggacacttggatgctacttcagccggcgagaaggccccctctccatggggcagtattagaaccggcgcgcaggcagctcatgtttggacacctgctgctggatcctgtagtgtgtcctgcgggcgaggcctaatggaactgagattcctgtgtatggattccgccctaagggtgcctgtgcaggaggagctctgcgggctagctagtaagccaggatcgcggcgagaagtctgccaagctgtgccctgcccagcaagatggcaatacaaacttgccgcatgctcagtaagttgtggaaggggagtagtgagacggattttgtactgtgctcgagcccatggcgaagacgacggtgaagaaatcctcctcgatacacagtgtcaaggactgccaaggccagaaccacaagaagcatgctctctggaaccatgcccaccaagatggaaagttatgtcactcggaccgtgcagcgcctcatgcggactaggcacagcccgacgcagtgtagcatgtgtccagttggaccaaggccaggatgtcgaggttgatgaggcagcgtgcgccgcactggtgcgaccggaggctagtgtcccctgcttgatcgccgactgcacatatcgctggcatgtcgggacgtggatggagtgttctgttagctgcggagacggaatacaacgtcggcgagatacatgtctgggacctcaagcgcaggcaccggtacctgccgacttctgccagcatttgcccaaaccggttacagttagaggctgttgggcaggcccatgcgttgggcaaggcaccccttccctagtgccccacgaagaagccgccgcgcctggacgaacgacagcgacacctgctggggccagcttagaatggagtcaagcaagaggtctgttgttctcccccgccccacagccacgtcgattattaccaggacctcaggagaactcggtccagtccagcgcttgcgggcgacagcacttggaacctacaggaacaattgacatgcggggcccaggccaagccgactgcgctgtcgctattggccgacccttgggtgaggtggtcacacttcgcgttttagagagctcactgaattgctctgctggcgacatgctgctgctctggggccgactaacgtggcgtaagatgtgtaggaaactgctcgatatgactttttcatctaagacaaatactctcgtggttaggcagcggtgcgggaggcctggtggtggagtactgctgcgatacggcagccaactggcccccgaaacattttatcgggaatgtgacatgcagttgtttggtccctggggagaaattgtgtccccgtcactgtctccagccactagcaacgccggcggatgtagactcttcataaacgtggctccccacgcccggatcgccatccacgccctggcgaccaatatgggcgcaggcaccgagggagctaacgcatcctacatactcatcagggatactcatagcctgagaactactgcatttcatggccagcaggttctttattgggaaagcgagtcttctcaggccgagatggaatttagcgaaggatttctcaaggcacaagcctccctcagggggcagtattggacattgcagtcctgggtgccagagatgcaggaccctcagtcttggaagggaaaagaagggact

SEQ ID NO: 5653 - DNA, 4281 bp, synthetic construct
  misc_feature 1..4281: note = source = /note="Description of Artificial Sequence: Synthetic coding sequence"
  source 1..4281: mol_type = other DNA
atgcaccagagacacccgcgcgcccgctgcccgccactgtgtgtggcaggcatcctcgcgtgcggcttcctgctcggctgctggggaccatcgcatttccaacagagctgcttgcaagcgttggaaccgcaggcggtgtcctcctacctttcgcctggtgctcccttgaaaggacggccgccctccccggggttccagaggcagagacagcggcagcgccgagcagcggggggaatccttcacctcgagctcctggtggcagtgggcccggacgtgtttcaggcgcatcaagaagataccgagcgctatgtgctgactaatttgaatatcggagctgaactcctgcgcgacccttcgctgggggcacagtttcgcgtgcacctcgtgaagatggtgatcttgactgaaccggagggagccccaaacattaccgctaacctgacgtcctcgctcctgtcagtctgtgggtggtcacaaaccatcaatccagaggacgacacggacccgggacacgcggacctcgtgctttacattaccagatttgatctggaacttccagatgggaaccgacaagtgcgcggggtgacccaactgggaggcgcctgctcgcctacttggtcgtgcctgatcactgaggacactggattcgacctcggcgtgaccatcgcccatgagatcggtcactcattcggactggaacatgacggagcacctggttctggatgtggcccttcggggcacgtgatggcatcggacggagccgcaccgagagcaggcttggcctggtcaccttgctcgaggcgccagcttcttagcctgctcagcgcggggcgcgcgcgttgtgtctgggacccaccccgccctcaaccgggttccgccggacacccaccggatgcacaaccaggcctctactactcggcgaacgaacagtgccgggtggcgttcggtccgaaagcagtggcctgcaccttcgcacgggagcacctggacatgtgccaagccctgtcgtgccataccgaccctctggaccagagctcgtgctcccggcttctggtccctctgctcgatggcaccgagtgtggtgtggaaaagtggtgcagcaaaggtagatgccggagcttggtggaactcactccgatcgccgccgtgcatggaaggtggtcatcgtggggcccgagaagcccctgttcgcgctcctgcggcggaggcgtcgtgaccagaaggcgccagtgcaacaacccgcgcccggccttcggcggacgggcctgcgttggagccgatctgcaagcggaaatgtgcaatacccaggcgtgtgagaaaactcagctcgaattcatgagccagcaatgcgcacgtactgatggccaaccgttgcgctcgtcaccgggaggcgcctcattctaccactggggagcggctgtgccgcacagccagggcgacgcgctgtgccgacatatgtgccgggccattggagaatcgtttatcatgaaacggggcgactcctttttggatggcacgaggtgcatgccatccggcccacgggaggacggtaccctcagcctctgtgtgtcggggagctgtcggacctttgggtgcgacggacggatggattcgcaacaggtgtgggataggtgccaagtctgcggcggagacaattcaacgtgctcgccacgcaaaggttccttcactgcaggacgggcacgcgagtacgttactttcctcactgttaccccaaacctgactagcgtttacatcgccaaccaccgcccgctcttcacccacctggcggtgcgcatcggcggtcgctatgtggtggcaggcaaaatgtcgatcagcccgaacactacctacccgtcactcctcgaggacggccgcgtggaataccgggtcgcactgaccgaggaccgcctgccacgactggaggagatcagaatctggggaccgctgcaggaagatgcggatatccaggtgtaccgaaggtacggtgaagagtacggaaatctcaccagacctgatattaccttcacttacttccagccgaagcctcggcaggcatgggtctgggcggcggtccgggggccctgctcagtgtcgtgcggagccggactgagatgggtgaattactcctgtctggaccaagcgcgcaaggaactggtggaaaccgtgcagtgccaaggttcacagcaacctccggcgtggccggaagcatgcgtgctggagccgtgcccgccgtactgggctgtgggagactttggaccatgtagcgcttcgtgcggaggtggccttagagagcgcccggtgcgctgtgtggaagcacaaggttcgttgctgaaaactctgccaccggcccgctgccgcgccggtgcccaacagccagcggtcgcacttgaaacctgtaatcctcaaccgtgtcccgctagatgggaagtctcggagccttcatcgtgcacctccgcgggtggtgccggacttgctctggaaaacgaaacctgcgtgcccggcgcggatggactggaggccccagtgaccgaaggaccggggtcggtggatgagaagctcccagctccagagccgtgtgtcggaatgagctgtcctcccggatgggggcacctggatgcgacctcagcgggagaaaaggctccgtcaccttggggaagcatccgcaccggagctcaggcagcacatgtctggaccccggccgccggatcctgctcggtgtcgtgcggcagaggcctcatggaactgcggtttctgtgtatggattcagccttgagagtgccagtgcaggaagaactctgcgggctggcctccaagcccggctccaggcgcgaggtttgccaagcggtgccttgtccggcccgctggcagtataagctggccgcatgctccgtctcctgcggtcggggagtcgttagacggatcctttactgcgcccgcgcacatggagaggacgacggcgaggaaattctgctggacactcaatgccagggattgcccaggcccgaaccacaagaggcttgctcgctcgaaccgtgtcccccaaggtggaaggttatgtcgctcggaccatgctcggcgagctgcgggctgggaacggcccgccggagcgtggcgtgtgtccagcttgaccagggacaggacgtggaagtggacgaagcggcgtgcgccgccctggtcaggccagaagcgtccgtcccgtgcctcatagcagactgcacctacagatggcacgtgggaacttggatggaatgctccgtcagctgcggagacggtatccagcggcgccgggacacttgcctcggaccgcaggcacaggctccggtgccagccgacttctgtcaacacctgccaaaaccggtgaccgtgcggggctgttgggcgggaccttgcgtcggacaaggaaccccgagccttgtgccacacgaggaagcggccgcaccagggcgcacgactgccactccggctggcgcctcactggagtggtcccaggccagaggccttctgttttccccagctccccagcccaggcggctgctccccggccctcaagaaaacagcgtgcaaagcagcgcctgcggtcggcagcacctggaacctactgggactatcgatatgcgcggaccaggacaggcggattgcgcggtggccatcggccggccgcttggggaagtggtgacccttcgcgtcctcgaaagctcactgaactgctccgctggagacatgctcttgctttggggaaggctgacgtggcgcaagatgtgccgcaaattgcttgacatgacgttcagctcaaagaccaatacgctggtcgtcagacagagatgcggaaggccggggggcggggtccttctccggtatggatcgcagctggccccggagactttctaccgggagtgcgacatgcaactgttcgggccttggggtgagatcgtctcaccttccctctcccctgctaccagcaatgcgggtggatgccggctgttcatcaacgtcgcgcctcatgcacgaatcgccatccatgcactcgccactaacatgggagccgggaccgaaggcgcaaatgccagctacatcctgatccgagacacccattcccttagaaccaccgcctttcatggacaacaggtgctttactgggaatcggagtcgtcacaagctgagatggagttctctgagggcttcttgaaggcccaggctagccttagaggccagtactggaccctccaaagctgggtcccggagatgcaggacccacagtcgtggaaagggaaggaaggaacc

SEQ ID NO: 5654 - DNA, 4281 bp, synthetic construct
  misc_feature 1..4281: note = source = /note="Description of Artificial Sequence: Synthetic coding sequence"
  source 1..4281: mol_type = other DNA
atgcatcaacgccacccacgcgcaagatgcccacctctgtgcgtagctggtatcctggcgtgtggctttcttctgggatgctggggaccatcccattttcaacagtcgtgtctgcaggcgttggagcctcaggcagtgtcgtcctacctttccccaggagcaccccttaagggcagacctccatcacctggtttccaacgccaacgtcaaagacaacggagggccgcaggaggaattcttcacctggagctgcttgttgccgtgggcccagatgtgtttcaagcacatcaggaagatactgaaagatacgtgttgactaatcttaacattggagcggaactgcttagggacccatcgcttggagcccagtttcgggtccatttggtcaagatggtgatcctgaccgaaccagaaggagctcctaatatcactgcaaatttgacttcctcccttctttcagtgtgtggatggagccaaactataaaccctgaggacgatactgatccaggtcacgcagatctggtcttgtacataactagattcgaccttgagctgcctgatggtaaccggcaagtgaggggagtgacccaactgggtggtgcgtgtagccctacttggtcctgtcttattaccgaggatacgggatttgatctgggggtgaccattgcacatgagatcggacattcgtttggactggaacacgacggagcgcccgggtcaggttgtgggccatcgggtcatgtcatggcatccgatggagccgcgccacgggctggtctggcatggtcgccatgctccagacgtcaacttttgagcctcctgtccgcaggtagggcacgatgcgtctgggatccacctaggcctcagccaggttcggcagggcatcctcccgacgcacagccaggcctgtattactccgcaaacgaacaatgtcgcgtcgctttcggccctaaagcagttgcttgcactttcgcacgcgagcatctggatatgtgccaagcactctcctgtcataccgatccccttgatcagtcctcatgttcccgtctgctggtgcctctgctggatggaaccgaatgcggagtcgaaaaatggtgtagcaagggtaggtgccgaagtcttgtcgaactgactcctatagcagcagtgcacggcaggtggtcctcgtggggaccacggagcccatgtagcagatcctgtggcggaggcgtcgtgacccgaaggcgtcagtgtaataaccctcgacctgcatttggaggacgtgcctgcgtaggagccgatcttcaagcagagatgtgcaacacccaagcctgtgagaaaactcaactcgagtttatgtcgcagcaatgtgcaaggactgacggccagcctcttagaagctcccctggaggggcctccttttatcattggggcgccgcagtgccacacagccaaggggatgcactttgtagacatatgtgtagagcaattggagaatccttcattatgaaacgtggcgatagtttccttgatggcacgcggtgcatgccgtccggtccgagggaagatgggactctgtcgctgtgcgtgagcggttcgtgtagaacttttggttgtgatggtcgcatggattcccagcaagtgtgggaccgatgtcaagtgtgcgggggtgataattccacttgttcgccccgcaaagggtcatttactgccggacgtgcaagggaatacgtcaccttccttaccgtgactcctaatctgacctcagtgtacattgctaatcaccgcccactttttacccatctggcagtgagaattggtggaagatatgtggtggcaggcaagatgtcgatatcacctaatacgacctacccatcgctgttggaagatggcagagtcgaatacagggtggcattgacggaagatcgccttccaagactggaagagatccgcatttggggtcccctgcaggaagatgcggacattcaggtctacagacgctacggagaagaatacggaaatcttaccagacctgatatcacttttacgtactttcagcctaagccacggcaagcctgggtgtgggccgcagtccgcgggccctgtagcgtctcgtgtggtgcaggactgagatgggtcaactacagctgccttgaccaggcccgtaaagagctggtcgagactgtgcagtgtcagggttcacagcagcctcccgcatggcccgaggcttgtgtcctggagccgtgtcctccttactgggcagtgggagacttcggtccttgtagcgcatcctgcggaggaggactgagagaaaggccagttagatgtgtggaagcccagggaagcctgcttaagacccttcctcctgcaagatgccgcgcaggagctcaacaaccggcagtggcgctggagacttgtaacccacaaccctgccccgcacgttgggaagtttccgagccctcgtcgtgtacttcagccggcggcgcaggactcgcccttgagaacgaaacttgtgtccctggtgcagacgggctcgaggcaccagtgaccgaaggtccaggttcagtggatgagaagttgcctgctcccgaaccgtgcgtgggtatgtcatgcccccctggatggggtcatctggacgcaactagcgcaggagaaaaggcaccgtcgccttggggttccattcggaccggagcccaagcagcacatgtgtggactcctgccgctgggtcgtgttccgtgtcatgcggaaggggcctgatggaacttcgctttctttgtatggatagcgccctgagggtgccggtgcaagaagaactgtgtggtctggcgagtaagcccggatcccgccgggaggtctgtcaggctgtcccctgcccagcaagatggcagtacaaacttgcagcctgctcagtgagctgtggtcggggagtggtgagacgtattctttactgcgcacgtgctcatggtgaggacgatggcgaggagatactgctggacacccagtgtcaaggtctgcccaggccggaacctcaagaggcatgtagccttgaaccatgtcctccaaggtggaaggtcatgtcactgggtccatgcagcgcatcctgtggacttgggaccgctcgacgaagtgtggcctgtgtgcaactggaccaaggtcaggacgtggaagtcgatgaagcagcgtgcgcggctttggttagaccagaggcaagcgtcccctgtttgattgcggattgcacctacagatggcacgtggggacgtggatggaatgtagcgtgtcgtgtggtgacggtattcaaaggcgacgcgacacttgtctcggaccacaagcccaagcacccgtcccagcagacttctgtcaacatttgccgaagcccgtcactgtcaggggctgctgggccggtccatgtgtgggtcaaggaacccctagcttggtcccacacgaagaagccgcggcgccaggacgtaccacggctactcctgcaggcgcatcactggaatggtcacaggcacgtggcctgctgttttcacctgcaccacagccacggcgacttctgccgggaccgcaagaaaactcggtgcaatcatccgcttgcggacgacagcacctggagcctaccgggaccattgacatgcgaggcccaggacaagccgattgtgccgttgccatcggtagaccgctcggagaagtggtgaccctccgggtgcttgagtctagcttgaactgttctgctggtgacatgctcctgctgtgggggcgcctcacgtggagaaagatgtgtcgcaaacttctggacatgactttctcgtcgaaaactaacaccttggttgtccggcaacggtgcggtcggcccggaggaggcgtgctgcttcgctacggctcacaattggcacctgaaaccttttaccgagaatgtgatatgcaactgtttggcccctggggggaaatcgtgagcccaagcctttcacctgctacctcgaatgccggtggatgccggttgtttatcaatgttgcacctcacgcgagaattgccattcacgcgctggcaaccaatatgggtgctggtaccgaaggagcaaacgcctcgtacattctgattagagatacccactcgcttcgcaccaccgcgtttcacggccagcaggtgctttactgggaatcagagtcctcacaggcagaaatggagttctcggagggattcctcaaggcgcaagcgtcgcttagaggccaatactggaccttgcagagctgggtgccggaaatgcaggatccacaatcgtggaaggggaaggaaggaact

SEQ ID NO: 5655 - DNA, 4281 bp, synthetic construct
  misc_feature 1..4281: note = source = /note="Description of Artificial Sequence: Synthetic coding sequence"
  source 1..4281: mol_type = other DNA
atgcaccagcgccaccctcgagctaggtgtcctccactctgtgtggccggcatcctggcatgcgggtttctccttggatgttggggtccttcccactttcaacagtcctgccttcaagcacttgaaccccaagcagtgagctcctaccttagcccaggcgcacctctgaagggtcgccctccttctcccggatttcagagacaacggcagcggcaaagacgggctgcaggcggaattctccatctggaactgctcgtggccgttggacctgatgtgttccaggcgcatcaggaagataccgagaggtacgtgcttaccaacttgaatattggcgcagaacttctccgcgaccctagcctgggggctcagttccgagtgcaccttgtcaaaatggtcattcttacggagcctgaaggcgcacctaacataaccgccaacctgacttcgtccctgctttcggtgtgcggatggtcacagactataaacccagaagatgataccgatcctgggcatgccgacctggtgctctacataactagatttgaccttgagctgccagatggaaacagacaggttcgcggggtgacgcaactgggtggagcatgtagcccaacctggagctgcctgatcactgaagatactgggtttgacctgggcgtgaccatagcccatgaaatcggtcattcttttggtctggagcatgatggggcacctggttccggctgcggtccatccgggcatgtcatggcctctgacggtgcggcgcccagagcaggattggcgtggtccccctgctcgcgccggcaactcctttcattgctgtcggccgggcgggcaaggtgtgtgtgggatcctccccgtccacaacctggatcggccggacatccaccagatgcacaacccggtctttactactcggctaacgagcaatgcagagtggcctttggaccaaaggctgtcgcatgtaccttcgcccgggagcacctggacatgtgtcaagctctgtcctgccacactgatcctctggatcagtcgagctgttcgaggctgcttgtgcccctgctcgatgggactgagtgcggagtggagaaatggtgctcaaaaggacgttgtaggtcactggtggagcttactcccattgccgcagtgcatgggaggtggtcctcttggggaccccggtcaccttgttctcgatcctgtggaggcggtgttgtcacccggagacgccaatgcaacaatccccgcccagcgtttggtggacgggcctgtgtgggggcagatcttcaagccgaaatgtgtaatacgcaagcgtgcgaaaagactcagttggagtttatgtcgcaacagtgtgccaggactgacggtcaaccgctgcgctcgtcccctggtggggcgagcttctaccactggggtgcagcagtccctcattcgcaaggtgatgcactctgtaggcatatgtgtcgcgcaatcggcgaatcgtttatcatgaagagaggagatagcttcctggatggaacccggtgcatgccttcagggcctagagaagatggaactctgtccttgtgtgtgtcgggatcgtgtagaacctttggttgtgatggaaggatggattcgcagcaagtgtgggatcgttgccaagtgtgtgggggcgacaactccacgtgtagccctcgtaagggttcgttcaccgccggaagagcacgcgaatacgtcacttttctcaccgtgacccccaacctgacctcagtgtacatcgcgaatcaccgtccgttgtttacccatctggcagtacggattggtggacggtatgtggtggcgggcaaaatgagcatttcccccaatactacctaccctagcctgctggaagatggtagagtcgagtaccgggtggcactcactgaggatcgcttgcctcgcctcgaggaaattagaatctggggaccattgcaagaagatgcagatatccaggtctatagaagatacggagaggagtacggcaacctcactaggcctgacattaccttcacctattttcagccaaagccacgccaagcctgggtttgggcggcagtgagaggaccctgttcggtgtcttgtggagcaggtctgaggtgggtcaactactcgtgccttgatcaggcgagaaaggaactcgtggaaaccgtgcagtgccaaggatcgcagcaacctcccgcatggcctgaagcgtgcgtgctcgaaccatgtcccccttactgggcggtcggagacttcggcccttgttctgcaagctgtggaggaggcctgagagaacgtcccgtgaggtgtgtggaggcacaaggctccctgcttaagacgctgccacccgccagatgcagagcaggagcacaacaaccagcagtggcactcgaaacctgcaacccacagccttgtccagcacgatgggaagtgtcagagccgtcctcttgtacttcagcaggaggtgcaggacttgcactcgaaaatgagacttgtgtgcctggtgctgacggcctcgaagcacctgtcactgaaggacctggatccgtggatgaaaaactccccgcacctgaaccgtgcgtggggatgtcctgccctccaggatggggacacctggacgcaacttctgctggagaaaaggccccatccccttgggggtcaattcgaactggagcacaggccgcacatgtgtggactcctgctgccggatcatgtagcgtcagctgcgggcgagggctcatggagctcagatttctctgtatggattctgcgctccgggtgcctgtgcaggaggaactttgtggccttgcatcaaagccgggatccagaagggaagtgtgtcaggccgtcccttgcccggcgaggtggcagtacaagctggctgcttgttcagtctcatgtggcagaggggtggtgcgtagaattctctactgcgcgcgggcacatggcgaggatgacggagaagaaattctgcttgatactcagtgccaaggcctgccccgacccgagccccaggaagcgtgttctttggagccctgtccaccacggtggaaagtgatgtcactgggtccatgcagcgcatcatgcggcctcggaactgcccgacgttcggtggcctgcgttcagctggaccagggccaggatgtcgaagtggacgaagcagcatgtgcagctctggtccgcccggaggcatcggtgccatgcctgattgcagactgcacttacagatggcacgtagggacctggatggaatgttctgtctcatgcggagacggaattcagcggcgccgcgatacttgtcttggcccgcaagcacaagcacctgtccctgcggatttttgccaacatctgcctaagccagtgaccgtcaggggctgctgggctggcccttgtgtgggccagggaacgccttccttggtgcctcacgaagaagcagcggcaccaggcagaacgacggcaacccctgcaggagcaagccttgaatggtcccaagcgcgcggactcctcttctcccctgctcctcagcctcggaggctgcttcctggtccgcaagaaaatagcgtgcaatcgtcggcctgcggacgccaacatctggagccgactgggactatagatatgagaggcccaggccaggcagattgtgccgtggcaattggacgaccgctcggcgaagttgtgacccttcgtgtccttgagtcctcgctcaattgttcggcaggcgatatgcttctcctttggggtagactgacctggcgcaagatgtgccggaagctcctcgatatgaccttcagctctaagaccaataccctggtggtgcgccaaaggtgcggacgcccaggtggaggcgtgctgctgcgctacggttcacaattggcacccgaaacgttttaccgtgagtgtgatatgcaacttttcgggccgtggggagaaatcgtttcgccttccctttcgcctgcaacctcgaacgcaggagggtgtaggctcttcatcaatgtcgcacctcatgccagaatcgcaattcatgcgcttgcaactaacatgggtgcaggtactgagggtgccaatgcatcgtacatcttgattagagacactcactcacttagaaccaccgcatttcatggtcaacaagttctttattgggaatccgaaagctcccaggccgaaatggagttcagcgaggggttcctgaaagcgcaagcaagcctgcgcgggcaatactggaccttgcagtcgtgggtcccagaaatgcaagaccctcaaagctggaagggcaaggagggaact

SEQ ID NO: 5656 - DNA, 4281 bp, synthetic construct
  misc_feature 1..4281: note = source = /note="Description of Artificial Sequence: Synthetic coding sequence"
  source 1..4281: mol_type = other DNA
atgcatcaacggcatcctcgagcgcgctgtcccccactttgcgtggctgggatcctggcatgcggctttctgctgggttgttggggcccttcacatttccagcagagctgcctccaagccctggaaccacaggcagtctcgtcctacttgagccccggagcaccactgaagggacgccccccttcgccaggatttcaacggcaacgccagcgccaaagacgtgccgcaggagggattcttcatctggagctcctggtggcggtgggacctgatgtctttcaagcacaccaagaggacaccgaacggtatgttttgactaacttgaacattggcgcagagctgctcagggatccttcccttggagcacaatttcgggtccacctcgtgaagatggtgatcctgaccgaaccggagggtgcccctaacattactgccaaccttacgtcatctctgctttcagtgtgtggatggtcccaaactatcaatccggaagatgatactgatcctggccatgcagacctggtgctgtacataacgagatttgatctcgaactccccgacggaaacagacaagtcaggggtgtgacccaactgggtggcgcatgttcgcctacctggagctgtctgattaccgaagataccgggtttgatctcggcgtgacgatagcacatgaaatcggacactcgttcgggctggaacatgatggtgcaccagggtcgggttgtggacctagcggtcatgtgatggcatccgacggtgcagcaccaagggcggggctcgcgtggtcgccatgttcgcgcagacaactgttgtccctccttagcgctggacgcgcgagatgtgtctgggatccaccgcgacctcagccaggatccgctggacatcctcccgacgcacagcctggtctgtactactcagcaaacgagcagtgtagggtggcatttggtccgaaggcggttgcttgtaccttcgctagagaacacctcgatatgtgtcaggcactgagctgccacacggatcccctggatcagtcctcgtgttcgcgcctgctggttccccttttggacggaactgagtgtggggtcgagaagtggtgttcgaagggccgttgtaggtcactggtcgagctgactcccatagcagcagtgcacggaagatggagctcatgggggccacggtccccatgctcacgttcgtgcggtggcggagtcgtgactaggcgccgccaatgcaataatcctaggccagcattcgggggaagagcatgtgtgggagccgatctccaagcagagatgtgtaacacccaggcatgtgagaaaactcagctggagtttatgtcccagcaatgtgccagaactgatggccagcctttgcgatcctcacccggaggagcctcgttttaccattggggcgcagctgtccctcactcacaaggagatgcactgtgtaggcatatgtgtagggcaattggggagtcattcatcatgaaaagaggcgactcatttcttgacgggactagatgtatgccgagcggaccccgtgaagatggaactctgagcctgtgtgtgagcgggtcgtgtagaacctttggatgtgacggacgtatggactcacagcaagtgtgggatcgctgtcaagtttgcggtggtgataacagcacttgctcaccacggaagggctcctttactgcaggtagggcacgtgaatacgtgacgtttctgactgtgactccaaacctgactagcgtgtacatcgccaaccacagacctctgttcacccacctggccgtgcgcataggagggagatacgtcgtcgcaggaaagatgtcgatctcccccaatactacgtatcccagcctgctcgaagatgggcgggtggaataccgtgtggctcttaccgaggatcgcctccctcggctggaagaaataagaatttggggtccactgcaggaagatgcagacatacaggtgtacaggagatacggagaagaatacgggaacctgaccagacctgacattaccttcacctactttcagcctaagccacggcaggcctgggtctgggcggcggtgcgcggaccgtgctcggtgtcgtgcggtgcgggtctgcgctgggttaactactcctgccttgatcaagcacgtaaggaacttgtggaaactgtgcagtgccaaggttcccaacagcctcctgcctggcctgaagcatgcgtgctcgaaccgtgcccgccttactgggcagtcggagactttggtccctgttcggcctcgtgtggcggggggctgcgagaacgccctgtgcgatgtgtcgaagcacaaggtagcttgctcaaaaccctgccccccgccagatgtagagcaggtgcgcaacaacctgctgttgccttggaaacctgcaatccgcaaccctgtcctgcgcgctgggaagtgtcggaaccaagctcctgtactagcgcaggaggtgcggggcttgcactggaaaacgaaacctgtgtgcccggcgctgatggacttgaggcccctgtgactgaaggacctggatcagtggatgagaagttgccagcacccgaaccttgtgtcggaatgagctgtccacctggttggggacaccttgatgcaactagcgcgggcgagaaggcaccatcgccgtggggttccattagaactggcgcacaggcagcgcatgtctggactccagcagcaggaagctgttccgtgtcgtgcggcagaggactcatggagctcagatttctttgtatggattcggcactgagggtccctgtccaagaggaactttgtggactcgcctcaaaacctggatcgaggcgtgaggtgtgtcaggcggtgccatgtccagcaagatggcaatacaagttggcggcctgtagcgtcagctgtggtagaggtgtcgttcgtcggattctttactgtgcaagagcacatggcgaggacgatggagaggaaatcctgcttgatacccagtgccaggggcttccaagacctgaaccccaggaggcatgttccctggagccgtgcccaccccggtggaaggtgatgagcttgggtccctgttcagcatcgtgtggacttggaaccgcacgaagatcagtcgcttgcgtccagcttgatcagggtcaggatgttgaggtggatgaagccgcctgtgctgcactggtgcgccctgaagcaagcgtcccttgcctgatcgcggactgcacttacagatggcacgtgggaacctggatggaatgttcggtgtcatgcggagacggtatccaacggagacgggacacctgtctgggaccacaagcccaagccccagtgccagcagatttttgccaacatcttcctaaacctgttactgtgcgaggatgctgggcgggtccatgcgtcggacaaggcaccccctcacttgtgccccatgaagaagccgcagcaccaggacgaactactgccacccctgccggcgcctcccttgaatggtcgcaggcacgtggactgctgttctcccctgcacctcagccaagacggctgctgcctggtccccaagaaaactcagtgcagagctcagcctgtggtagacaacatcttgaacccactggaaccattgatatgagaggaccagggcaagccgattgtgcagtggccattggtagaccactcggcgaagtcgtgactcttcgtgtgcttgaatcatcccttaattgctcagcaggggatatgctgctgctgtggggacgcctgacttggagaaagatgtgccgtaaactgctcgatatgacctttagctcaaagacgaacactctcgtggtgcgccagaggtgtggccggccgggcggcggagttctgctgaggtacggttcgcaacttgcccctgaaaccttttacagagaatgcgacatgcaattgttcgggccttggggagagattgtgagcccatccctctccccggcaacttcgaatgccgggggatgcagactgtttatcaatgtggcaccgcatgctagaattgccattcatgccctggccaccaacatgggcgcaggcaccgagggagctaatgcatcgtacatcctgattagagatacccattctctgaggactactgcgtttcatggacaacaagtcctttactgggaatcggaatcctcgcaagccgagatggaatttagcgagggctttcttaaagcccaggcgagccttaggggacagtattggaccctgcagtcatgggtgccagagatgcaagacccccagtcgtggaaggggaaggaaggaact

SEQ ID NO: 5657 - DNA, 4281 bp, synthetic construct
  misc_feature 1..4281: note = source = /note="Description of Artificial Sequence: Synthetic coding sequence"
  source 1..4281: mol_type = other DNA
atgcatcaaaggcacccaagggcacggtgtcctccgctatgtgtagcagggatcttggcctgcggcttcctcctcggatgttggggaccaagccattttcagcagtcttgtctgcaggccctggaaccacaagcagtgtcctcatacctctccccgggcgctcctctcaaagggaggcccccttctcctggtttccagcggcagcggcagcggcaaaggagagccgcagggggtatcctgcatctggagctgcttgtcgccgtaggaccagacgtctttcaggcccaccaagaagacacagaaagatacgtgctgacgaacctcaatatcggagctgagctgctgagagatccaagtttaggagctcagtttcgcgttcatctggtgaaaatggtcattttaaccgagcccgagggggccccgaacataactgcgaacctaacaagcagcttgttgtcggtctgcggctggtcacaaactataaatcccgaagatgataccgaccccggacacgctgatctggtgctctacattacccgctttgaccttgagctaccggacggcaatcggcaggtgaggggcgtgacacagctgggaggagcatgctccccaacctggtcctgcctgattaccgaagacaccggatttgacttgggagtgaccatagcacacgagataggacactcgtttgggcttgagcatgacggcgcacccggttcaggctgtggtccctctggtcatgtgatggcatcagacggcgctgcaccccgggctggcttagcgtggtccccatgcagcaggagacaactgctctccctgcttagcgcgggacgggcaaggtgcgtctgggacccaccaagacctcagcctgggtccgctgggcacccccccgatgcccagcccggcctatactatagcgcaaatgaacagtgtagagtggcgtttggcccaaaggcagtggcctgcaccttcgctagggagcacctcgacatgtgccaagctctgtcttgtcataccgacccacttgatcagtcaagttgctcccgcctacttgtgccgctgctggacgggaccgagtgtggcgttgagaaatggtgctctaagggccgctgtaggtctcttgtcgagctgaccccaattgctgcagttcatggacgttggtcttcatggggcccacgctcaccctgcagtagatcatgtgggggcggggtggtgactaggagacgccagtgtaacaaccctcgcccggcgttcggcgggagggcttgcgtcggggcggacctacaggcggaaatgtgtaacacacaggcctgcgaaaaaacacaactggagttcatgagccaacagtgcgcacgcaccgacggtcagccgctccggtctagtcctggaggagcctcattctaccactggggggctgctgtgccccacagccaaggggatgccctctgccgacacatgtgtagagccatcggggagagcttcattatgaaacgcggagatagcttcttagacggcactcgctgtatgccttccgggcctcgcgaggatgggacactctccctctgcgtatctggcagctgtagaacattcgggtgcgacgggagaatggacagccagcaggtgtgggatcgatgccaagtctgcggaggcgacaatagtacctgttcaccacggaagggatcctttactgccgggagagcaagagagtacgtaacattcttgaccgtgaccccgaatctaacatcagtgtacattgccaatcacagacctctgttcacacacctggccgtccgcataggcggcagatatgtggttgcagggaagatgagtataagcccgaacactacttacccaagcctgctcgaggatgggagagtcgagtacagagtggccttgacggaagaccgcctaccaaggctggaggagattcggatctggggtccactccaggaagacgccgatatccaggtctaccggcgatacggcgaggagtatggtaaccttacgcggcccgacatcaccttcacctatttccagccaaaacctcgtcaggcctgggtgtgggcagccgtgaggggcccttgctcagtcagttgcggtgcagggctccgttgggtcaattattcctgtctggaccaagcacgcaaagaactggtggagactgtacagtgtcagggaagccagcagcctcccgcttggcccgaagcatgcgtattagagccctgcccaccatattgggcggtgggtgactttggaccttgcagtgcttcctgtggcggcggcctgagagaacggccggtccggtgtgtcgaggcacagggaagtctcctcaagactctaccacctgccaggtgtagggcaggggctcagcaacctgcagtagcgctggaaacttgtaatccacagccttgcccggctagatgggaggtgtcggagccttcttcctgcacgagcgcagggggagcgggtcttgctcttgaaaacgagacttgcgtccccggagccgatgggctcgaagctccagtcaccgaagggcccgggagcgtcgatgaaaaactgccagcccccgagccctgcgtgggtatgtcatgtccgccgggctggggacacttggatgcaacctcagcgggggagaaagcgccatcaccatgggggagtattcggacaggcgcacaggctgcccacgtatggacaccagccgccggctcctgcagcgtctcttgcgggaggggcttaatggagttgcggtttctatgtatggacagcgctcttcgcgttcccgtccaggaggaactgtgtggcttggcttccaaacccggcagcaggcgcgaggtttgccaggcagttccttgtccagcccgatggcagtataagctggccgcatgcagcgtatcttgtggccggggtgtggtcaggcgcatactttattgtgccagggcccacggggaagacgatggagaagaaattctgcttgacacccagtgccagggactgcctcgcccagaaccccaggaagcctgctctttggagccgtgcccacccagatggaaggttatgtccttagggccatgttctgccagctgtggcctcggtaccgcgagaaggtctgtggcttgcgtccaattggatcagggacaagacgtggaggtggatgaggctgcgtgtgccgccctggtgcggccagaagcctcggtgccatgtctgatcgctgactgcacctatcggtggcacgtcggcacttggatggagtgtagtgtgtcatgtggggacggtatccagagacggagggacacatgtttggggccgcaagctcaagcacctgtgcccgcggacttctgccagcacctgcccaagccggttaccgtgcggggatgttgggcaggcccttgtgtcggccaaggtacacccagtttggttccgcacgaggaggcggccgcacctggacggacaactgctacccctgccggagcgagcttagagtggagtcaagcacgaggactactgttttctccagccccacagcctcggcgcttgctgccgggtccccaggaaaactccgttcagtctagtgcgtgtgggagacagcatcttgaacccacaggtaccattgatatgcgaggtcctggacaggcggactgcgcagtggccattggaaggccactaggtgaggttgtgacgctcagagtcctcgaatcttctctgaattgcagtgccggggacatgcttctactgtggggcaggttgacttggcgcaaaatgtgtagaaagctcctggatatgaccttttccagtaagacaaataccctggtcgtgcgccaacgctgcggtcgacccggaggcggagtactgctgcggtacgggtcccagctggcgccagaaaccttctatagagagtgcgatatgcagttgtttggcccatggggcgagatcgtatccccttccctctctcctgcaacgtcaaatgctggcggctgccgtcttttcatcaacgttgcccctcacgctagaatcgccatccacgccctggcaacaaatatgggcgctgggacagagggtgctaacgcttcctacattctcatcagagacacccatagccttcgcacaactgctttccacggccagcaagtgctgtactgggagtcggagtcttcacaggcagagatggagtttagcgaaggcttcctcaaagcacaggccagcttacggggccagtactggacgttgcaatcctgggtacctgagatgcaggacccacagagctggaagggaaaagagggtacc

SEQ ID NO: 5658 - DNA, 4281 bp, synthetic construct
  misc_feature 1..4281: note = source = /note="Description of Artificial Sequence: Synthetic coding sequence"
  source 1..4281: mol_type = other DNA
atgcaccagcgccatccccgcgcaagatgcccccccttgtgcgtcgctgggattctggcatgcggtttcctccttggttgttgggggccctcgcactttcagcagtcttgtctgcaagctctagaaccccaagctgtgtcctcatacctatcacctggagcacctctgaagggacgacctccgagccctggattccagcggcaacgacagagacagcggagggcagcaggaggcatcttgcacctggaactgctggtggccgtcgggcccgacgttttccaggcacaccaggaagataccgagaggtacgtgctcactaacttgaatatcggagcagaacttctccgcgatcctagtctgggtgcccagtttagggtgcatctggtcaagatggtgattctgacagaaccagagggagcacccaacataaccgccaacttgaccagctccctgctctcagtgtgtggatggtctcagacgatcaatccagaggatgacacagacccggggcacgcagacctggtgttatacatcaccaggttcgatttagaactgcccgacggcaatcgacaggtgaggggggttacccaactaggtggcgcttgcagcccaacatggagctgcctgattaccgaggacacaggatttgatctgggtgtgacaatagcccatgagatcggccactctttcggactagagcatgatggcgctcccgggagtggctgcggtccatccgggcacgtcatggcgagcgatggagcagctccgagggcaggactcgcctggtcaccgtgctctaggagacagctgctatccttgctgagcgccgggcgggccaggtgtgtttgggacccgcccagacctcaaccagggtcagccgggcatccgcctgatgctcagcctggcctgtactattccgcgaacgagcagtgccgagtcgcattcgggcccaaggccgtcgcctgtacatttgctcgagaacatctggacatgtgccaagccctcagctgccacaccgacccgctggatcagtcttcatgctcacggttgcttgttccactcttggacggtaccgaatgcggggttgaaaaatggtgctccaaaggacggtgcagaagcttggtggagcttacgcctatcgcggccgttcacggtagatggagttcttgggggccacggagtccctgctcccgttcatgcggcgggggcgtggtcacgcgacgcagacaatgcaacaatccccggcccgcctttggcggtagagcttgcgtcggagcagatctgcaggcagagatgtgtaatacccaagcgtgtgaaaagacgcagctcgaattcatgtcccaacagtgcgcccggacagacggtcagcccctgaggtcctcacccgggggggcaagcttctatcactggggcgctgccgtcccacactcacaaggcgatgctttgtgcaggcatatgtgtagggcaatcggcgagtcattcataatgaagaggggcgactcatttctggacggaaccagatgcatgccatcaggcccacgcgaggacgggacactgtcattgtgtgtctcgggatcctgcaggaccttcggttgtgatggacgtatggactcgcaacaggtgtgggaccgctgccaggtttgcggcggtgataattcaacttgtagtccccgtaaaggcagttttactgcaggccgcgcgcgcgaatatgtgacattcctgacagtaacaccaaatctgacaagcgtttatatagcgaatcaccggcctctgttcacacatcttgccgtccgaattggcgggcgatacgtcgtggcagggaagatgagtatctccccaaacacgacttacccatcgttgctggaagacggtagagtggaataccgtgttgcactcaccgaggatcggcttcctaggctggaagaaattagaatctggggtcctctccaggaagatgctgatattcaggtctacaggcggtatggcgaagagtacggcaatctgaccagacctgacataacgttcacttacttccagcccaaaccacgacaagcatgggtgtgggccgccgttcgggggccttgttctgtgtcctgcggcgccggtctccgatgggtaaactattcctgtctggaccaggccagaaaggagctggtggaaaccgtgcagtgccagggttctcagcagccccccgcctggcccgaggcctgtgtcttggagccctgtccgccttattgggcagtgggggacttcggtccttgttctgcttcctgcgggggcgggcttagagagagacccgttcggtgcgtcgaggctcagggaagtctgctgaagacgctgcccccggcacgttgcagggccggcgcacagcagccagctgtagcactggaaacctgcaatccacaaccatgcccagctcggtgggaggtatctgaaccatcatcatgcactagcgccgggggtgctggtttggccctcgaaaacgagacctgtgttccaggagctgacggtctcgaggcgcctgttacggagggtcctggatccgttgacgaaaaacttcccgctcccgaaccttgtgtaggcatgagctgtcccccaggctggggccatcttgacgcaaccagcgccggggaaaaagctccctccccttgggggtctattagaacaggggcacaggctgcccacgtctggacacccgcagccggatcctgcagcgtgtcatgtggcagaggactgatggagctgaggtttttgtgcatggattccgccctgagggtgcccgtgcaagaggagttatgtggcctggcttcaaagcccgggagtcgaagagaggtttgtcaggcggtgccgtgtccagcgcggtggcaatacaaattagcggcctgcagtgtgagctgtggccggggcgtagtgcgccggatcctatattgtgccagagcccatggagaggacgacggcgaagaaatcctattagacacacagtgccagggcctgccgaggccagagccccaggaggcctgctctcttgagccgtgccctcccagatggaaggtgatgtcgcttggaccatgtagtgcctcgtgcgggctaggtacggcccgacggagtgtagcatgtgtccagctggaccaggggcaggacgtggaggtcgacgaggccgcgtgtgccgcgctggtccgacccgaggctagcgtcccttgcttaatcgccgactgtacctatcgctggcatgtgggcacatggatggagtgttcggtcagctgcggcgatgggatccagcgcaggagggatacctgtctgggcccacaggctcaggcccccgtccccgctgacttctgccagcacctgcctaagcccgtgaccgtcagagggtgctgggccggtccctgtgttggacaaggaaccccttctcttgtgcctcatgaggaggccgccgctcccggacgcacaaccgcaacaccggctggcgccagcctggaatggtctcaggctaggggtctattattttcacccgccccacagccacgacggcttctgcctggcccgcaagaaaatagcgtgcaatcttctgcctgtggtaggcagcacctggagcctaccggtactatcgacatgcgagggcctggacaggctgattgtgccgtggccatcgggagaccccttggcgaagttgttacccttcgagtcctggagtcgagtctgaactgtagtgccggggacatgctgttactctggggtaggctcacttggcgcaaaatgtgccggaagttgttggatatgactttcagttcaaaaactaacacccttgttgtgagacagcgatgtggccgccctggaggaggtgtccttctccgctacggatcacagctcgcacccgaaaccttctacagagagtgcgatatgcaactttttgggccatggggcgaaatcgtgagcccctctctgtcccccgctacgtccaacgcggggggctgccggttgttcatcaatgtcgctccccacgcgcgaatcgcgatccatgcgctggctactaacatgggagcaggtaccgaaggtgcaaacgcctcttatattcttatacgagacacccacagtctaagaactactgcctttcatggccagcaggtgctatactgggaatccgagtccagccaggcagagatggagttcagcgagggatttttgaaggcccaggcatcattgaggggtcagtactggactttgcagtcgtgggttccggaaatgcaggaccctcagtcatggaaaggaaaggaggggaca

SEQ ID NO: 5659 - DNA, 4281 bp, synthetic construct
  misc_feature 1..4281: note = source = /note="Description of Artificial Sequence: Synthetic coding sequence"
  source 1..4281: mol_type = other DNA
atgcatcagcgccacccccgcgcaagatgtcccccgctatgtgtcgccgggatcctggcctgcggcttccttctggggtgctgggggccgtcccacttccagcagagttgcctccaagcgctggagccgcaagctgtcagcagctacctgtcgccgggggcccccctaaagggtcggcctccctctccgggctttcaacgtcagagacagagacagagaagggctgccggtgggatcttgcatttggaactgctggtggccgtggggcctgatgtctttcaggctcaccaggaagacacggagagatatgttctgacaaacctcaacattggggcggagctcctgcgtgatccatctctgggggcgcagttcagggtccacctggtgaagatggtgatcctcacggaacctgagggcgctccaaacatcaccgccaatctgacctccagtcttctgtctgtttgcggatggagtcagaccataaaccctgaggacgacacggatccagggcacgcagatttggtactgtacattacacgtttcgatctggaacttcccgatggcaacagacaggttaggggagtgacacagcttggcggggcttgtagtcccacctggagttgcctcatcacagaggacacaggattcgaccttggcgtgacaatagcccatgagataggtcactccttcggactggagcacgacggtgctcctggaagtggctgcgggccgagcggccacgtgatggccagcgacggggcggctcccagagcgggcctggcctggtcaccgtgctctcggaggcagctgctttccctgctgtctgccggtcgggcgcggtgtgtgtgggatccccctcggccgcagcctggatcagctggacacccccctgatgcacagcccggactgtattattccgctaatgagcagtgtcgggtggccttcggacctaaagcagtggcctgtacgttcgccagagaacacctggacatgtgccaagcgctgtcctgtcacacagacccccttgaccagagctcctgcagtagacttcttgtcccgcttctcgacgggactgagtgcggcgtcgaaaaatggtgttccaagggaagatgcaggtcactggtggaactgaccccaatcgcagcagtgcacgggaggtggagctcctggggaccccgttcaccttgctcccggtcttgcggagggggcgtcgtgacgaggcgccggcagtgtaataatcctcggccggcgtttgggggcagggcctgtgttggcgctgacctccaggcggagatgtgcaatacccaggcttgtgaaaaaactcagcttgaattcatgtctcagcaatgtgcacggacagatggacagcccttaagaagttcccccgggggggctagcttctatcactggggtgcagccgtgccccatagccaaggggacgcactttgcagacatatgtgcagggccatcggcgagagctttattatgaaacgcggggacagcttcctggacggaacgcgctgcatgccatccgggccacgagaggatggaacgctgtccttatgcgtcagcggctcttgtcggacattcggatgtgacgggagaatggattctcaacaggtctgggacaggtgccaggtgtgtggtggggataacagcacctgttccccacgcaaaggaagctttacagccgggagggcgcgagagtacgtgacgttcctcactgtaacacccaatcttacctctgtgtatatcgcgaatcacaggcctctcttcactcacctggctgtccgcatcggaggaaggtacgtggtggcagggaaaatgagtatctccccaaacactacctatccctcgctgttggaggatggaagggtggaatatcgcgtcgccctgaccgaagaccggctgccccggctagaagaaattcgaatctgggggcccctgcaagaggacgccgacatccaagtgtatagaaggtacggggaggagtacgggaaccttacccggccagacattaccttcacctatttccagccaaagcccaggcaagcctgggtctgggctgcagtgaggggcccttgttctgtcagctgcggggccggcctccggtgggtaaattattcctgtttggaccaggcgcggaaggaacttgttgagaccgtccagtgtcagggatctcagcaaccccccgcctggcctgaggcttgcgtgctggagccttgcccgccatactgggccgtgggggatttcgggccgtgttccgcgtcttgcggcggcggcctgagggagcggccggtgcgctgcgtcgaggcacagggctccctcctgaagaccctccctcccgcccgatgcagggccggagcgcagcagcccgcagtggcccttgaaacatgcaatccccagccttgtcccgccagatgggaagtgtctgaaccctcctcctgcacgagcgcgggcggggcaggacttgctttggagaatgagacctgtgtccccggcgccgacgggctagaagcccctgtgactgaaggccccgggtccgtggatgaaaagctaccggcccctgagccctgcgtcggaatgtcgtgcccccccggatggggccatctagatgccacctcagctggagagaaggcaccgagtccctgggggagtatcagaacgggggctcaggctgctcacgtgtggacccccgccgccgggtcctgtagcgtgtcctgtggcaggggtctgatggagctcaggttcctgtgtatggacagcgcactccgggttccggtgcaagaggaactttgcggactggcttccaagcctgggtcacgccgcgaagtctgccaggctgtgccctgccccgcaagatggcaatataagctcgccgcctgttccgtaagctgcggccggggggtcgtgaggaggattctgtattgcgcccgcgcccacggggaggatgacggggaggagatcctcctcgatacccagtgtcaaggcctgccaaggccggagccacaggaggcctgcagcctggaaccttgtcctccacggtggaaagtgatgtccctaggaccgtgcagcgccagctgcggcttaggcacagcaaggcgctcggtggcctgcgtgcagttggatcagggacaggatgttgaggtggatgaagctgcatgtgctgccttagtccggcctgaggcctcagtcccttgcttaatcgccgactgtacctacagatggcatgttggcacatggatggagtgttccgtgtcgtgtggcgatggtatccagcgtcgacgcgacacctgcctgggtccccaggcccaagctccagtcccagcggacttttgccagcacttacccaagcccgtcaccgtgcggggatgctgggctggaccatgtgtcggacaaggtacccctagtctggtgcctcatgaagaggccgccgcacccggcagaactacggccacacccgctggggcatctctcgaatggtctcaggcccggggactcctgttcagcccggcccctcagcctcgtaggctgctgcccggcccccaggaaaattcagtgcagtccagcgcctgcgggagacagcacctggagcctaccggcactattgacatgcgtggtcctgggcaggccgactgtgctgtggctatcggtagaccccttggcgaggtggttaccctcagagtcctggaatccagcctcaactgtagcgcaggagacatgcttctgttgtgggggcggttaacctggaggaaaatgtgtcgcaagctgttggatatgacattttcaagcaagactaacacgctggtcgtcagacagcgctgcggccgccccggcggcggagtactgctacgttacggtagccagcttgcccctgaaactttctaccgcgagtgcgacatgcaactgttcggcccttggggggagatagtgtctccatccctgtctccagctacctctaatgcaggcggttgcagactgttcatcaatgtcgctccccatgcccgcatagccatccatgcgctcgctacaaatatgggcgccggcaccgaaggcgccaatgcttcctacatccttattcgagacacacacagtttacgcactacagcattccacggacagcaggtgctgtattgggagtctgagagctctcaggccgagatggagtttagcgaagggtttctgaaggcccaggcgtcgctaagaggtcagtattggaccctccagagctgggtgcccgagatgcaggacccacagagctggaagggcaaagagggaacc

SEQ ID NO: 5660 - DNA, 4281 bp, synthetic construct
  misc_feature 1..4281: note = source = /note="Description of Artificial Sequence: Synthetic coding sequence"
  source 1..4281: mol_type = other DNA
atgcatcaacgccatcccagggcaagatgccccccactttgtgtagcaggaattcttgcatgtggattcttgctgggttgctggggacctagtcactttcagcaatcctgcctgcaagctcttgagccgcaagccgtatcatcctacctgtcgcccggggccccgttgaagggacgtcctccgtcgccgggattccagaggcaaaggcaaaggcaacggcgtgccgctggaggtattctgcatcttgaacttctcgtggccgtgggaccagatgtatttcaagctcatcaggaggacactgagcgttatgtactgactaaccttaatataggtgccgaacttctacgagatccatccttgggcgctcagtttagagttcatcttgtgaaaatggtgatcctaacggagcccgaaggggcaccgaacattaccgcaaatctgacttcaagtttgttgtcagtgtgtggatggtcgcagacaattaatcctgaagatgatacagatcctggacacgctgatttggttctttatattacacgtttcgatttggaacttccagacggaaaccgccaagtgagaggagtgacgcagcttggaggcgcttgttctccaacgtggtcttgtttaattaccgaggataccggttttgatcttggagtgacaatcgcacatgaaattggtcattcttttggattggaacatgacggggcaccaggaagtggatgcggaccatctggacatgtcatggcttcagatggggcagcaccacgggcaggtctcgcttggtcaccatgcagtcgaagacagttgctctctcttcttagtgctgggcgcgcacgttgcgtctgggacccaccaaggccacagcctggatcagctggccatccccctgacgcccagcctggtctctactatagtgctaatgaacagtgcagggttgcctttgggcctaaggctgtggcatgcactttcgcccgtgagcaccttgatatgtgtcaggcactgtcttgccacacagatcctttagatcagtcatcgtgcagccggttactcgtgcctcttctggacggtactgaatgcggtgtagagaagtggtgtagcaaggggaggtgtagatctctcgttgaattgacacctatcgcagctgttcatggacggtggtcttcatggggcccgcgtagtccatgttctcgttcttgtggggggggtgttgtgacgagaaggaggcaatgcaacaatccaagaccagcatttggtggcagagcttgcgtgggtgcagatttacaggcggaaatgtgcaatactcaagcctgtgagaaaactcaactggagtttatgtcgcaacaatgtgctcggaccgacggtcagccactaaggtcttcccccgggggagcctccttctatcactggggagccgcagttccacattctcagggggatgcactctgccgacacatgtgtagagcaataggtgagagtttcatcatgaaaagaggtgactccttcttagacgggactagatgtatgcctagcggtccaagggaagacgggactttgagtctttgcgtgtctggttcctgtaggacatttggttgcgatggtagaatggattcgcaacaagtatgggaccgttgccaagtttgtggtggcgataatagcacgtgctccccccggaagggttccttcaccgctgggagggcccgcgaatatgtcacattcttgactgttactccaaatctaacatcggtgtatatagccaaccatagacctctattcacacatcttgctgttagaattggaggtcgctatgttgttgcaggaaaaatgtccatttctcctaatactacctatccatccctcttggaggacggacgggtggagtatcgggttgcattaaccgaagatcgtcttcccaggcttgaagagattagaatatgggggccattacaagaagatgctgatatccaggtctatcgtcgttacggggaggagtatgggaacttaactaggcctgatattacctttacttacttccagcccaagcctaggcaggcctgggtatgggccgctgtacgtggaccatgctctgtgtcgtgcggtgcaggacttcggtgggtaaactactcatgcctcgaccaagcccgaaaggagttggtggagactgttcagtgtcaaggctcgcaacaacctccagcatggcctgaggcttgcgtgttagaaccttgtccgccatattgggcggttggcgattttggaccttgctccgcatcctgtggcggtgggttaagagagcgacccgtgagatgcgtagaagcacaaggttcactgctaaaaactttgccacctgctcgatgtagagctggggcacagcagcctgctgttgctcttgagacttgtaatcctcagccatgcccagcccgctgggaggtttccgagccaagcagttgcacaagtgccgggggagctggacttgccttagaaaatgaaacttgtgtccctggtgctgacggtcttgaggctccagtgaccgaaggccctggatctgttgatgaaaaacttccagcacctgaaccttgcgtggggatgtcctgtcctcctggttggggtcatttagacgcaaccagtgcaggggagaaagcaccatctccctggggttcgatcaggaccggggctcaggctgctcatgtttggactcccgctgctggatcctgctcagtgtcttgcggaagggggctgatggagcttcgattcctttgcatggattctgcgcttagagtcccagttcaggaagaactgtgcgggcttgctagcaagccgggttcacgtcgagaggtttgccaggctgtcccttgtccggctagatggcagtataagttggctgcctgtagcgtgagctgtgggaggggggttgtgcgtcgtattctctattgtgcgagggctcacggtgaagatgatggtgaagagattttgctcgatactcaatgccaaggattgcctcgccccgagcctcaggaggcctgttctttggaaccatgcccgccccgatggaaggtaatgtcactcgggccatgttctgcaagttgcggtttgggtactgctaggcgtagcgtggcctgtgtacaactggatcagggacaagacgtcgaggttgatgaggctgcatgtgctgcactcgttcgacccgaggcaagcgtgccgtgtttgatagctgactgtacttatcgctggcatgttggtacctggatggaatgcagcgtttcttgcggtgatgggattcaaagaagaagagatacatgcttgggtccacaggcccaagctcctgttccagcagatttttgccagcatttgccaaaacctgtaacagtcagggggtgctgggccggcccttgtgtcggtcagggtactccgtcgttggtgccacacgaggaagccgctgctcctggccgaactacagcaacccctgctggagctagtctggagtggtctcaggctagaggccttcttttctccccagccccccagcccagacggctcttgccaggtcctcaggagaacagcgtgcaaagtagtgcctgtggaaggcagcatttagaacccaccggtactatcgacatgcgcggaccaggtcaggctgactgcgctgtcgctattggaagacctctcggtgaagttgttaccctgcgagttcttgaaagcagcctaaattgtagtgcaggagatatgttgcttctgtggggtaggctgacatggaggaaaatgtgtcgtaagctactggatatgacgtttagttctaaaacgaatacgctcgtggtccgtcagaggtgcggtagacctggaggtggagttcttttgaggtatgggtcccaactcgctccggaaacgttttatagagaatgtgatatgcaactttttggcccatggggtgaaatcgtttcaccctctttatctccagctacatccaatgcaggaggttgcaggctctttatcaacgttgcccctcatgcgcgcattgcaatacatgcacttgccacaaacatgggcgcgggcacagaaggagccaacgcctcttatatactaatacgtgatacccattcccttcggactaccgcctttcacggacagcaagtactctactgggaatcagaatcctctcaggctgagatggagttcagcgaaggatttctgaaggcccaggctagcctgaggggtcagtattggacattacagtcctgggttcccgaaatgcaggaccctcagtcctggaaggggaaggagggtaca

SEQ ID NO: 5661 - DNA, 4281 bp, synthetic construct
  misc_feature 1..4281: note = source = /note="Description of Artificial Sequence: Synthetic coding sequence"
  source 1..4281: mol_type = other DNA
atgcaccaacgtcatccgcgggcgcggtgtccccccttgtgcgtagcaggcatcttagcttgcggtttcctgctgggatgctggggaccctcgcatttccaacagtcttgcctccaggccctggagcctcaggccgtttcaagctacttatccccaggcgccccactgaaaggcagaccccccagcccaggctttcaacgtcagcggcagagacagcggagagctgctggagggatcctccacctggaactcctggtggcagtcggtcctgatgtttttcaggcccatcaggaggatacggagcggtacgtcctcaccaacctgaacattggggccgagctgctcagggatccgagcttaggagctcagttcagggtccacctggtcaaaatggtaatactgacggaaccagagggggccccaaatatcacagcaaatctgacatcttccttgttatccgtatgcggttggagccagaccatcaaccctgaagacgacaccgatccgggacacgctgaccttgtcctgtatatcactaggtttgacctggagctccccgatggaaatcgacaggtgagaggcgtgacacagctgggcggggcttgttcgcccacatggagctgcttaataaccgaagataccggatttgatcttggggtgacgatcgctcacgaaataggacattccttcggtctggagcatgacggcgcccctggttcaggctgcggccccagcgggcatgtcatggcaagtgatggagctgccccccgagcaggtttggcctggtctccctgttcaaggcggcagcttctaagtctgttgtccgccgggagagcacgctgcgtgtgggaccctccacggccacaacccggctcggccgggcatccaccggatgcacaaccaggattatactacagtgcgaatgagcagtgccgggtcgcgttcggtcccaaggccgtggcatgtacctttgctcgggaacacctggacatgtgccaggccctgtcgtgtcacacagaccctttggaccagtccagctgcagccggctgctggtacccttgctggatggaacggagtgcggagttgagaaatggtgtagtaagggacggtgccggagcctggtggagctgactcccattgccgcggtgcacgggcggtggagttcctggggccccaggtcaccgtgctctaggtcatgtggcgggggagttgtgacaagacgaagacaatgtaacaatccaaggcctgcgttcggcggaagggcgtgtgtgggcgcagatctgcaggctgagatgtgcaatacccaggcctgtgaaaagactcaactggaattcatgagtcaacagtgtgccagaacggacggccaacctctgcgctcctctccgggcggtgccagcttttatcactggggggctgctgtaccacattcacaaggtgatgccctgtgtaggcacatgtgtagagctatcggggagagctttattatgaaaagaggagattcgttcttggacggcaccagatgcatgccaagtggtccaagagaggatggaactctgagcctatgcgtaagcggttcttgtcggaccttcggatgcgacggccggatggattctcagcaggtttgggaccgctgccaggtgtgcggcggcgacaactctacgtgttcaccaaggaagggaagcttcacggcgggacgtgcacgcgagtacgtcacttttctcacggtgactcccaacctgacctcagtgtatattgccaaccataggcctctgtttacccatctcgccgtccgaattggggggaggtacgtggtggcaggaaagatgtcaatttcccctaatactacatatccctccctgctggaggacggcagggtagagtaccgggtggcactcaccgaagatcgattgcctcgtctggaggagattagaatctggggtcctctgcaggaggatgccgacatccaggtctataggcgctatggggaggagtacggcaatctcaccaggcctgacataacttttacttactttcagcccaaaccacggcaggcttgggtgtgggcagccgtgcgcggaccctgttcagtctcgtgtggggccgggcttcggtgggtaaactattcttgtttagatcaagcccgcaaggaattggtggaaacagtgcagtgccagggaagtcaacagccccccgcctggccagaggcttgcgtcttggagccatgtcccccctattgggccgtgggagacttcggcccatgttccgcgtcatgtggtgggggtttgcgcgaacgacccgttaggtgtgtggaagcccaggggtctcttctcaaaaccctgcccccagctcgctgtcgcgcgggcgcgcagcagcccgcggtggcactcgagacctgcaaccctcagccctgccccgctagatgggaagtttcagagccgtcatcatgtacctccgccggaggtgctggtttagcactagagaatgaaacatgtgtgccgggggccgacgggcttgaggctcctgtgaccgaagggcctggctccgtcgatgagaaacttcctgctcccgaaccatgtgtaggtatgagctgcccgccagggtggggtcacctagacgcaacttcggcaggtgagaaagctcccagcccctggggctccattaggaccggggcacaagccgcccacgtatggacccccgccgccgggtcctgttctgttagttgtgggcgcgggctgatggagttacgcttcttgtgcatggactctgctctgcgagtcccagtgcaggaagaactatgtggactggcctccaaacccggttctagacgcgaagtatgtcaggctgttccatgtccagcaagatggcagtacaaactggctgcatgtagcgtgagctgtggccgtggcgtagtgaggaggatactgtattgcgctcgtgctcacggagaagatgacggggaagagattctgctagatacgcagtgtcagggactgccccgccctgaaccacaggaggcctgttccctcgagccatgcccccctcggtggaaggtcatgtcattgggaccttgcagtgccagctgcgggttgggaactgctaggcgctccgtggcttgcgttcaactagaccaggggcaagacgtagaggttgacgaagccgcttgcgcagccctcgtccggcccgaggctagtgtcccatgcttgattgctgattgtacataccggtggcacgttgggacttggatggaatgttcagtgagttgcggcgatggcattcaacgtcgccgggacacctgccttgggccacaagcccaagcaccagtccctgcggacttctgtcagcacctgccaaagcctgtcaccgtgcgagggtgttgggccggaccctgtgtgggccagggaaccccgagtctcgtgccacacgaggaagctgcagcacccggcagaaccactgctaccccggccggcgcctcactggagtggtcacaagccagaggtctcctcttctcccctgcccctcagccccgacgcctgcttccaggacctcaggagaattctgttcaaagctcagcctgcggccggcagcacttggagcctacaggcactatcgacatgcgcggccctggccaggccgactgcgccgtagcgattggacgacccttgggcgaggtcgttaccctgcgagtgttggagagttctctgaactgctctgcgggggatatgctgctgctatggggacgacttacatggcggaagatgtgtcgtaaactgctggacatgacatttagctctaagaccaataccctagtggttagacagcgctgtggtcgccccggggggggcgtcttactgagatacggcagtcagctcgctcctgagacattctatcgggaatgcgacatgcagctgtttggaccatggggagaaatagtgagcccgagcttgtcacccgctacttccaatgccggtgggtgtcggctgtttatcaacgtggcacctcacgcaagaatcgcaatacacgccctggccacaaacatgggtgcggggaccgaaggggcaaacgctagctacattctgatcagagacacacattctctgcgaaccactgcgttccatggccagcaagtcctgtactgggaatccgaatcgtcgcaagccgaaatggaattctccgaaggcttcctgaaggcccaagctagcctgaggggacagtattggacacttcagagttgggttccggagatgcaggacccccaatcttggaaaggcaaggagggaaca

SEQ ID NO: 5662 - DNA, 4281 bp, synthetic construct
  misc_feature 1..4281: note = source = /note="Description of Artificial Sequence: Synthetic coding sequence"
  source 1..4281: mol_type = other DNA
atgcaccaaagacacccccgggcaagatgccccccactgtgtgtcgcaggaattcttgcatgcgggtttctcctgggatgttgggggccaagtcactttcaacagtcgtgtctccaggcactggagcctcaagcagtgtcgtcctacctctcacctggagcccctcttaagggccgcccaccaagccctggatttcaaagacagagacaacggcaaagaagagcagcaggaggtattcttcacctggagctgcttgtggcagtgggtccggatgtgttccaggcacaccaagaagataccgaacgctacgtactgactaacctcaatataggagcagaattgcttcgggatccttcgctgggtgcacagtttagagtgcaccttgtcaagatggtcattcttacggaaccagagggcgccccaaacattaccgcgaatttgacctcatcccttctttcggtgtgtggatggagccaaactattaaccctgaggatgataccgatccaggtcatgcggatcttgtgctttacattaccagatttgatcttgaactgcctgatggcaaccggcaagtgcggggcgtgactcagctggggggcgcatgttcgcccacctggtcatgcctgatcacggaagataccgggtttgacttgggtgtgaccatcgcccatgaaatcggccattccttcggcttggagcatgatggagcgcctggatccgggtgtggaccttcgggacatgtgatggcatccgatggggcagcacctcgtgccgggctggcatggtccccatgttccaggcggcagctgctttctcttctgtccgcaggcagggcaaggtgcgtgtgggatccgccccgtcctcaacctggaagcgccggacatcctcctgatgcccaacctggactctactactcggcaaacgaacagtgcagagtcgcgttcggcccgaaggcagtggcatgtacctttgcacgggagcatctggatatgtgccaagccctgtcctgtcatactgaccctctggaccagtcatcatgctcgcgcctgctcgtcccgttgctggacgggactgaatgcggagtcgaaaaatggtgttcaaagggccgatgtaggtccctggttgaactcacgccaatcgcagcggtgcatgggcgttggtccagttggggtccaagatcaccctgttcgagatcctgcggtggtggtgttgtgactcgtagacgtcagtgcaacaaccctcgaccagcattcggcgggagggcatgcgtcggagcagatcttcaggcagaaatgtgcaacacgcaagcatgtgaaaagacccagctcgagtttatgtcacagcagtgcgctagaactgacgggcagccattgagatcgagtcccggtggagcatccttttatcattggggggcagcagtgccccattcgcagggagatgcactttgcagacatatgtgtcgggctatcggagagtcgttcattatgaagcggggtgacagctttctggacggtactagatgtatgccgtcaggaccaagagaagatggtactctctcactttgtgtgtcggggtcgtgcaggacttttggttgcgacggtagaatggatagccaacaggtttgggaccggtgccaagtgtgtggaggtgataactccacctgttcgccacggaagggttcattcaccgcagggagggcacgtgagtacgtcacttttctcaccgtgacccctaatcttaccagcgtgtacatcgcgaatcacagaccgctttttacccacctggcagtccggatcggaggtcgctatgtggtcgctggcaaaatgtccatatcacctaacaccacgtacccttcactgctcgaagatggacgagtcgagtacagagtggcccttacggaagataggctgccccggctggaagaaataagaatctggggtccacttcaagaggatgcggacattcaggtgtacaggagatacggagaagagtacggaaacctgacccgacccgatatcaccttcacctacttccaaccaaagcccaggcaagcatgggtctgggcagccgtgagaggtccctgctcagtctcctgcggtgccgggcttcggtgggtgaactacagctgcctcgaccaggcccgcaaggaacttgtggaaaccgtccaatgtcaaggctcgcagcagccgcccgcatggccggaagcatgcgtcttggaaccgtgtcctccttactgggcagtgggcgatttcggaccatgtagcgcctcgtgtggcggcggactgagagagcgccctgtgcgctgtgtggaggcacaggggtcgcttttgaaaacgctgcccccagcacgatgtcgcgctggtgctcaacagccagcagtcgctctcgaaacttgcaatccccaaccatgcccggcccggtgggaagtgtcggagccatcctcgtgcacctccgcagggggcgcaggtctggcacttgagaacgaaacgtgtgtgcctggtgctgatggtcttgaagcaccagtcaccgaaggcccaggatccgtcgatgaaaaactccctgcacctgagccttgtgtcgggatgtcatgcccaccgggatggggacatctcgacgcgacttcggccggagagaaggcaccaagcccttggggatcgattcgtaccggagctcaagcagcacatgtctggaccccagcagcaggatcatgttcagtctcctgtggaagagggctcatggaacttcgtttcctgtgcatggactccgcactccgcgttcctgtgcaggaagaattgtgcggcctggcctcaaagcctgggtcacggagagaggtgtgtcaggccgtgccttgccctgctcgatggcaatacaagctggcggcgtgctccgtgtcatgtggacgcggcgtggtccggagaatcctctactgcgccagagcacacggagaagatgatggagaagaaatactgcttgacacccaatgtcagggacttccccgtccggaaccacaagaggcctgttccctggaaccttgtccaccacggtggaaagtgatgtcgcttgggccatgttcggcaagctgcggtttggggaccgcccgacggtcggtcgcctgcgtgcagcttgatcagggccaggacgtggaagtggatgaagcggcgtgtgcagcccttgttaggcccgaagcatccgtgccatgtctcatcgcagattgtacttacagatggcacgtcggcacttggatggaatgctctgtgtcatgtggcgatggaatccagcgtagacgggatacttgcctcggaccacaggcccaagcaccggtgcctgccgatttttgccaacacctgccgaagccagtcactgtgcgtggttgctgggcaggaccatgtgtcggtcagggtactccgtcccttgtgccacatgaggaagctgcagcacctggcagaaccactgcgaccccagccggggccagccttgaatggtcacaagcaagaggtctgctgttttccccagccccacagccaagacgcctgctgcccggacctcaagaaaactcggtgcagtcctccgcatgtgggagacaacacctcgagccaaccgggaccatcgatatgcgcggcccaggacaagcagactgcgcagtggcaattggacgaccactgggagaagtggtgacgcttcgggtgcttgaatcgtcgctcaattgctccgcaggcgatatgcttcttctttggggacggcttacttggcgcaagatgtgccgtaagctgcttgacatgaccttcagcagcaagactaataccctcgtcgtcagacaaagatgcggacgcccaggtggaggcgtcttgcttaggtatgggtcgcaactcgcccctgagacgttttacagagagtgtgatatgcaacttttcggaccttggggtgaaatcgtttccccatcgctcagcccagccacttccaacgcgggaggatgtcgcttgttcatcaatgtcgcccctcacgcgcgcattgcaattcacgcacttgcaaccaatatgggagcaggcactgaaggtgcaaacgcaagctacattctgatacgtgatacgcatagcctccgaactactgcattccacggccaacaagtgctttactgggagtcggaatcgtcccaggcggagatggaattctccgagggcttccttaaggcgcaagccagccttcgcggccagtactggaccctgcagagctgggtgcctgaaatgcaagatccgcaatcgtggaagggtaaggaaggaacc

SEQ ID NO: 5663 - DNA, 4281 bp, synthetic construct
  misc_feature 1..4281: note = source = /note="Description of Artificial Sequence: Synthetic coding sequence"
  source 1..4281: mol_type = other DNA
atgcatcaacggcatccacgggctcgttgtcctcctctttgcgtggccggaatcctcgcatgtggttttctcctgggatgttggggtccctcgcattttcaacagtcctgcctgcaagcacttgaacctcaggcagtctcttcatacctttcgcctggagcgccacttaagggacgaccgcctagcccgggttttcaacgtcaacggcaaaggcagagacgagcagctggtggtattcttcatttggaactgcttgtggcagtcggacctgatgtgtttcaggcacaccaagaagatacggaacgttacgtgttgaccaaccttaacataggcgcagagcttctgcgtgacccgtcacttggtgcccaattccgagtgcaccttgtcaagatggtgatcctgactgagcctgaaggcgcacccaacatcactgcgaacctgacgtcatccctcctttcggtgtgtggatggtcacaaactattaacccggaagatgatactgatcctggtcatgcagatcttgtgttgtacattaccagattcgacctggagctccctgacggaaaccggcaagttcggggtgtcactcaactggggggtgcctgctcaccaacctggtcatgtctgattacggaggacaccggatttgatctgggggtgaccatcgcacatgagattggccacagctttggtcttgaacatgacggagcaccagggtccggatgtggaccttcaggccacgtgatggcaagcgacggggcggccccacgcgcaggcctggcatggtcgccatgttccagacggcaactgttgtcgctgctgagcgccggtcgggcacgctgtgtttgggatccacccagacctcaacctggatcggcgggacatccaccagatgcccaaccaggactttactactctgccaatgaacagtgtagagtggctttcggcccaaaggcagtggcctgtactttcgcaagggagcatctggatatgtgtcaagccctgtcgtgccatactgatccacttgatcaatcctcttgttcacgtcttttggtgcctcttctcgacggtaccgaatgcggtgtggagaaatggtgttccaagggacggtgccgctcgctggtggaactgaccccaatagcagcggtccatggaagatggtcgtcgtggggtcctcgctcgccctgtagccgatcgtgtggtggtggcgtagtgaccagacgcaggcagtgcaataacccacgtcccgcttttggtggacgagcgtgcgtgggggctgacttgcaggcagagatgtgtaacactcaggcttgcgaaaaaacccaacttgagtttatgtcccaacaatgtgcacgtaccgatggccaaccccttcggtcatcccctggtggcgcatctttttaccactggggtgcagccgtcccacactcgcaaggggatgctctgtgtcgccatatgtgccgtgcaattggtgaaagtttcataatgaaacggggcgattcattcctggatggaactcgctgtatgcctagcggaccaagagaggacggaaccctttcgctttgtgtgtccgggtcctgtcggactttcggatgcgacggacggatggattcgcagcaagtctgggaccgctgtcaggtgtgtggaggcgataacagcacttgtagccctcggaaaggatccttcacggctgggcgcgcgagagaatacgtcaccttccttaccgtgacgccgaacctgacctcggtctacatagcaaatcacagacccctgttcacccatttggctgtaagaatcgggggaaggtacgtcgtggcgggaaagatgagcattagcccaaatactacctacccatcgcttcttgaagatggtagagtggaataccgagtcgcgcttaccgaggacagactgcctagacttgaagagattaggatttggggtcctctccaggaggacgcggatattcaagtgtaccgaaggtacggagaagaatacggtaacttgaccagaccggatattacctttacctactttcaaccaaagccaagacaggcttgggtctgggcagccgtgcgcggtccatgctcggtgtcctgtggtgccggtctgagatgggtgaactattcctgtctggatcaggcgcgcaaggaactggtcgaaaccgtgcagtgtcaaggatcccagcaaccacctgcatggcccgaggcgtgcgttctggaaccgtgccctccatattgggccgtgggagactttggtccctgtagcgcatcatgtggcggaggacttagagagaggcctgtgaggtgcgtggaagcacagggttcacttcttaagactcttccacccgcaaggtgcagagcaggggcccagcagccagcagtggccttggaaacttgtaatccccagccttgtccggctcggtgggaagtctccgaaccttcatcctgtacgtccgcagggggagcgggccttgcgctggagaacgaaacctgtgtcccaggggcagatggtctggaggcaccagtgaccgaaggacctggttccgtggatgaaaagctgccagcaccagagccatgtgtgggaatgtcatgtcctcctggttggggccatctggatgcaacctcagcgggtgaaaaggcaccttcgccttgggggtccatcagaactggtgcccaagccgcacatgtctggacccccgcagcgggttcatgttcagtgtcctgcggccgaggactcatggaattgagattcctttgtatggactcagcactgagggtgccggtgcaagaggagctgtgcggactcgcgagcaaaccaggatcgaggcgggaagtgtgtcaggcggtgccctgtccggctcgatggcaatacaagctggcagcatgtagtgtgtcgtgtgggagaggggtcgttaggagaatcctgtattgtgcccgcgcacacggggaagatgacggagaagagatactgttggatactcaatgccaaggtctgcctcgcccggaacctcaggaggcttgttcattggaaccttgtccgccccgatggaaagtgatgtccctcggaccatgctccgcgtcatgcggactcggtactgccaggcggtcggtggcatgcgtgcaactcgaccagggtcaggacgtcgaagtggatgaagcagcgtgcgccgcacttgtgaggcctgaggcctcggtgccttgcctcatagcagattgtacttatagatggcatgtcggcacttggatggaatgttccgtgtcctgtggagacggcattcagaggcggcgggatacttgtttgggccctcaagcccaagcaccagtgcctgcagatttctgtcagcatcttcctaaacctgtcacggtcagaggatgttgggcaggaccatgcgtcggtcaaggaaccccatcgcttgtcccgcatgaagaggcggcagcacccggacgtaccactgcaacccctgcaggagcttcccttgaatggtcccaagcaagaggcctgcttttttctcccgcaccacagcctcgcagacttctgcctggtcctcaagagaattcggtgcaatcctccgcatgtggacggcagcatcttgaaccaactggaacgatagatatgagagggcctggacaggccgactgtgcagtggcaattggacgcccacttggggaagtcgtgacgctgcgggtgctggaatcatcactgaattgttctgcaggagatatgctcctgctttggggccggctcacttggcgaaaaatgtgtagaaagctgctggatatgactttctccagcaaaaccaatacccttgttgtgagacagcgatgtgggcgaccaggcggaggagtgcttttgaggtacgggtcccaactggcacccgaaaccttttaccgggaatgcgatatgcagctgttcgggccttggggagaaatcgtctcgccctccctgtcacccgctactagcaacgcgggaggttgtagactgttcattaacgttgcccctcatgcacgtatagctatccacgccttggctactaatatgggagcaggcactgaaggtgcaaacgcatcttacatcttgattagagacacccattcactgaggactaccgcctttcacggtcaacaggtcctttactgggagagcgagagctcacaggcggaaatggaattctccgagggatttcttaaagcccaggcctcgctccgaggtcagtactggactttgcagtcgtgggtgcctgagatgcaagacccccaaagctggaaaggcaaagagggcact

SEQ ID NO: 5664 - DNA, 4281 bp, synthetic construct
  misc_feature 1..4281: note = source = /note="Description of Artificial Sequence: Synthetic coding sequence"
  source 1..4281: mol_type = other DNA
atgcatcaacggcacccacgggccaggtgtccaccgctgtgtgtggccgggatcctcgcctgtgggttcctcctggggtgctggggtcctagtcattttcaacaatcctgcctgcaagccctcgagccacaagccgtgtcaagttacctctctcctggtgcacctctaaagggtcggcctccgtctcccggtttccagcgccaaaggcagcggcagcgccgagctgcgggagggatcttgcatctggagctgcttgtcgccgttggacccgacgtctttcaggcacaccaggaagacaccgagcggtacgtcttaaccaacctgaatatcggggctgagctgttgcgagacccttcactcggggctcaatttagagtccatttggtaaaaatggttatcttgacggagcctgaaggcgcacccaacataactgccaacctgaccagctcactgcttagcgtgtgtggatggtcccagacaataaacccagaggacgatactgatcccggtcatgcggatttggtgctgtacattacccggttcgatttggaattgcccgatggtaatcggcaggttcggggcgttacccagctgggaggcgcttgttcacctacctggtcctgcttgataactgaagacacgggtttcgacttaggcgttaccatcgcgcacgagattggacactcctttgggctcgagcacgatggcgcacccggtagcggctgcggaccctctggccacgtgatggccagcgacggggccgctccccgggccggactcgcgtggagcccatgttctcgacgacaactactttccctgttgtcggccgggagggccagatgcgtctgggatccgccccgccctcagcccggaagtgccgggcatccaccagacgctcagcctggtttgtactatagcgccaatgaacagtgcagggtcgcctttgggcctaaggctgtggcatgtaccttcgccagagaacacctggacatgtgtcaggccctctcatgccataccgaccccttagaccaaagctcctgcagccgacttctcgtgccgctgctagacggaaccgagtgcggcgtggaaaaatggtgctccaagggaagatgccgcagcctcgttgagctaactcctattgcggcagtccatggcaggtggtcttcctggggtcctcggagcccctgttctagatcgtgcggaggcggagtggtgacacggagacgacagtgcaacaatcccagacccgctttcgggggcagggcctgcgttggggctgacctgcaggccgaaatgtgtaacacccaggcatgcgagaaaactcagttagagtttatgtctcagcaatgtgccagaaccgacgggcagccactgcgaagctcaccaggcggcgcttctttttaccactggggcgctgcagttcctcattcccagggggacgcattgtgtaggcacatgtgcagagcaatcggagaaagcttcattatgaagaggggtgatagtttcctggacggcactcgctgcatgcctagcggtccgcgcgaagacggcacgctgagtttgtgcgtttcagggagctgccgtactttcggctgcgatgggcgaatggactcacagcaggtgtgggaccggtgccaggtgtgtggaggagataactctacatgttcacccaggaaaggatcatttacggcagggcgggcccgagagtatgtgacatttttaaccgtgacgccaaacttaacttcagtgtacatcgctaaccatcggccgctgttcacacaccttgccgttcgaatcggaggcagatacgtggtggcaggaaaaatgagtatctctcccaatacaacataccccagccttctcgaagatgggagggtcgaataccgggtggctcttactgaagaccgtctcccccgcctcgaagaaatcagaatttggggcccccttcaagaggacgccgacatccaggtctacaggcggtacggcgaggaatatggcaacctgacaagaccagacatcaccttcacctacttccagcccaagccacgccaggcctgggtgtgggcagccgtgcgcggcccctgtagtgtctcttgcggagcgggccttaggtgggtgaattactcttgcctggatcaggcgagaaaggagctggtggagacggttcagtgccagggatcacagcagcccccagcgtggccggaggcctgtgtgctggaaccttgcccgccgtactgggctgtcggcgattttgggccctgcagcgcaagctgcggcggcggcctaagggaacgtcctgtccgctgcgtggaggctcagggatctttgcttaagacactgcctccagcaagatgccgcgctggagctcagcagcccgcagtggcactagagacgtgcaatcctcaaccatgccctgcacggtgggaggtgtctgagcctagcagttgcacatctgcaggaggcgccggcctcgcactggagaacgagacttgcgtccctggtgcagacggcctggaggcccccgtaaccgagggccctggaagtgtcgatgagaagctcccagctcctgagccatgcgtcggaatgtcgtgcccacccggctggggacacctggatgccacttccgcgggagaaaaagccccgtctccctggggctccataaggacaggcgcacaggccgcacacgtgtggacccctgccgcaggatcttgttctgtgtcttgcggccggggcctgatggagctccgcttcctgtgtatggattctgcactcagagtccccgtccaggaagagctctgcgggctggcttcaaagcccgggagtagacgggaagtctgccaagctgtgccgtgccccgctcgatggcagtacaaactggccgcctgttctgtgagttgcggtcgtggcgtggtacggcgcattctgtactgcgctagagctcacggcgaagacgacggggaagaaatcctacttgacacccagtgccagggactgcccagaccagaaccccaagaggcatgttcactcgaaccttgcccgccgagatggaaagtgatgtccttgggcccctgttccgcttcttgtgggctaggaaccgctagacgctctgttgcctgcgtgcagctcgaccagggacaggacgtagaggttgatgaagcggcatgtgcagccctggtcaggcctgaggcctcagttccttgcctcatcgccgactgtacatatcggtggcacgtgggcacctggatggagtgcagcgtttcctgcggagacggtatccagaggcgccgagacacgtgcctggggccccaagctcaagctccagtgccagccgacttttgtcagcacctgcccaagcccgttaccgtcagaggatgttgggcagggccttgcgtcggacagggtacgccctccctggtccctcacgaagaggctgccgcgcctggcaggaccactgcaacccctgccggcgcctcactggagtggtcccaggcccgcggactacttttcagcccagccccacagccccggcgcctgctgccagggccccaggagaattctgtgcagagctcagcatgtggccggcagcatctcgagccaactggcaccatcgacatgcggggacctggccaggccgactgcgccgtagccattgggcgaccattgggggaggtagtaactctcagagttctggagagctcccttaactgctccgccggcgatatgctgctactgtgggggaggctcacctggagaaagatgtgtcggaagctgctggatatgactttttcctctaagacaaacaccttagtggtgagacagaggtgcggtaggcctggcggaggagttcttctgaggtatggctcccagctggcccccgaaactttctacagagagtgtgacatgcagcttttcggaccatggggtgagatagtcagcccttcactgagcccagccacaagtaatgccgggggatgtcgcctattcattaacgtcgccccccatgcgcgcatcgccatacacgcactggctacaaacatgggggctgggactgaaggcgctaatgcctcatacatccttatccgggatacacattcgctgagaacaaccgcctttcacggccagcaagtcctgtattgggagtccgagagctcacaagccgagatggaatttagcgagggctttttgaaggcacaggcatccttaagagggcaatactggacattacagagttgggtgcccgaaatgcaggatccacagagctggaaaggaaaggaaggtact

SEQ ID NO: 5665 - DNA, 4281 bp, synthetic construct
  misc_feature 1..4281: note = source = /note="Description of Artificial Sequence: Synthetic coding sequence"
  source 1..4281: mol_type = other DNA
atgcatcaaaggcacccccgcgcacgctgccctccgctttgtgttgcaggcatcctggcgtgtggtttcctgcttggatgctggggcccgtcccattttcagcaaagttgtttgcaagcacttgaaccacaggctgtgtctagctacctttcccctggggcacccctgaagggccggcctccatcgccaggttttcagagacaacgccagagacagcgtagggcggcagggggaatacttcatcttgaacttctggtggctgtgggtcccgatgtgttccaagcccatcaagaggataccgaacgctacgttctcactaacctgaacataggagcggaacttctgcgggatccatcactcggtgcacaattccgagtgcatctcgtgaaaatggtcattctgaccgaaccagaaggagctccgaacataactgcaaaccttacctcatcgctgcttagcgtctgcggttggtcgcaaactataaacccggaagatgataccgaccccggccacgctgatttggtgctctacatcactcgcttcgacctggagttgcccgatggaaaccgtcaggtgcgcggcgtgacccaattgggaggggcctgttcgcctacctggtcatgtcttattacggaagataccggatttgatctgggagtgaccatagcacacgagatcggacattcgtttgggctcgagcatgatggtgcaccaggttcgggatgtggacctagcggacatgtgatggcctcagatggagcagcacccagagcagggctggcctggagtccctgtagccgtaggcaactcttgtccctccttagcgcaggccgagcccggtgtgtgtgggaccctccaaggccgcaacccggaagcgcagggcacccaccagacgcacaaccaggcctttactattcagcgaacgagcagtgtcgagtggcctttggccccaaggcagtggcatgtacgtttgcaagggaacatcttgacatgtgtcaagcgctcagctgccataccgaccctctggaccagtcctcatgttcgcgacttcttgtgcctcttctggatggcaccgagtgtggtgtcgagaaatggtgttcaaagggacggtgccgatcgctcgtggagctcactcccattgccgcagtgcacggccgatggtcatcgtgggggcccagatcgccgtgttccaggtcctgtggaggtggcgtggtgacccggcggcgccaatgcaataatcctcggccagcatttggaggccgcgcctgtgtgggagccgacctgcaagccgagatgtgtaacactcaggcatgtgaaaagactcagttggagtttatgagccaacagtgtgcgagaacggacggacagcccctgcgttcgtccccaggtggagcatccttttaccattggggagcagccgtgccccattcacagggtgatgcactttgtcgtcatatgtgtcgcgcgattggggagagcttcattatgaagcgcggcgattcgttccttgacggcacccggtgtatgccatcaggacctcgagaagatggcactctctcgctgtgcgtgtcgggctcatgtcgtacgtttggatgtgatggccggatggacagccaacaggtgtgggatcgttgccaagtctgtggcggggataactccacgtgttctcctcgaaagggttcatttactgccggacgggcacgagaatacgtcacctttcttaccgtgacgcccaatcttactagcgtgtatatcgcaaatcaccgtcccctgtttactcatctggcggtgagaattggcggaagatacgtggtggcgggtaagatgtccatttcgccgaatactacctacccatcgcttcttgaggatggaagggtggaatacagagtggcgttgactgaggatagactgcctcgcctcgaagagatacgaatctggggtcctcttcaagaagatgcggatatccaggtgtacagaagatacggtgaggagtacggtaacctcactagacccgacattaccttcacgtacttccagcctaagcctaggcaggcatgggtctgggcagcagtgagaggaccatgttcagtgtcttgtggtgccggtttgagatgggtgaattactcatgtcttgatcaggcacggaaggaactggtggaaactgtgcaatgtcaggggagtcaacagcctcctgcgtggccagaagcctgcgtgctcgaaccatgccctccgtactgggcggtgggtgactttggaccttgctccgcctcgtgtggagggggtctgcgcgaaagacccgtgcgctgtgtggaagcacagggcagcctgcttaagacgctcccccctgctcgatgtcgagcgggcgcgcagcagccggcagtggcactggaaacctgtaacccgcaaccgtgtccggcacgttgggaagtttcggaaccatcgtcgtgcacttctgcagggggagcaggactggctctggaaaatgagacttgcgtgccaggtgcagacggacttgaagcaccagtcacggaaggacctggatctgtcgacgagaagttgcccgcacccgaaccttgcgtcggaatgtcctgccctcccgggtggggccatttggatgctacgtccgcgggagagaaggcacctagcccctggggttcgatacgcaccggtgcacaagcggcacacgtgtggactcccgcagcgggatcctgctccgtgtcgtgtggccgtggtctgatggaacttagatttctgtgtatggactcggcgctgcgggtcccagtccaagaagagctgtgtgggctcgcatcaaagccaggtagccgtcgggaggtgtgtcaggcagtgccatgtccagcgaggtggcagtacaagctggccgcatgtagcgtttcatgtggtcggggtgtggtgagaaggatcctgtactgcgcgagagcccatggggaagatgatggggaggaaatccttctggatacccaatgccagggacttcctagaccagagcctcaggaagcatgctctcttgagccatgtcctccaagatggaaggtgatgtcgctgggaccatgttcggcaagctgtggattgggtacggcgcggcggtcggtcgcgtgcgtgcagctggatcagggtcaggatgtggaggtggatgaagcggcatgtgcggctctggtaagacctgaagcatctgtgccttgtctgattgcagactgtacttaccgatggcacgtcgggacgtggatggaatgttcggtgtcctgcggggatggaatccagaggcggcgagacacctgccttggcccgcaggcacaagcaccagtcccagcagatttttgccaacatctgcccaagcctgtgacggtgagaggttgttgggcggggccatgtgtcggacaagggactccatcccttgtgcctcacgaagaggctgccgcacccggtaggactactgcaacccctgctggggcctcgctggagtggtcccaagctcgcgggcttctcttttctccagcccctcagcctcgccgcctgctgccgggcccacaagaaaactcagtccaatcaagcgcatgcggacgccagcacctcgagcccactgggaccatcgacatgagaggcccaggacaagcagactgtgcagtggcgattggacggccccttggggaggtcgtcactctccgggtgcttgaaagctcgcttaactgtagcgccggggatatgctgctgctctggggaaggctcacctggagaaagatgtgccgcaaactgctggacatgacgtttagctcaaagaccaacactctcgtcgtgcggcagcgatgcggacgacctggtggaggtgtgctccttagatacgggagccaactggcacctgaaaccttttacagggaatgcgatatgcagctcttcggtccatggggagaaattgtctccccttcgctctcaccggccacctcgaatgccgggggatgcaggctcttcataaacgtggcacctcacgcaaggattgcaattcatgccctcgccactaatatgggcgcaggtaccgaaggagcaaacgcatcgtacatcctgattagggacacccattcccttagaaccaccgcatttcacggacagcaagtgctttactgggaatcggaatcctcgcaggcagaaatggaattttcagagggatttcttaaagcacaggcctcgcttcggggacaatactggaccctgcaatcatgggtccctgaaatgcaagatccacagtcctggaagggtaaggaagggacc

SEQ ID NO: 5666 - DNA, 4281 bp, synthetic construct
  misc_feature 1..4281: note = source = /note="Description of Artificial Sequence: Synthetic coding sequence"
  source 1..4281: mol_type = other DNA
atgcaccagcgtcacccaagagcacgctgtccacccctgtgcgtggcaggtatacttgcgtgcggattcctgctgggatgctggggcccttcacatttccaacagagctgcctgcaggcgcttgaaccgcaggcagtgtcgagctatctgagccctggtgctccccttaagggacgaccacctagcccaggcttccagcggcaaagacaacgccaacgaagggcagctggaggaatccttcaccttgaactgctggtggcagtgggaccagacgtgtttcaggcgcatcaagaagataccgagagatacgtgttgactaatctgaatatcggagcggaactgctccgcgaccctagcctcggagcacaatttagggtgcatctcgtcaaaatggtcattttgacggagccggaaggggcgccgaacattactgccaacttgacgtcctctctgctttcggtctgcggttggagccagacgattaacccggaggatgataccgaccccggacatgccgatctggtgctgtacatcacccgtttcgatctggaactgccagatggaaatcggcaggtcaggggcgtgacccaattgggcggcgcctgttcgcccacttggtcgtgtctgattacggaagataccggatttgatttgggagtaacgatcgcccatgagattggtcattcgtttggactggaacacgacggggcacctggttcgggctgtgggccatcaggacacgtgatggcaagtgacggggcggccccgcgagcgggtcttgcctggtccccatgtagccgacgtcagctgttgtccctgctctccgcaggaagagctaggtgcgtgtgggacccaccgcggcctcaaccaggttccgcgggacatcctcctgacgcccagcctggactgtactactcggccaacgaacaatgtagagttgcctttggacctaaggctgtcgcatgtacgtttgcacgagagcacctcgacatgtgtcaagctctgtcgtgtcacaccgatcccctggaccaaagctcatgctcgcgtttgctggtgccactgctcgacggaactgagtgtggagtggaaaagtggtgttctaagggcagatgcaggtcattggtggagctcacgcccatcgctgcagtgcatggccgctggtcctcgtggggacctcgcagcccgtgctccagatcgtgtgggggtggtgtggtgaccaggcggcggcagtgcaacaatccaaggcctgcattcggaggacgcgcctgcgtcggggctgatctgcaagcggagatgtgtaacacccaggcgtgtgaaaaaactcagcttgaattcatgtcgcagcagtgcgcacgaaccgacgggcaacccctccgatcgtcgccaggaggagcgtcgttttaccactggggagcagccgtgcctcatagccaaggagatgcgctgtgtagacacatgtgcagagcaataggagagtcgttcataatgaagaggggagatagcttcctggacggtactagatgtatgccttcgggcccacgcgaggatggtactctctcgctctgcgtctcgggatcatgccggacttttggatgtgacggccgcatggactcgcaacaggtgtgggatagatgccaggtctgcggtggagacaactcgacctgttcacctcggaagggtagctttacggcaggtcgtgcccgcgagtacgtcacctttcttacggtgacccctaatcttacttcagtgtacattgctaaccatcggccacttttcactcatcttgcagtgagaattggtggaaggtacgtggtggcaggaaaaatgtcgatttcgcctaacaccacttacccttccctccttgaggacggacgagtggagtacagggtcgcgctgacggaagatcgcctgccaaggcttgaagaaatcaggatttggggaccacttcaagaagatgcagacatccaagtgtaccggcgctacggtgaagaatacggaaaccttactcgccctgatataacgttcacctactttcaacctaagccacggcaggcgtgggtgtgggcagccgtgcgtggaccgtgtagcgtgtcatgcggcgcaggacttcgctgggtcaactacagctgtctcgatcaggccaggaaggagctggtggaaaccgtgcaatgtcaggggtcccagcaacctccagcatggccggaagcctgtgtgctggaaccttgtcctccttactgggcagtgggagattttggtccttgctccgcatcgtgtggtggcggtcttagggaaagacctgtcagatgtgtggaagcacaaggttcgctgcttaagaccctcccccctgctcgctgccgggcaggagcccagcagccggccgtcgcccttgagacttgtaaccctcaaccatgtccggcccgatgggaagtctccgagccatcgtcctgtacctcggccggaggtgcagggctggccctcgaaaacgagacttgtgtcccaggtgccgatggcctggaagcgccagtgactgaagggccaggctcggtggatgaaaagttgccagcacccgaaccatgtgttggtatgtcttgtcctcccgggtggggtcatcttgatgctacttcggccggggagaaggcaccttccccctggggatcaatccggactggtgcacaagctgcccatgtttggactccggcagccggttcatgttccgtctcgtgcgggagaggactgatggaacttagattcctttgtatggactccgccctgcgggtgccagtccaggaagaactttgtggtcttgcctcgaaaccagggtcgagacgggaagtctgtcaagcagtgccctgcccagcacgctggcagtacaaacttgcagcttgttccgtgtcctgcggaaggggtgtcgtgagacggattctttactgtgcacgggctcatggtgaagatgatggcgaagaaatactgctggacactcaatgccagggacttcctagaccagagcctcaagaagcatgttccctggagccctgccctcctagatggaaggttatgagcctcggcccttgcagcgcatcctgtggcctcggaaccgcaagaagatccgtggcatgcgtgcagttggaccagggccaagacgtcgaagttgatgaggcagcatgtgcagcgcttgtcagaccagaggcatctgtgccatgtctgattgcagattgcacctatcgctggcatgtgggcacctggatggaatgctccgtcagctgcggagatggaatacagcggagacgagacacttgccttggtccacaggcccaggcccccgtgccagccgatttttgtcagcacctgcccaagccggtgaccgtgcggggttgctgggcaggtccttgtgtcggtcaaggaaccccatcactggtcccgcacgaagaggcagcggcaccaggtcggaccaccgccaccccagcaggagcatcactggaatggtcccaagcccgaggcctgttgttctcacccgcaccccaaccaagacgactcctccctggaccacaagagaactcggtgcagtccagcgcatgtggacggcagcatttggaacctacgggaacgattgacatgaggggtccaggacaagccgattgtgctgtggcaatcggtcgtccacttggtgaagtggtgactctccgggtgctggaatcatcactcaactgcagcgcgggtgatatgctgcttctgtggggcaggttgacttggagaaagatgtgtagaaagctgctggatatgaccttttcatccaaaactaatactctggttgtgcggcaaaggtgtggaaggccgggaggcggagtcctcctgagatacggaagccaactcgcacctgagactttttacagggaatgtgatatgcaactgttcggtccctggggagaaatcgtgtcaccatccctgtcgcctgccacttcgaatgccggcggttgcaggctctttatcaacgtggcaccacatgctagaattgctattcatgcactggcaactaacatgggcgcagggactgagggagcgaacgcgtcatacattctgatacgggacactcattccctccgcactactgcatttcatgggcaacaagtgctttactgggaaagcgaatcgtcgcaggcagaaatggagttttccgaaggattccttaaggcacaggcctccctgcgcggtcagtactggaccctgcaaagctgggtgccagaaatgcaagatcctcagtcatggaaaggtaaggagggcact

SEQ ID NO: 5667 - DNA, 4281 bp, synthetic construct
  misc_feature 1..4281: note = source = /note="Description of Artificial Sequence: Synthetic coding sequence"
  source 1..4281: mol_type = other DNA
atgcaccaaagacatccgagggctcggtgtccgccgctctgcgtggccgggatcctggcctgcggattcctgctgggatgctggggaccctcgcatttccaacaaagctgcttgcaggccctggagccacaggccgtgtcgtcgtaccttagcccgggggccccactcaagggtcggccgccctcgcccggatttcagcgccagcggcagaggcagcgccgggcggcgggcggaatcttgcaccttgagctgctggtggccgtcggtcctgacgtgttccaggcgcaccaagaagatactgaaagatatgtcctgaccaacctgaacatcggagcggaactgctcagagatccgtccctgggggcgcagtttagagtccacctcgtgaagatggtgatcctgactgaaccggaaggagccccgaacatcactgcgaatctgacctcatcattgctttccgtctgtggatggagccaaaccatcaacccggaagatgacactgacccgggccacgccgacctggtgctgtatatcacccgatttgacctggagctccctgatgggaatagacaggtgagaggggtcactcagctcggaggggcctgttcaccaacctggtcctgtctcatcacggaggacacgggtttcgacctcggcgtgactatcgcccacgagatcggacactccttcggactggagcacgacggagcgccgggaagcggctgcggcccgtctggccacgtgatggcgtccgacggcgcagcacctagagccggactcgcatggagcccgtgcagccgacgccagctgctgtcactcctcagcgctgggagagcgaggtgcgtgtgggaccctccgaggccacagccgggttcggctggacatccccccgatgctcagccgggactgtactactcggcaaacgagcagtgccgcgtggccttcggcccgaaggcggttgcatgcactttcgcccgggaacacctcgacatgtgccaggccctctcctgccacacggatccgctcgaccagtcgtcctgttcgcgcttgctcgtgccgctgttggacggtaccgaatgcggcgtggagaaatggtgcagcaagggacgctgccgttcactcgtcgagcttaccccgattgccgcggtccacggcaggtggagctcgtggggaccacggtcgccatgctcccgctcatgtggcggaggagtcgtcacccggaggcggcaatgtaacaaccctcgaccggcgttcggtggccgcgcgtgtgtgggagctgatctgcaggctgaaatgtgcaacactcaggcttgcgagaaaacccaactggaattcatgtcacaacagtgcgcacgcaccgatggtcaaccgctgcggtctagccctggtggagcctctttctaccattggggcgccgccgtgccacactcccagggagacgccctgtgtcgccatatgtgccgcgcgattggagaatcctttatcatgaagcggggtgacagcttcctcgatggaacccggtgcatgccgtcggggccacgcgaggacggaaccctgagcctctgcgtgtccggaagctgccggaccttcgggtgcgatggcagaatggattcgcaacaggtctgggaccgctgtcaggtgtgtggaggcgataactctacttgctcaccacgcaagggatcatttactgccggtcgcgcccgcgagtacgtgacttttctgaccgtcactcctaacctgacctccgtctacattgcgaaccaccggccacttttcactcatctcgcagtgcggataggtggtcgctatgtggtggctggaaaaatgtcgatcagcccgaatactacttacccgtcgcttctggaagatggccgcgtcgaatacagagtcgccctcactgaagatagactcccgcggctcgaggagatccgcatctggggacctctccaggaggacgcagatatccaagtgtaccggagatacggagaagagtacggaaatctgaccagaccagatatcaccttcacttacttccaaccaaaacccagacaagcatgggtatgggccgctgtgcgcgggccttgctccgtgtcgtgcggcgccggcctcagatgggtgaattactcctgcctggatcaagcgagaaaggaactggttgaaacggtgcagtgccaaggatcgcagcaaccgccggcatggccggaggcctgcgtgctggaaccatgcccgccgtactgggcggtcggagacttcggaccgtgctccgcgtcatgtggaggggggctgcgggaacgcccagtgcgctgcgtggaagcccaggggagtctcctcaagactctgcctccagctagatgtagggccggggcccaacaaccggctgtagccctcgaaacttgcaacccccagccttgcccggctcggtgggaggttagcgagccctccagctgcacctccgccggtggcgccggactggctctggagaacgaaacttgtgtgcccggcgcggacgggctggaagcacctgtgacggaaggccccggatcggtggatgagaaactgccggccccagagccgtgcgtcggtatgtcatgccctccagggtgggggcaccttgacgcaacctcagcgggcgaaaaagcgccgtcgccgtggggttcgatcagaaccggcgcccaagccgcgcatgtgtggacccccgccgcgggctcctgcagcgtgtcctgcggaaggggacttatggagttgagattcttgtgcatggactcggccctgcgggtgccggtccaggaagaattgtgtggactggcatcgaagcccggatcgcggagagaagtctgccaggcagtgccgtgccctgcccgctggcaatacaagctcgcagcctgctcggtgagctgcggcaggggagttgtgcgtaggattctttactgcgcgagagcacatggcgaggacgatggagaagagatcctgctcgatacccagtgtcaggggttgcctaggcctgaaccccaggaggcgtgttcactggagccttgtccgcctcggtggaaggtgatgtccctcggaccatgctccgcatcgtgcggactgggaactgccagacggtccgtggcttgtgtccaacttgaccaaggacaggatgtggaagtcgatgaggcggcttgcgcagccctggtccgccccgaggcgagcgtcccgtgtctcatcgctgactgcacctaccgctggcacgtgggcacttggatggaatgttcagtttcctgcggggacggcatccagcgccgccgagacacctgccttggaccacaggctcaagcgccagtgccagcagacttttgccagcacctgcctaagccggtgaccgtgagggggtgctgggcaggcccgtgcgtgggacagggcaccccatccctggtgccccacgaggaggccgccgccccaggccgcactaccgccactcctgctggagcctccctggaatggtcccaggcacgcggactgctcttctcgccggcacctcaaccgcggaggttgctgccaggtccccaagaaaattcagtccagtcgtctgcttgtggacggcagcatctggaaccgactggcactattgacatgcgggggccaggacaagccgactgcgcggtggctattggacggccattgggagaagtcgtgaccctgcgcgtcttggagtccagcctgaactgtagcgccggagacatgctccttctgtggggacgactgacctggcggaagatgtgccgaaagctcctggacatgaccttctcatcaaagacgaacacgctggtggtgcggcagcggtgcggccgcccaggaggtggagtgctcctgcgctacggctcacagctggcgcctgaaaccttctaccgtgaatgcgatatgcagttgtttgggccttggggcgaaattgtgtccccgtcgctgagcccagccacctcgaatgcaggaggatgccggcttttcatcaatgtcgccccacatgcacgcatcgcaatccacgccctggcgactaacatgggtgcaggaaccgaaggtgctaatgcctcgtacatcctgatccgcgacacgcatagcttgcggactactgcatttcatggacaacaggttctctactgggagtcagagtcctcgcaggctgagatggaattcagcgagggcttcctgaaggcccaagctagtctgcgcggacagtactggaccctgcagtcatgggtgccggaaatgcaggacccacagtcctggaagggaaaagaaggaacg

SEQ ID NO: 5668 - DNA, 4281 bp, synthetic construct
  misc_feature 1..4281: note = source = /note="Description of Artificial Sequence: Synthetic coding sequence"
  source 1..4281: mol_type = other DNA
atgcaccagcgccacccccgggcccgctgcccaccgctgtgcgtggccgggattctcgcctgcggatttctgcttggctgttggggcccgtcacacttccagcagtcgtgcctccaagcactcgaaccccaagcagtgagctcctacctttctccaggcgcccctctgaaaggaaggccgccaagccccggtttccagcggcagagacagagacaacgacgcgccgctggcgggatcctgcaccttgaactgctggttgcagtgggccctgacgttttccaagcgcaccaagaagatactgagcggtacgtcctgaccaatctgaatattggcgcagaactgttgcgcgacccgtccctgggtgcgcagttccgggtccatcttgtcaagatggtcatcctgaccgaacctgagggagcccctaatatcacggcaaacctcaccagctcgttgctgtccgtgtgcggttggagccagactatcaacccggaggatgataccgatccgggccacgcagatctggtgctgtacatcacccgcttcgatctcgagctccctgacggaaaccgccaggtgcgcggggtgacccagttgggtggcgcctgctcgccgacttggtcgtgtctgattaccgaagatactggcttcgacctcggagtgaccatcgcgcatgagatcgggcactcgttcggactcgagcacgatggagctccgggaagcggatgcggtccgtcgggacacgtgatggctagcgatggagcagctccacgtgctggactggcttggtccccgtgttcaagacggcaactgctgagcctgctctcggccggaagagctaggtgcgtgtgggacccgccgcggcctcagcctggttcggcgggacatccgccggacgcccagcccgggttgtactactccgctaacgagcagtgcagggtggcattcggtccgaaggcggtcgcctgcaccttcgccagggagcatctggacatgtgtcaggcgttgtcctgccacacggatccactcgaccagagctcatgttcaaggttgctcgtccctcttctggatgggactgaatgcggcgtggaaaaatggtgtagcaagggccgctgccggtcgctggtggaactgactcccatcgccgcagttcatggacgttggtcatcgtggggaccaagatcgccttgctcaaggtcatgcggaggcggggtcgtgactcgcaggcgacagtgcaacaatccgcgtccggctttcggaggacgcgcctgcgtgggggcagatctgcaggcagaaatgtgcaacactcaagcctgcgaaaaaactcaactcgagtttatgtcccagcagtgcgcccggactgacggccaacccctgaggtccagcccaggcggagcatcattctaccactggggtgccgcggtcccgcatagccagggagatgcgctttgtcgccatatgtgcagagcgatcggtgagagctttatcatgaaacgcggtgactccttcctcgatggaacccgctgtatgccgtccggcccacgcgaggacgggaccctgtcgctctgcgtgtccggttcctgcagaactttcggctgcgacggacgcatggatagccaacaagtgtgggacaggtgtcaggtgtgtggtggagataatagcacgtgctcaccgagaaaggggtcgttcactgctgggagagcccgggaatacgtgaccttcctcactgtcactccaaacctcacttcggtgtacattgcgaaccaccgcccacttttcactcatcttgcagtcaggattggaggaaggtacgtcgtcgccggcaaaatgtccatctcccccaatacgacctacccgagcctgctggaagatggacgggtggaatatagggtggcccttaccgaggacaggctcccaagactggaggagatcaggatctggggaccactccaggaggacgcagacatccaggtgtaccggcggtatggggaggagtacggtaacctcacccggcctgacattacctttacctactttcaaccaaagccgcgccaggcctgggtgtgggccgccgttcgtggaccatgcagcgtctcgtgcggcgccggtctgcggtgggttaactacagctgcctggaccaggcgcgcaaagagctggtcgagactgtccaatgccaaggctcgcaacaacctccggcctggcccgaggcctgcgtgctcgagccttgtcctccttattgggctgtaggggatttcggcccttgtagcgcaagctgcggtggaggactgcgggaacgcccagtaagatgcgtggaggcgcaaggatcactgctcaaaactctgccgccggcacggtgccgggcaggggcacaacagccggccgtggccctggaaacctgcaatccgcaaccttgtcctgcacgctgggaagtgtcagagccgtcatcctgcacctcagctggaggggcgggcctcgcactcgaaaacgaaacctgcgttccgggagccgacggactggaagccccagtgactgaagggcctgggtcggtggatgaaaagctgccagccccagagccgtgcgttggaatgtcatgtccgcccgggtggggacatctggatgcgaccagtgcgggcgagaaagccccttccccttggggatccatccgaaccggagcacaagccgctcatgtgtggacgcctgccgcgggctcttgctcagtgtcgtgcggacgcggtcttatggaactccggtttctctgcatggactcggcacttcgcgtcccggtgcaggaggagctctgtggattggcaagcaagccaggatcacgacgtgaggtgtgccaggcggtgccttgtccggcccgctggcaatacaaactggcagcgtgctcggtgagctgcggtcgcggggtggtccggaggatcttgtactgcgcaagagcacatggagaagatgatggagaagaaatcttgctggacacccagtgtcaaggtctgccacggccagagccacaagaagcctgctcattggagccgtgcccgccacggtggaaagtgatgagtctcggcccgtgctcagcttcatgtggactgggcactgcgcgccgctccgtggcgtgcgtgcagctggaccagggccaggatgtggaagtggacgaagccgcatgcgccgccctggtccgcccagaggcatctgtcccgtgcctgatcgctgattgtacttacagatggcacgtcggcacctggatggagtgctcggtgtcctgcggcgacgggatccagcgccgtcgcgatacttgtttgggaccgcaggcacaggctccggtcccagccgacttttgccagcatttgcccaaaccagtgaccgttagaggctgctgggcgggaccgtgtgtcggccagggaaccccgagcctggtcccgcacgaggaagcagccgcgccgggaagaaccactgccactcccgcaggagccagccttgagtggtcgcaggctagaggacttctgttctccccagcacctcagccgcgcagactgcttcctggaccgcaggaaaatagcgtgcagtcgtccgcctgcggccgccagcatctggaaccgactggtactatcgatatgagagggcccggacaagcggattgtgcggtggctatcggacgccctctcggggaggtggtgactttgagagtgctcgagagctccctgaactgctcggccggagacatgcttctcttgtggggtaggcttacttggaggaagatgtgccgcaagctcttggacatgaccttctcgtcgaaaaccaatactctggtggtgaggcaaaggtgcgggcgccccggcggaggagtcctgctgcgctacggatcccaactggctccggaaactttttacagggaatgcgatatgcagctgttcggaccttggggagaaattgtgtcgccaagtctgtcgcctgccacctcaaacgcggggggatgtcggctcttcattaacgttgctccacatgccagaatcgctatccacgccctggcgactaatatgggggctggaaccgaaggagccaacgcctcatacatcctgatcagagacacgcatagcctcagaaccactgcatttcatggacagcaggtcctgtactgggagtccgaatcgagccaggctgagatggagttctcggaaggatttctgaaggcgcaagcatctctccgcggccagtattggaccctgcaatcatgggtcccagagatgcaggacccacaatcctggaagggtaaggagggtacc

SEQ ID NO: 5669 - DNA, 4281 bp, synthetic construct; identical to SEQ ID NO: 5644
  misc_feature 1..4281: note = source = /note="Description of Artificial Sequence: Synthetic coding sequence"
  source 1..4281: mol_type = other DNA

SEQ ID NO: 5670 - DNA, 4281 bp, synthetic construct
  misc_feature 1..4281: note = source = /note="Description of Artificial Sequence: Synthetic coding sequence"
  source 1..4281: mol_type = other DNA
atgcaccagaggcatcccagggcccgctgccctccactctgcgtcgccgggattctggcgtgcgggttcctcctgggctgttgggggccgagtcacttccagcagtcttgcctccaggctctggagccacaggccgtctcatcatacctgtctccaggcgctccattgaagggacggcctccaagtcctggctttcagcgccagcggcagcgccagagacgggccgctggggggatactccacctggagctgctggttgccgttggtcctgatgtgtttcaggctcatcaggaggacacagaacgatatgttctcacaaatctgaatattggggcagagcttctgcgggacccttccctcggcgcacagtttcgggtccacctagttaaaatggttatattgaccgaacctgagggcgcgccgaatatcacggctaatctaacgtcttcgctactgtctgtgtgcggatggtcccaaacgataaaccccgaggacgatactgacccaggtcacgctgacttagtgctgtacatcactcgctttgatctcgagctcccagacggcaataggcaggtacggggtgtcactcagctgggcggggcctgctcacccacttggagctgtttgataactgaggacaccggatttgacctaggggtgacgatcgcacatgagatcggtcactcctttgggctagaacatgacggcgcccccgggtctgggtgcggtcctagtgggcatgtcatggcttccgacggagccgcccctagagccggactggcatggtcaccttgttcccgtcgacagctcctgagtcttctgtccgccggccgggcgcgctgcgtgtgggacccccccaggccacagcccggctccgccggtcacccccctgatgcccagccaggcctatactactccgctaacgaacagtgtcgagtcgccttcggtccaaaagcggtggcctgtaccttcgcaagagagcatctggacatgtgccaggcattgtcttgtcataccgatcccttggaccagtccagttgctcgcgacttttggtgccacttctggacggcacagaatgcggcgttgagaagtggtgctccaagggtcgctgccgctcacttgtggagttgacaccaatcgcggctgtgcacggccggtggagctcctggggaccacgctctccatgctctagatcttgtggggggggtgtggtgacacgccggaggcagtgtaacaaccccagaccagccttcggagggagggcttgtgtgggagctgacctgcaggctgaaatgtgtaacacgcaagcgtgtgagaaaacccagctggagtttatgagtcagcagtgcgcccgcactgatgggcaaccattgaggtcttcgccgggcggcgcctctttctaccactggggcgctgcagtgccccactctcagggcgacgctctatgcagacacatgtgccgtgctattggggagagttttatcatgaagcgaggtgattcctttctcgacggaacaaggtgcatgccctctgggccgcgcgaagacgggactctctccctgtgtgtgagtgggagctgtagaaccttcggttgcgatggtcggatggacagccagcaagtatgggaccgatgtcaggtctgcggcggggataactcaacctgttcccccagaaagggcagttttactgccggtcgggccagagagtatgttactttcttgactgtcacaccaaatctcacgtccgtgtacatcgcaaatcatcgccctctattcacacacctggccgtacggatcggtggccggtatgttgtggccggcaagatgtccatctctccgaataccacctatccttcactgctggaggatgggcgggtggaatatcgtgtggcgttgacagaagaccggctccctcgtctggaggaaatccgcatttggggaccactgcaggaagatgctgacatacaggtgtacaggaggtacggggaggaatacggtaacttgaccagacctgacataaccttcacctattttcagccgaagccgcggcaggcctgggtctgggccgccgtgagggggccctgcagtgtgtcctgtggggcaggtttacgttgggtgaattactcctgcctcgatcaggcccggaaagaactggtggagactgtccaatgccagggctcccagcagcctcctgcatggccagaggcatgtgtcctggaaccatgccctccttattgggcagttggcgactttgggccctgttccgctagttgtggaggagggctaagagaaagacctgtcaggtgcgtggaggcccagggatctctgcttaagaccttgcccccagctcgatgccgggcaggggcccagcagcctgcagtcgcattggagacgtgcaacccacagccttgtcctgctaggtgggaagtcagtgaaccatcatcctgcacctcagccgggggcgccggtttggctctggagaatgagacttgtgttcctggcgctgatggactggaagccccagttacagaggggcccgggtcagtggatgaaaaactgcctgcacccgagccatgcgtggggatgagctgcccccccggatggggacacctggacgcaacgagcgcgggagaaaaagctccaagtccctggggatctatcaggacaggtgcccaggcagcccatgtctggacccctgctgccggttcatgtagcgtaagttgtggtaggggcctgatggagctgcgattcctgtgcatggattcagcgctgcgtgtgccagtgcaggaagaactgtgcgggctcgcctccaagccaggttcccgccgcgaggtgtgtcaggctgtgccatgtcccgcccgctggcagtacaagctggccgcttgctccgtctcctgcggcagaggagtggtgcgccgcatcctgtattgcgcgcgcgcccatggtgaggacgacggggaggagatcctgctggacactcagtgccagggtctgcctagacctgaaccccaggaagcatgcagcctggagccttgcccacctagatggaaggtcatgtctctcggcccatgttccgcaagctgtggtcttggaaccgccaggaggagcgtggcctgtgtgcagctcgaccagggacaagatgtggaggtcgacgaggctgcctgtgccgccctcgttcgacctgaggcctccgtcccatgcctgatagcagactgtacatacaggtggcacgtggggacttggatggagtgttcagtgtcttgcggcgatggtatccaaagaaggcgcgatacctgcctgggacctcaggcacaggctcccgtgcctgctgatttctgtcagcatctgccaaaacctgtaacagttcgaggatgctgggccggcccatgtgtgggccagggcacaccgagtctggtcccacatgaagaggctgccgcacccggtagaaccactgccactcccgctggggccagcctcgagtggtctcaagcccggggactgctatttagtcccgccccccagccgcggcggcttcttccaggacctcaggaaaactcagtgcagagtagtgcctgcggccgccagcaccttgaaccaactggcacgatagacatgcgtggtcctgggcaggcagattgcgcagtggccatcggtcggccactgggtgaggtggttacactccgggtcctcgaatccagccttaactgctctgcaggcgacatgctgctcttgtggggcagactcacctggcgtaagatgtgtcgcaaactgttggacatgacctttagttccaagaccaacacgctagtggtgcggcagcgctgcggccgccccggcggcggagtgctgctgcggtatgggagccagctggctccggagaccttttacagagaatgtgatatgcagttatttggcccatggggggaaatagtgtccccttccctgtcaccagccacatccaacgcaggaggctgtaggctcttcattaatgtggccccccatgcccggattgccatccacgctctcgcaacaaacatgggggcggggacagaaggcgcaaacgcttcctatattctgattcgcgatacacattctctgcgtacaacggccttccacggccagcaagtactttactgggagtccgaaagtagccaggccgaaatggaattcagcgagggttttcttaaggcccaggcatccttgagagggcagtactggacactccaatcatgggtgcctgaaatgcaggatcctcagtcttggaaaggtaaggaggggact

SEQ ID NO: 5671 - DNA, 4281 bp, synthetic construct
  misc_feature 1..4281: note = source = /note="Description of Artificial Sequence: Synthetic coding sequence"
  source 1..4281: mol_type = other DNA
atgcaccagcgccaccctcgggcacgatgccccccgctgtgtgtggctggaatcttggcttgcggcttcctcctgggctgttggggtccttcccattttcagcagtcttgcctccaggccctggaacctcaggctgtgagctcctatctgtcgcctggagctccacttaaagggcggcccccttcaccaggcttccaacgccaacggcaacgccagcgcagggctgcgggcgggatcttgcacttggaactgcttgtggctgtcggccccgacgtattccaagcacaccaagaggacacggagaggtatgtcctcactaatctgaatatcggggctgaactgctgagagatccatctctcggtgctcagttccgtgtgcacctggtcaagatggttattctgaccgagcccgaaggtgcaccgaacattacggccaatctcactagctcactcctcagcgtctgcgggtggtctcagactataaaccctgaggatgacaccgatcccgggcatgcagacttggtgctatacataacacggttcgacttagagctacccgacgggaaccgacaggtgcggggtgtgacacagttgggtggcgcctgttccccaacttggagttgcctcatcaccgaagacacaggattcgaccttggggtgacaatcgcccacgagatcggtcacagcttcgggctggaacacgacggagcaccaggaagtgggtgcggaccaagcgggcatgtaatggcctcagacggtgccgcgcctagagccggcctggcgtggtccccctgtagccgaagacagctcctctccctcctgagtgctggaagggcccggtgtgtgtgggatccaccgcgaccacaaccagggtccgccggtcacccacccgacgctcagcccggactgtattacagtgccaacgagcagtgcagggtggccttcggtccaaaagccgtggcctgcacatttgctcgagagcacttagatatgtgtcaagccctctcttgccatacagaccccctcgatcagtcctcctgctcgaggttgttggtacccctcctcgatggcaccgaatgcggggtggagaagtggtgctctaaaggccgttgccgatccctggtggaattaacacccattgctgccgtccacggccggtggagttcgtggggaccgaggtcgccgtgttcccgctcttgcggtggaggagttgttacaagacggcgccaatgcaataaccctaggccagccttcggaggaagagcctgcgtgggcgcagatctacaagcagagatgtgtaatacccaggcctgcgagaaaacccagttggaatttatgtctcagcagtgtgcacggactgacggtcagcccctgcggagctcgccgggaggtgcttccttctaccattggggcgccgcggttcctcacagtcagggcgacgcgctctgtcggcacatgtgtagagctatcggggagtctttcattatgaagcgcggcgatagctttctcgatggaacccgctgtatgccgtctggccctagggaagacggaactttgtcgctctgcgtgtctggatcctgccggacctttggatgcgacggaaggatggactcccaacaggtctgggatcgttgtcaggtatgcggaggcgacaatagtacttgctcgccgcgcaagggttcgttcacagccggtagggcaagggagtacgttaccttccttactgtaactccaaatctgactagtgtgtacatcgcgaaccaccgccccctgttcacccatctcgctgttaggatcgggggccggtacgttgtggcagggaaaatgagtatctcgcctaacactacttacccgtcgcttctggaggatgggagggtggagtacagggtggccctgacggaagaccgtctcccccgcctggaggagattcgcatttggggtccactccaggaagatgctgatatccaggtctaccgccgctacggggaggagtatgggaatcttacacgtcctgatattactttcacatattttcaaccaaagccacgacaggcgtgggtttgggccgccgtgcgcggaccctgctcagtctcatgcggagccgggctccgatgggtgaactattcgtgcctggatcaggcccgcaaggagctcgttgagaccgtacagtgccaaggcagtcagcagccccctgcctggccagaggcttgcgtgctggaaccatgtccgccatactgggccgtgggggactttgggccttgtagcgcctcttgtggtggaggactgcgcgaaaggcccgtgaggtgtgtcgaggcccaggggtctctccttaagaccttgccccccgcacgctgcagagctggcgcccagcaacctgccgtcgccctggagacttgtaacccccaaccctgtcccgccagatgggaagtgtccgagccctcctcttgtactagcgccggcggggcgggcttggcattggaaaacgagacctgtgtacctggagccgacggccttgaggctccagtgaccgagggacctggctccgtcgacgagaagctccctgcacccgaaccttgtgttggaatgtcttgtccccccgggtggggtcacctggatgctaccagcgcaggtgaaaaagcaccaagcccctgggggtctataagaaccggtgcccaggcggctcacgtctggacacccgccgcagggagctgctccgtcagttgtgggcggggactgatggagctgaggtttttatgtatggactccgccctgcgggtaccggtgcaggaggaactctgcgggctggcatctaagccaggatccagaagagaggtctgtcaggcagtcccatgcccagcaaggtggcaatacaaactggctgcctgctctgtgtcctgcgggagaggcgttgtccggagaatattgtactgtgcaagggcccatggggaggacgatggagaagagatcttgctggacactcagtgccagggccttcctcgcccagagccacaggaagcctgctctcttgaaccttgccctccgagatggaaggttatgagtttgggaccatgctcagcctcgtgcgggcttggcacagcccgcaggtccgtggcatgtgttcaattggaccagggccaggacgtcgaagtggatgaagccgcttgcgctgctcttgtgcgccccgaagccagtgtcccatgtctgatcgcggattgcacatatcgatggcacgtaggaacctggatggagtgcagtgtgagttgcggcgatggcattcaacgccggagagatacctgtttgggcccacaggcacaggctcccgtccctgctgacttttgccagcatctgcctaagcccgtgacagtgaggggatgttgggctggaccttgcgtgggtcagggcactccctctctggtgccacacgaagaggcggccgcacctggcaggacaactgccacacccgcaggggccagtctggagtggagtcaagcccggggcctcctcttttccccagcaccacaacctcggaggttactgccagggccccaggaaaactctgtacagtcatccgcttgcggccggcagcacctcgagccaacaggaactatcgacatgcgaggccccggccaagcagactgtgccgtcgccattggaagacctttgggcgaggttgtcaccctcagagtcctagaaagctccctcaactgttcggctggtgatatgctgctgttatggggccggctgacctggagaaaaatgtgccgtaaactgcttgatatgacatttagtagtaagactaacactcttgttgtccggcagcggtgcggacgacctggagggggcgtgctgctccgctacggctcccagctagcccctgagacgttctaccgtgagtgcgacatgcagctgttcgggccctggggagagatcgttagcccttccttgagccctgctactagcaatgccgggggttgccggctgtttattaatgttgcacctcacgcccgtatcgccatccatgctttggccactaacatgggcgctggtacagagggtgctaacgcatcttacattctgattcgcgacacccactctttacgaacaaccgccttccacggccaacaggtcctgtattgggaatctgaaagctctcaggccgagatggaattctccgaggggttcctcaaggcccaggcttcactgcgcggtcaatattggaccctccaatcatgggtgcctgagatgcaagacccccaatcgtggaaaggcaaagagggcacc

SEQ ID NO: 5672 - DNA, 4281 bp, synthetic construct
  misc_feature 1..4281: note = source = /note="Description of Artificial Sequence: Synthetic coding sequence"
  source 1..4281: mol_type = other DNA
atgcaccagcgacacccgcgcgcccggtgtccccctttgtgcgtggccggaatcctggcttgcggattcctgctcgggtgctggggcccgtcgcactttcagcagtcctgcctgcaggccctggagccacaggccgtgtcgtcctacctttccccgggagcccccctgaagggacggccgccatcaccaggttttcagcggcagcgccagcggcaaagacgcgcagcgggtggaatcctgcacctcgaattgctcgtggccgtcggaccggatgtgttccaagcccaccaggaggacactgagaggtacgtcctgactaacctgaatatcggcgccgagctcctgcgcgacccgtccctgggggcacagttcagggttcacttggtgaagatggtgatccttaccgagccagaaggagccccgaatatcactgctaacctgacctcgtcactcctctcggtttgcggttggtcccaaaccatcaacccggaggacgataccgatccggggcacgcggatcttgttctgtacattacccggtttgacctggaactccccgacggcaacagacaggtgagaggggtgactcaactcggtggggcctgttccccgacctggtcgtgtcttatcaccgaggataccggctttgacctcggagtgacgatcgctcacgaaatcggacacagctttggactggaacatgacggagctcctggatcggggtgcggaccgtcgggtcacgtgatggcctcagacggcgccgccccgagagcagggctggcttggtccccctgctcccggaggcagctcctcagcttgctttccgcaggacgcgcgcgatgtgtctgggacccgccacgccctcagccgggatcggccggccaccctccagatgcacaacctggactctactactcggccaacgaacagtgccgcgtcgctttcggtccgaaggcggtggcgtgtacttttgcccgcgaacacttggacatgtgccaagctctttcgtgtcatactgatcccctggaccagtcgagctgtagtcgcctcctggtgccgctgctggatggcaccgaatgtggggtggaaaagtggtgctctaagggccggtgtcgctccctcgtggagctcactccgatagccgcagtgcatggtaggtggtcatcctggggtcctaggagcccgtgcagccggtcatgtggtggcggcgtggtcactaggcgccggcaatgtaataacccgcgcccggcgttcggagggcgcgcctgcgtgggagcagacttgcaagctgagatgtgcaatactcaggcatgcgaaaagactcagctcgagtttatgagccaacagtgcgcacggacggacgggcaaccgctgcggtcgagccccggtggcgcatcgttctatcattggggagcggcggtcccgcatagccagggcgatgctctctgcagacatatgtgcagagcgatcggcgaatcatttatcatgaagagaggcgactcgttcctggacggaacgcgatgcatgccctcagggccccgggaagatggaaccctcagcctctgcgtgtcagggtcctgcagaaccttcggatgcgacggacgcatggattctcaacaagtgtgggacagatgccaggtgtgcggaggtgacaattcgacctgcagccctcgcaagggctcgtttaccgcaggacgtgcccgcgaatacgtcactttcctgactgtcacgccaaacctgacgagcgtctatatcgcaaatcatcggcccctgttcacccacctggcagtgagaatcggtgggagatacgtcgtcgctggcaaaatgtcaatcagcccaaacaccacttacccatccctgcttgaagatggtcgggtggagtacagggtcgcgcttaccgaggacaggctgccaaggctcgaagaaattcgcatctggggccccttgcaagaggatgccgatatccaggtttaccggcgctatggagaagagtacgggaacctcacccgcccggacatcacctttacttactttcagccaaaaccgagacaggcctgggtgtgggcggcggtgcgcggtccctgttcagtgtcatgcggcgctggactccggtgggtgaattactcgtgtctggaccaagctagaaaggaattggtggagacggtgcaatgccagggaagccagcaaccccccgcatggcctgaggcttgcgtgctggaaccgtgtccgccatactgggctgtcggagacttcggaccgtgctcggcatcttgtggaggaggactgagagaacgccccgttcgctgtgtggaagcgcagggatcgctcctcaagaccctgccgcctgctcgctgtagagctggggcccagcaaccagccgtggcgctggaaacctgcaacccgcagccttgccccgcccggtgggaagtgtcggagccttcgtcgtgcacgtcggctggaggtgccggcctggccctggagaacgaaacttgcgtgccaggagccgatggactcgaagcgcccgtgaccgaggggccagggtccgtggacgagaaactgccagcgcccgaaccatgtgtgggaatgtcgtgcccaccaggatggggccacctggacgccacgagcgcgggcgagaaggccccgtcaccatgggggtccatcaggaccggagcgcaggccgcacatgtttggacccctgcagccggatcgtgctcagtcagctgcggacggggccttatggaactccgctttctttgcatggatagcgcgctgcgcgtgccagtgcaagaagagttgtgtggcctggcatccaaaccaggttcgcggcgcgaggtctgtcaagcagtcccgtgtccagccagatggcaatacaagctggcagcttgctccgtgtcctgcggaagaggagtagttagacggatcctctactgtgcgcgggctcatggtgaggacgacggagaagaaatcctcctcgacactcagtgccagggactgccacgcccggagccacaggaggcatgttcgctggaaccatgtcctccgcgctggaaggtcatgagccttggtccgtgctcggcctcttgtggactgggaaccgcacggaggtcggtagcctgcgtgcagctggatcaaggacaggatgtcgaggtggacgaagccgcgtgcgctgccctcgtccgcccggaggcctcggtcccgtgcctcatcgccgactgcacctaccggtggcacgtcggcacctggatggaatgctcagtttcgtgtggcgacggaattcaacgccgcagggatacctgcctgggcccgcaggcgcaggccccagtcccagcagatttctgccagcacctcccaaagccggtgaccgtgcggggctgctgggccggaccgtgcgtaggccagggaactcccagcttggtgccgcacgaagaggcagccgccccgggtcggactactgcaactccggctggcgcatcccttgaatggtcccaggcacggggcctcctgttcagcccggctcctcagccacgccgccttcttccgggacctcaggagaacagcgtgcagtcgtcggcctgcggacgtcagcatttggagccgactggtactatcgacatgcgcggtccggggcaagctgattgcgctgtggcgattggaaggccactgggggaagtggtgaccctgagagtgttggagtcctcccttaattgcagcgctggggatatgctcctcctgtggggtcgactgacctggcgcaagatgtgtcgcaaactcctggacatgactttctcctccaagaccaacacgctggtggtgcggcagcgctgcggacggccaggaggaggagtccttttgcgctatgggtcgcaactggcgcccgagactttctatagggaatgcgacatgcaactgttcggcccatggggggaaatcgtgtccccttcgctttctcctgcgacttcaaacgcgggaggttgtcggctgtttatcaacgtcgctccacatgcaaggattgcaatacacgcactggccactaacatgggagctggaactgaaggggccaatgcgtcatatatcctgatccgggatacccattcgctgcggaccactgccttccacgggcaacaagtcttgtactgggagtcagaatcctcgcaggcagaaatggaattttcggagggttttctgaaagcgcaggcttcgctgcgcggacaatactggacgctgcagtcctgggtgcctgaaatgcaggacccgcaaagctggaaggggaaagaaggaacg

SEQ ID NO: 5673 - DNA, 4281 bp, synthetic construct
  misc_feature 1..4281: note = source = /note="Description of Artificial Sequence: Synthetic coding sequence"
  source 1..4281: mol_type = other DNA
atgcaccagagacacccccgggccaggtgtccacctctttgtgtggccgggatcctcgcgtgtgggttccttctgggttgctgggggccgagtcactttcagcagagctgtttgcaggccctggaaccacaggccgttagctcctacctcagcccaggcgcgccgctcaagggccgaccccccagccctgggttccagaggcaacgacagcgccagaggcgagccgcaggcggaatcttgcacttagagctcctggtcgccgtgggacctgatgtcttccaagcccatcaggaagatacggaaagatacgtactcacgaacctgaatatcggcgccgagttgctgagagacccgtcattaggggcccagttcagagttcacctggtgaagatggtgatcttgaccgagcctgagggggcccccaacattacagccaatctgacctccagcctgctgtctgtgtgcgggtggtctcagacaatcaatccagaagatgataccgacccaggacacgccgacctggtgctgtatatcactcggttcgacctcgaattacctgatgggaataggcaagtgagaggggtcacccagctcggaggagcttgtagcccaacttggtcttgtttaatcacggaggatactggatttgaccttggtgtgaccatcgcgcacgagatcgggcattccttcggactggagcatgacggagcaccgggctctggatgcggacccagtggacatgtgatggcctccgacggagccgctccacgggcagggttggcctggtcaccctgctcacgaagacagttgctctccctgctgtctgctggaagagccagatgcgtgtgggaccctccccgcccacagcctggctcagctggacacccccctgatgctcagcccggcctgtattacagtgcaaacgaacagtgtagggtggccttcggaccgaaagccgtcgcatgcacattcgcacgggagcatctggacatgtgccaggccttgagttgccacaccgacccgctggatcagagcagttgttctcgccttctcgtccctcttttggacggtacagagtgtggcgtggaaaagtggtgctctaaaggcaggtgccgcagtttggtggaactgacacctatcgccgcagtccatgggcggtggtcctcatggggcccccggtccccctgttctcggtcttgcggaggcggggttgtcacacgccgtcggcagtgtaacaatccacggccagccttcggcggccgcgcatgcgtgggagccgacctgcaggccgaaatgtgtaacacccaggcctgtgagaagacacaactagagtttatgtcccagcagtgcgcccggaccgatggccagcccttgaggtcatcccctggaggggcctctttttaccactggggggccgccgtccctcacagtcagggcgacgccctttgccgacacatgtgtagagccataggtgaaagctttatcatgaaacgaggggactcgttcctggatggcacacgctgcatgccctctggccctagggaggacggcaccctctcattatgtgtatccgggtcctgcagaacatttggctgcgatggaagaatggatagtcaacaagtctgggatcggtgccaagtgtgtggaggagacaattctacttgcagtcctcgcaaagggtcgttcaccgccgggcgcgccagagagtatgtgacatttctcaccgtgacgcccaatcttacctctgtgtatatcgcaaaccaccgccctctgttcactcacttggctgtgcggataggcggaagatacgtggtagcgggcaagatgagcatttccccgaatacaacttacccctctctgctggaggacggccgagtagagtacagagtagccctgaccgaagataggctgcctcggctggaggagatccggatatgggggccgcttcaggaggacgcggatatacaggtctaccggagatacggtgaagaatacggaaacctgacccgtcccgacatcactttcacgtatttccagcctaagcctagacaggcctgggtctgggccgccgtgcgggggccatgctcggtctcctgtggggccggcctgcgttgggtcaattactcttgcctggatcaggcaaggaaggagctggtcgaaaccgtccagtgccagggatctcaacaacctcctgcatggccagaggcttgcgttcttgagccttgccctccctactgggctgtaggagattttggtccatgttcagcctcttgcggtggcgggttgcgagagaggcccgtgcgctgtgtcgaggcacaagggtcgctgctcaaaaccctgccacccgcaagatgtagagcaggggcccagcagccggccgtggcgctagaaacctgtaatcctcagccttgtcccgcgcgctgggaagtgagtgaaccgagcagctgcaccagcgcgggcggggccggcctcgccctggagaatgaaacctgcgttcctggtgccgacggcctcgaggccccggtgactgagggtcccggctccgttgacgagaaattgccagcacccgaaccctgcgtgggaatgagttgccccccaggctggggacacctcgacgccacttccgccggggagaaggcaccttccccgtggggatcaatcaggactggagcacaggccgctcatgtgtggacaccggccgcgggaagttgctccgtctcctgcggccgtggtctgatggaattgcggtttttgtgcatggattctgcccttcgggttcctgtgcaggaggagctctgcggactggcctctaaacctggttctcgccgggaggtttgtcaagcagtgccttgtcccgcccgttggcaatacaaacttgccgcttgctctgtcagctgcggcaggggagtggtccgacggatcctatactgcgctcgggctcatggcgaggacgatggggaagagattctgctcgacacgcaatgtcaggggctgccccggcctgagccacaagaggcatgttctctggagccatgccccccccggtggaaagtgatgtctcttgggccatgctctgcaagttgtggactgggaactgcccgcaggagcgttgcatgtgtgcagctggaccagggacaggacgtggaggttgatgaggccgcctgcgctgccctcgtcaggcccgaggccagcgtgccttgtctgatcgccgactgtacataccggtggcatgtaggaacctggatggagtgcagcgtttcctgcggtgacggaatccagcggcggagggacacctgcttaggacctcaggctcaagcacctgtcccagcagacttctgtcagcacctcccgaagccagttacagtaaggggatgctgggcgggaccctgcgtgggacagggtacacccagtctggtaccgcatgaagaggccgcagcacccggtcggacaacggcgacacccgctggcgcatctctcgaatggagtcaggcccgcggtttactcttctcaccggccccacagcccaggagactgcttccgggcccgcaggagaacagcgttcagagttcagcttgtggtcggcagcacttagagcctaccggcaccatcgacatgagagggcctgggcaggctgattgtgcagttgctattggcaggcctctgggcgaagtggtgactctccgcgtgctggaatcgtcgctgaactgcagcgccggtgatatgctgctgctgtggggcaggctgacgtggcgaaaaatgtgtagaaagctgcttgacatgacttttagtagcaaaacaaatacactcgtggtgagacagcgctgtggccggcccggcgggggggtgctgcttcgctatggctcccaactggcgccagagactttctaccgcgaatgcgatatgcagctgttcggtccctggggggagatagtaagcccgagtttatctcctgccaccagcaacgcgggagggtgcagacttttcatcaatgtagcccctcacgcacgcatcgccattcacgcactcgctaccaatatgggggccggcacggaaggtgcaaacgccagctacattctgattcgagacacccactctctcaggacaaccgccttccacggccagcaagtgctctattgggaatccgagagcagccaggccgaaatggaattctctgagggctttctcaaggcccaggcttcccttcggggccagtattggacgctccaatcttgggttccggagatgcaagatccccagtcctggaaaggcaaggagggcacc

SEQ ID NO: 5674 - DNA, 4281 bp, synthetic construct
  misc_feature 1..4281: note = source = /note="Description of Artificial Sequence: Synthetic coding sequence"
  source 1..4281: mol_type = other DNA
atgcatcagcggcatccgcgcgcccgttgccctcctctctgcgtggctgggatcctcgcgtgtgggttcctgcttggatgctggggaccgtcacacttccagcagtcctgcctccaggccctcgaaccgcaggctgtctcgagctacctgtccccaggtgccccactgaagggacgcccgccttccccgggttttcagcgccaacgccaaagacagcggcgagccgcgggaggaattctgcatctcgaactcctggtggccgtcgggccggacgtgttccaagcgcaccaagaagatactgagaggtacgtcctcactaatttgaatatcggagcggaactgctgcgggacccatcgcttggtgcccagttccgagtgcacctggtcaagatggtgatcctcaccgagcctgaaggagcgccaaatatcactgccaacctcactagctccctcctgtccgtctgtggatggtcgcaaaccatcaatccggaagatgacacggacccggggcatgctgatctggtgctgtatatcaccaggttcgatctggagctccccgatggcaacagacaggtccgtggcgtgactcagctcggcggggcctgcagtccgacttggtcatgcctgatcactgaggataccggcttcgatctgggcgtgactatcgcacatgaaatcggccattcgtttgggttggaacatgacggggcacccggatctgggtgtgggccgtccggacacgtgatggcctccgacggcgccgcaccgagggccggactcgcctggagcccgtgcagccgccggcagcttctgtcgctcctctcagcgggaagagcgagatgtgtctgggatccgccgcggcctcagccaggatcggcaggacacccccctgacgcacagccgggactgtactactccgccaacgaacaatgtagagtggcctttgggcccaaggcggttgcgtgtacgtttgcccgcgaacatctggatatgtgccaggcgctctcgtgtcacacggatccgcttgaccagtcgtcgtgctctaggctgttggtgccgctcctggatggcactgagtgcggcgtggagaaatggtgcagcaaaggacggtgccgctcgcttgttgagctgaccccaatcgccgcagtccacggccgttggagcagctggggccctcggtccccgtgctcaaggtcgtgcggcggaggcgtggtcacccggcgcagacagtgcaacaatccacggccagccttcgggggcagagcctgcgtgggagccgaccttcaagcggagatgtgcaatactcaagcctgcgaaaagactcagctggagtttatgtcgcagcagtgcgctcgcaccgacggacagcctctgagatcgtccccgggcggagcctcattctaccactggggagcggcagtgccgcattcgcagggcgacgcgctgtgcaggcatatgtgccgggcaatcggagaatcgttcatcatgaagcgcggcgactcgttcctggacggaactaggtgtatgccatcagggcctagggaagatggaactctgagcctttgtgtgagcggatcgtgtagaaccttcggctgcgacggaagaatggattcgcagcaggtctgggatagatgccaggtgtgcgggggtgacaactccacttgttcgccgaggaagggatcgttcactgccggccgcgcacgggagtacgtgactttcctcactgtgactccgaatctgacctcggtctacattgccaaccaccggcccctcttcacccatctggccgtgcggatcggcggccggtacgtggtcgctggaaaaatgtcgatttcgccgaacacgacctacccatcactgctcgaagatggccgggtcgaatacagggttgccctgactgaagatcgcctgccccgcctggaggaaattcgcatctggggacctctccaggaggacgccgatattcaggtgtaccgccgctacggcgaggaatacggcaacctcacccgcccggatatcaccttcacctacttccaacctaagccgaggcaggcgtgggtttgggccgcagtgcggggaccgtgttccgtcagttgtggtgcgggtctgagatgggtgaactactcctgcctcgaccaggccaggaaggagctggtggaaactgtccagtgccagggaagccagcagcccccggcctggcccgaggcctgtgtgctggagccatgcccgccctactgggccgtcggagactttggaccatgctcagcatcgtgtggcggaggccttagggagcgcccggtgcgctgcgtcgaggcccaaggatccctcctcaagactttgccgcctgcaaggtgtagagccggagcacagcagccagcggtggctctcgagacttgtaatccgcaaccgtgccccgcgcgctgggaggtgagcgagccgtcctcctgtacttctgccggaggagcgggattggctctggaaaacgaaacctgcgtgccaggagcggacggactggaggcacctgtgacggaggggccgggatcagtcgatgaaaagctgccggctcccgaaccctgcgtcggaatgtcgtgcccaccgggatggggtcacctcgatgcaaccagcgccggtgagaaggccccatcgccatggggatcaatcagaactggagcccaggcggcccacgtgtggacgccggcagctggatcctgttcggtgtcgtgtggacggggactcatggagctgcgcttcctgtgcatggactcggcactgcgggtgccggttcaagaggaactctgtggcctcgcgtcgaagccgggctcccgccgcgaggtgtgccaagccgtgccctgtccagcccggtggcaatacaagttggcggcctgcagcgtgtcctgtggacgcggagtcgtccggcggattctctattgcgcgcgcgctcacggtgaggacgacggagaagaaatcctgctggatacccaatgtcagggcctgccacgaccggaaccgcaggaagcgtgttccctcgagccgtgtcctccgcgctggaaggtgatgtcgcttggcccatgctccgcgtcatgcgggttgggtactgctcgcagatccgtggcctgcgtccagctcgatcaaggacaggacgttgaggtcgatgaggctgcgtgcgcggccctggtgaggcctgaggcttcggtcccctgtctgatcgctgattgcacgtatcggtggcacgtgggaacctggatggagtgctccgtctcctgcggagacggaatacaaagacggcgcgatacctgcctgggaccacaggcacaggcgccggtccccgctgatttttgccagcacctgccgaaaccagtgacggtgagaggctgctgggcgggaccgtgcgtggggcaggggaccccatccctggtccctcatgaggaagcggctgcaccagggcggactactgccactcctgccggagcttcactggagtggtcgcaggcgcgaggactgctgttctcgccagctcctcagcccagacggctgcttcctggaccgcaagagaacagcgtgcagagctcagcttgtggtcggcagcaccttgaaccaaccgggaccattgacatgcggggtccgggccaggctgactgcgcggttgccatcggtcgcccactgggcgaggtggtgactctgcgcgtgctggagtcgtcactcaactgcagtgctggtgacatgctgctcctctggggacggcttacttggaggaagatgtgcaggaagctcctcgatatgaccttctcttcaaagaccaatacgctcgtggtgcggcaacggtgcggccggccgggaggtggcgtgttgctcaggtatggatcacagctggctccggaaaccttctatagagaatgcgacatgcaactcttcggaccatggggggaaattgtttccccatccctgtccccagcaacctcaaacgcaggcggttgtcgactcttcatcaacgtggccccgcacgctagaatcgcgatccacgcgctcgccactaacatgggggcaggcactgaaggtgcgaacgcatcctacattctgatcagggacacgcattcgctccggactaccgcttttcatggacaacaagtcctttactgggaatcggaatcatctcaagcggaaatggaattcagcgaagggtttctcaaggcgcaggcatccctccgcggacagtactggactctccaaagctgggtgccggaaatgcaggacccacagtcctggaaaggtaaggagggaacc

SEQ ID NO: 5675 - DNA, 4281 bp, synthetic construct
  misc_feature 1..4281: note = source = /note="Description of Artificial Sequence: Synthetic coding sequence"
  source 1..4281: mol_type = other DNA
atgcaccagcgacatccgcgagctcgatgcccccccttgtgcgtggcaggtattctcgcttgtggcttcctgctgggttgctggggcccctcccactttcagcagtcgtgtctccaggctttggagccacaggcagtgtcctcctatctctcgcctggcgcccccctgaaaggccgccccccctcacccggcttccagaggcagcgccaaaggcagcggagggctgcaggggggatactgcacttggagctcttggtggctgtggggcccgatgtgtttcaggctcaccaggaggataccgagcggtatgttttaactaacctgaacatcggtgctgaattgctgcgggatccgagtctgggggcacagttcagggtgcacttagtgaagatggtaatcctgactgaaccggagggagctcccaacattacagctaacttgacatccagtctgttgtctgtatgtggttggagccagacaataaaccctgaggacgataccgatccaggccatgccgatttggttctatacatcacccggtttgacctcgaactgcccgacgggaacagacaggttagaggagtgacacagctcggaggcgcatgctctcccacttggagctgcctcatcactgaggacacaggcttcgatctgggagtgaccattgcacacgaaatcggccactcctttggcctggaacacgatggagctcctggcagcgggtgtgggccatctggccacgtcatggcgtctgacggggcagcaccaagagcgggtttggcgtggtctccttgttctcgccggcagttgctttccctgttgtcagccgggcgggcacgttgcgtgtgggatccacccagaccccagcccgggtctgctgggcacccccccgacgcgcaacccggactctactactctgccaatgaacagtgcagggtcgctttcgggcccaaggctgttgcctgcaccttcgctcgagagcacctagatatgtgtcaggctctgtcgtgccacacggatcccctggaccagtcctcctgttcccgattactcgtccctctgctcgacggcactgagtgcggcgtggaaaagtggtgcagcaaggggcgatgtcgctctcttgtcgagctgacgccaattgccgcagtgcacggacgttggtcgagctgggggccaagatccccttgtagcagatcctgtggtggtggagtcgtaacacggcgacggcagtgcaacaatccccggcccgccttcggcgggagagcgtgcgtcggtgccgacttgcaggcagagatgtgcaacacgcaggcctgcgagaagacacagctggagtttatgtcccaacagtgtgctcgcactgacggacagcctctccgctcctccccaggcggcgctagtttctaccactggggggcagctgtgccacactctcagggtgacgctctgtgcaggcacatgtgccgtgccattggggaatcttttatcatgaaacgaggggactctttcctggacggaacccgctgtatgccttcgggccctcgggaggacggaaccttgtccttatgtgtaagtgggtcatgcaggaccttcggttgcgacggaagaatggactcgcagcaggtgtgggaccgttgtcaggtttgcggcggcgataactcgacctgctcacctcggaaggggagctttactgcaggtagggcccgggagtacgttacctttctgaccgttacgcctaacttgacctctgtgtacattgctaaccaccggccactcttcacgcacctggctgtccggattggaggcagatacgtggtggccggaaagatgtccatttcaccaaatacaacttatccttcacttctagaggatggtcgggtcgaataccgggtggctctgacggaagatcgtctccctcgcttggaagagattcggatctgggggcctttacaagaggatgcagacattcaggtataccggcgctacggggaggagtacgggaacctgacccgcccagacattacttttacctacttccagcccaagcctcggcaagcatgggtgtgggccgccgtgcgcggcccttgttcagtgtcgtgtggtgccggcctgaggtgggttaactattcttgtttggaccaggcacgtaaagagctcgtggaaacggttcagtgtcagggcagtcagcagccacccgcatggccggaagcttgtgtgctggagccttgtcctccctactgggccgtgggcgatttcggtccttgcagcgcatcttgcggcggtggactgagagaaagacccgtgcgttgcgtcgaggctcagggcagcctcctgaaaaccctcccaccggctaggtgccgggccggagcacagcagcccgcggtggccttggagacttgtaatccccagccatgccctgctcgttgggaggtgtctgaaccttcatcctgtacatctgccggaggagccggattggccttggaaaacgagacctgtgtaccaggagcagatgggctggaagcccctgtaacagaaggaccgggcagcgtggatgaaaaactgccagcacccgagccctgcgttggaatgtcctgccctccaggatggggccatctggacgcgacctcggctggcgagaaagcgcctagcccctggggatcaattcgaacaggcgctcaggctgcgcatgtttggacgcctgccgctggatcttgcagcgtgagctgcggccgaggcctgatggagctgagatttttgtgcatggactccgccttgcgcgtgccagtccaagaagagctctgcgggctcgcttcaaagccaggatctcggagagaggtttgccaggctgttccttgcccggctcgatggcagtataagctcgcagcatgctccgtttcatgcggtagaggggtggtgaggagaattttgtactgcgcacgcgctcatggggaagacgacggggaagagatccttctcgacacccagtgtcaaggactaccccgtcccgagccacaggaggcctgcagcttggagccatgcccccctaggtggaaagtgatgtccctgggcccttgctctgcgtcttgcggcttggggacagcccgccgttcagtggcatgcgtgcagctcgaccagggacaggatgttgaggttgatgaagccgcttgcgccgccctagtcagacctgaggcatccgttccttgcttaattgccgattgtacataccgctggcacgtaggcacctggatggagtgttctgtttcgtgcggggatggcattcagagaaggcgcgatacgtgcttggggccccaggcgcaggcacctgtcccggctgatttttgccaacatctgcctaagccagtgacagtaaggggctgttgggccgggccgtgcgtcggccagggcacaccctcgttagttcctcacgaggaggccgcagccccgggacgtaccacagcaacacccgcaggggcctccctggagtggagccaggccaggggccttttattctcacctgctccgcaacctaggaggcttctccccggtccacaggagaactctgtccagtcttccgcctgtggccggcagcatcttgaacccacagggaccatcgacatgagaggccctggccaggctgattgcgcagtggctatcgggagacccttgggcgaagtggtgaccctccgggtactcgaatccagcctaaattgtagtgcaggcgatatgctgctgctgtgggggcggttgacctggaggaagatgtgcagaaagctcctcgatatgacattctcctctaagactaacacgttagtcgtgaggcagagatgtggacgaccgggtgggggtgtacttctgagatacggatcccagttagccccggagactttctaccgggagtgcgacatgcagctatttgggccttggggggaaatcgtgagcccttccctctcacctgccaccagtaacgcaggcggctgtcgcctgttcataaatgttgctcctcacgcgcgtattgccattcatgccctagctacgaacatgggagccggaacagagggggccaatgcgtcatacattctgattcgtgacacccactctcttcgcaccacagccttccacgggcagcaggttctctactgggaatctgagagctcccaagccgaaatggaattttcagaaggctttctgaaggcgcaagcatccctgcggggtcagtactggactttgcagtcttgggtgcctgagatgcaggatcctcaatcctggaagggcaaagaagggact

SEQ ID NO: 5676 - DNA, 4281 bp, synthetic construct
  misc_feature 1..4281: note = source = /note="Description of Artificial Sequence: Synthetic coding sequence"
  source 1..4281: mol_type = other DNA
atgcatcagcggcatccccgcgcgcggtgtccgccgctttgcgtggctggcattttagcgtgcggttttctcttgggatgctggggcccttcgcacttccaacaatcctgccttcaggctcttgaaccacaggcagtgtcctcttacctcagtcccggcgccccactaaagggccgccccccgtctccgggtttccaacgccagaggcagcggcagcggcgtgcggctggagggatcctgcacctggagctcctcgttgccgtgggcccggacgtattccaggcccaccaggaggataccgagaggtacgttctgaccaatctgaatattggagccgagctactgcgcgaccccagcttgggagctcagttccgcgtgcacctggtgaagatggttatcttaacagagccggagggggctccgaatatcacggccaacctgacaagcagcctgttgtctgtgtgtggttggtcgcagaccatcaaccctgaggatgacactgatccggggcacgcagatctggtcttgtatattacaaggttcgacctggaactgcccgatggtaaccgtcaagtcaggggtgtgacgcaactggggggtgcctgctcaccaacatggtcctgccttataacagaggacacgggattcgacctaggcgtgacgattgcccacgagattggacactcctttggactggaacacgacggggcacccggcagtgggtgtggaccaagcggccatgttatggccagtgatggagccgcgccccgtgcaggcctggcctggtccccgtgcagtaggcggcaactcctttcattgctgagtgcgggtcgcgcgcgctgcgtgtgggatccaccgcggccccagccgggttcggcaggtcacccgccggacgcgcagccagggttgtattactccgcgaatgagcagtgcagagtggcttttggaccaaaggcagtggcctgcacattcgctcgcgagcatctggatatgtgccaagccctctcctgccacacagatccattggatcagtcgagttgttcacgcctcctggtgcccctgctggacggcactgagtgcggcgtcgaaaaatggtgctccaaggggcgctgccgctccttggtggagctcacacccatcgccgccgtccacggacggtggtccagttggggaccccgtagcccatgtagtaggtcttgcggcggaggcgtcgttaccagacgccgccagtgcaataacccgcgcccagcgttcggaggacgcgcgtgtgtgggcgccgacctgcaggccgagatgtgtaatacccaggcctgcgagaagacacagctggaatttatgagtcagcaatgcgcgcgtacagatggacagcccttgaggagttcacccggaggcgcgtcgttctaccactggggagctgccgtgccacattcgcagggagatgccttgtgcaggcatatgtgccgcgccatcggggagagcttcattatgaaacgtggcgatagcttcctggatggaactcgttgcatgcccagcgggccccgcgaagatggcaccctgagtttgtgtgtgagcggttcatgccgtactttcggctgcgacggccgcatggactcccagcaggtctgggaccgctgccaggtgtgcggcggtgacaatagtacctgttccccccgaaagggttcctttaccgcaggccgcgcgcgggagtacgtgactttccttactgtaaccccaaacctgacgtcagtgtatatcgctaaccaccgcccactattcacccatctggcggtacgaatcggcggacgctatgtggttgcgggcaagatgtccatcagccccaatacaacgtatccgtccctgcttgaggacggtcgggtggagtatcgtgttgctctgaccgaggataggctgccgcgcctggaggaaattagaatctgggggcctctccaagaggacgccgacatccaggtgtatcgccgctatggcgaagaatatggaaacctgacccggccggacatcacgttcacatatttccaaccgaagccacgccaggcctgggtctgggccgccgtccggggcccatgctcagtgagctgcggcgccggactccggtgggtaaattattcctgcctagaccaagcccggaaagagctagttgaaacggtacagtgccagggctcacaacagcctcccgcatggccggaggcatgtgttcttgagccctgcccaccatactgggccgtgggtgacttcggaccttgcagtgcctcttgcggaggaggtttgagggagagaccagtgcgatgcgttgaagcccagggaagcctattgaagacactgcccccagctcgctgccgcgccggtgcccaacagcctgctgtcgcgctagaaacgtgtaatccccagccgtgtccggcccgctgggaggtatcggaaccaagctcttgcacctccgctggcggggccggcctggcgcttgagaatgagacctgcgttcccggagctgatggactcgaggccccggttaccgaaggcccaggttctgttgatgagaagctgcccgcgccggagccctgcgtcggcatgagctgccctcccggttggggccacctggatgctacatctgcaggcgagaaggcgccgagcccatggggcagtatccggacgggcgcccaggctgcccatgtctggactcctgcagcgggcagttgctcagtgagctgcgggcggggactgatggagctacgcttcctatgcatggactcggcgttgcgcgtgccagtgcaggaagaactgtgcggcctggcttcgaagccaggtagtcgtcgcgaagtttgccaggctgtgccctgcccggcgcggtggcagtacaagttggctgcctgcagtgtgtcctgtggtcgcggggtggtgcgacgaatcctgtactgtgcgagagcccacggagaggatgacggagaggagattcttctggatacccaatgccaaggcctgccacgccctgagccgcaggaagcctgtagcctggaaccgtgcccgccacggtggaaggttatgtccctcggaccgtgctcagcgagctgtggcctcggcacggcgcgacgctccgttgcttgcgtacaactagaccaagggcaggacgttgaggtggatgaagcggcctgcgccgccctggttagacccgaggcgagcgttccctgcctcatcgcagattgtacttacaggtggcacgtcggaacatggatggaatgtagtgtatcgtgcggagacggcatccaacgtcgacgcgacacctgcctgggtccgcaggcgcaggctccagtccccgctgatttttgccaacatctaccaaaaccggtgacagtacgaggatgctgggccggcccctgcgttgggcagggaacgccgtcgctggtgccgcatgaagaggccgctgcccccgggcgtacgacagcaacaccggctggtgcctccctagagtggtcccaagctcgtggcctgctgttttcgccggctccacagccgcgaaggttgctgccaggccctcaagaaaactcggtccagtcctccgcctgtggacggcagcacctcgaacctaccggcacgatagatatgaggggaccgggtcaggctgactgtgctgtggccattggccgacccctgggtgaagtggtcaccctaagggtattggaatcctccttaaactgctccgccggcgatatgcttctgctgtggggacgccttacctggcgaaagatgtgtcgcaagttactggacatgacgttctcctcaaaaacaaacacgctggtggttaggcagcggtgcggaaggcccggaggcggggtcctactgaggtatggctcccagcttgctcccgagacgttctaccgcgagtgcgatatgcagctgttcggcccatggggggagatagtgtccccgtcgttgagccccgctacgagcaatgccggaggctgtcgtctgttcataaacgtagccccccacgcgcgtattgcaatacacgccctggctacaaatatgggcgcaggcactgagggcgccaacgcttcctatatcctgatccgggacacacatagtctccgcaccacggcgttccatggccagcaggtgttatactgggaatccgagtcaagccaggccgaaatggaatttagcgagggatttctgaaggcccaggcctcactgcgcggccagtactggaccctgcagtcgtgggtacctgagatgcaggatccgcaatcctggaagggaaaggagggtact

SEQ ID NO: 5677 - DNA, 4281 bp, synthetic construct
  misc_feature 1..4281: note = source = /note="Description of Artificial Sequence: Synthetic coding sequence"
  source 1..4281: mol_type = other DNA
atgcatcagaggcacccgcgggctaggtgcccgccgttgtgcgtcgcgggaatcctcgcttgtggatttttgctcgggtgttggggaccgagccatttccagcagtcctgcctgcaggctcttgaaccacaggccgtctcgtcatacctcagtccgggggccccgctgaaaggccgccctccatcgccgggatttcagcgccagcgccaacgacagagaagggcagccggaggcatcctccatcttgagctgctcgtggctgtgggtcctgacgtgttccaggcccaccaagaggacaccgagcgctacgtgctgactaatctgaacatcggcgcggaactcctccgtgatccaagcctgggagctcagttccgcgtgcaccttgttaagatggtgatcctgaccgagccagaaggcgctccaaacattaccgccaacctgaccagctccttgctgtcggtgtgtggttggtcgcagaccattaatccagaggatgacaccgatcctggccacgctgatcttgtgctctacatcactcgtttcgacctggaattgccggacgggaaccgccaggtgcgcggagtgacccaactgggtggcgcctgcagcccaacgtggtcgtgtctgattactgaagatacggggtttgatctgggagtgactatcgcgcacgaaatcggacactcgttcggtctggaacacgacggcgcaccggggtcaggatgcggcccgtcgggacatgtcatggcatcggacggagccgcgccaagagccggccttgcttggtcgccttgctcacgccgccaactgctgagcctgctgtcggctggaagggcacgctgcgtgtgggacccgccgcggccgcaaccgggatccgcagggcacccaccggatgcccaacctggactgtactatagcgccaacgaacaatgccgggtggctttcggacctaaagccgtggcgtgcaccttcgcgagagaacacctggacatgtgtcaggccctgagctgtcatacggacccgctggatcaatcgtcttgcagtcgactgttggtgccgctgctggacggaactgagtgcggcgtggagaagtggtgttcaaagggccgctgccggtcactggtggaactcacccctatcgcagcagtgcacggccggtggtcgtcctggggtcctaggagcccttgttcacggtcctgcgggggaggagtggtgactcgccggagacagtgcaacaatccgcggccagcgttcggcggacgggcctgtgttggcgctgacctccaagccgaaatgtgcaatacccaggcttgcgaaaagactcagctggaattcatgtcacaacagtgcgctcggaccgacggacaaccgctgaggtcgtccccgggaggtgcctccttctaccactggggagctgcagtgcctcattcacagggggatgctctttgtagacatatgtgtcgggcaattggggagtccttcatcatgaagcgcggagactcgtttcttgacggcacgcggtgcatgccgagcggtccgagagaggatggtaccctgtcgctgtgtgtgtcgggttcctgtcggacctttggatgcgacggacggatggactcccagcaggtgtgggaccggtgccaagtgtgtggaggggacaactccacttgttccccgcggaagggatcctttactgccggaagagctcgggagtacgtgaccttcctcaccgtgactcctaacttgacctcagtgtacatcgcgaaccaccggcccctcttcactcatctggcggtgcgcatcggtggacggtacgtcgtggccggtaagatgtcaatctccccaaataccacctacccgtctctgcttgaagatggacgggtggaataccgcgtggctctgaccgaagatagactgccacggctcgaggagatcagaatctggggtcctctgcaggaagatgccgacattcaagtctatcggcggtacggcgaagagtacggcaacctgactagaccagacatcacgtttacctacttccagcctaagccccggcaggcttgggtgtgggcggccgtgcggggcccgtgctcagtttcctgcggggcgggccttagatgggtgaattactcctgcctggaccaggcgagaaaagaacttgtggaaacggtacagtgccaaggatcacagcagccgcctgcctggcctgaagcctgcgtcttggaaccatgtccgccttactgggcggtgggagacttcggaccatgctcggcttcatgcggaggtgggctcagggaacggccggtccgctgcgtcgaagcgcaaggctctttgcttaagactcttccgccggcgcggtgcagagctggagcccagcagcccgcggtggcactggaaacctgcaaccctcagccttgcccggctcggtgggaagtgtcagaaccttcctcttgcactagcgccggcggcgccggactcgccctggagaacgaaacctgcgtgccaggcgccgacggtctggaagcgcctgtgaccgaaggtcctggaagcgtggatgagaagctgccagcaccagagccgtgcgtgggtatgtcctgccccccgggatggggtcatctggacgctactagcgcgggggaaaaggccccgtcgccttgggggtccatccgaaccggggcccaggccgcacacgtgtggaccccggccgccggctcgtgctccgtgtcgtgtgggcgaggactgatggagctgcgctttctgtgtatggattccgccctgcgggtgcccgtgcaggaagagctctgcgggttggcctccaagccaggatcacgccgggaagtctgtcaagccgttccatgtccagcccgctggcagtacaaattggctgcttgcagtgtgtcctgcggcaggggggtcgtcaggcggatcctgtactgtgctcgggcgcatggagaggacgacggagaggaaatcctgctcgacactcaatgccagggactgccgcgcccggagccgcaggaggcatgctcgctggaaccgtgcccaccgcgctggaaggtaatgagccttggcccctgctcggcgtcgtgcggccttggaactgccagacgatcggtcgcctgtgtgcaactcgatcaaggccaggacgtcgaggtggacgaagcggcatgcgccgccctggtgcgaccggaggccagcgtgccatgcctgattgcagactgtacttacaggtggcatgtcgggacctggatggaatgttccgtctcatgcggggacggaatccaacggcgcagagacacttgtctcggcccacaggcccaggctccggtgccagccgacttctgccaacatctgcctaaacctgtgaccgtgcgcggctgctgggcgggcccctgcgtgggacaaggtacccccagcctggtgccgcatgaagaagcggcggcgcccgggaggactactgcgactccagccggtgcctccctggagtggtcacaggccagaggactgcttttctcgccggcaccacaaccacggcggctgctcccagggccgcaagaaaacagcgtccagtcaagcgcatgtggtaggcagcacctggagccgactggaaccatcgacatgcgcggaccgggtcaggccgattgcgcggtggcaatcggtaggccactgggagaagtcgtgaccctccgcgtcctcgaaagctctctgaactgcagcgcaggagacatgctgctgctgtggggtcgcctgacctggcgaaaaatgtgccggaagctgcttgatatgaccttttcgtccaagactaatactctggttgtgcgacaaagatgtggacggcccggagggggcgtgctgctccgttatggctcgcagttggcacctgaaactttctaccgcgaatgcgatatgcagctgttcggaccttggggtgagatcgtctcgccgtcactgagcccggctacttccaatgcaggaggatgcaggctctttatcaacgtggcaccgcatgctcgcatcgctatccatgcattggccactaacatgggagcaggaactgaaggcgcaaatgcgtcgtacattttgatccgcgatacccactcgcttaggaccactgctttccatggacaacaggtgctttactgggaatcggaatcgtcccaggcggagatggagtttagcgagggcttcctgaaggcgcaggctagtctgcggggccagtactggacgctccaatcttgggttccagaaatgcaggatccccagtcatggaaaggaaaggaagggacc

SEQ ID NO: 5678 - DNA, 4281 bp, synthetic construct
  misc_feature 1..4281: note = source = /note="Description of Artificial Sequence: Synthetic coding sequence"
  source 1..4281: mol_type = other DNA
atgcatcaacgccacccaagggccagatgtccgccgctctgcgtggcgggaatcctcgcttgtggattcctcctggggtgttggggtccgagccactttcagcagtcctgcctgcaggccctcgagccgcaggccgtgtcgtcctacctgagccctggcgccccgctgaaggggaggccgccgtcccctggattccagcggcaacgccaaagacagcgacgggccgcgggcggaatcctccatcttgaactgctcgtggcagtcgggccggacgtctttcaggcgcaccaggaagatactgaaagatacgttttgaccaaccttaacatcggtgccgaactgcttcgcgacccatctctgggagcccaattccgggttcatctggtgaagatggtgatcctgactgaaccagaaggagcccctaacattactgcgaacctgacgtcgtcgctgcttagcgtgtgcggttggagccaaactatcaaccccgaggacgacactgaccctggacatgccgatctggtcctgtacatcactcggttcgacctggaactcccagacgggaacaggcaggtgagaggcgtcactcagttgggaggagcttgcagccccacctggtcctgcctcatcaccgaggacaccggcttcgacctgggagttactatcgcccatgaaatcggccactcattcggcctcgaacacgacggggcccctggctcgggatgcggaccctcggggcatgtgatggcttcggatggtgcagccccacgggctggacttgcatggtcgccgtgcagcaggcgccagcttctgtcccttctctccgcggggagagcgaggtgtgtgtgggatcctccgcggccgcagcctggctcggctggacacccgccggatgcgcaaccgggcctgtactactcggccaacgaacaatgtcgggtggcgtttggacccaaagcggtggcgtgcaccttcgctcgagaacatctcgacatgtgccaggcactgtcctgccataccgatccactcgaccagtccagctgctcgagactgctggtcccactgctggacggaactgaatgcggcgtcgaaaagtggtgctcgaagggacggtgcagatcgctggtggaactgacccctatcgccgccgtgcacggaaggtggtcctcatggggtccacggtcaccttgctcccggagctgcggcggcggggtggttactagacgcaggcaatgcaataatccgcgcccggccttcggaggacgggcgtgcgtcggagctgacttgcaagccgagatgtgcaatacgcaggcttgtgaaaagacccaacttgagttcatgagccagcagtgcgcccggaccgacggacaaccgctgagaagttcgccggggggtgccagcttttaccactggggcgccgcggtccctcattcgcaaggcgatgcactgtgccgacacatgtgccgcgctatcggggagtcgtttatcatgaaacgcggcgactctttcttggacggtacgagatgtatgccttcaggtccgagagaggacggaactctgtctttgtgcgtttcgggttcctgtcggaccttcggatgtgatggccggatggactcacagcaggtgtgggatcgctgccaggtgtgtggaggggacaatagcacctgttcgccacggaagggatcctttaccgccgggcgcgccagagaatatgtgactttcctgaccgtgactccaaacctcaccagcgtctacatcgctaatcaccgccccctgtttactcatttggcggtgcgcatcggaggccggtacgttgtcgctggaaagatgagcatctcaccgaacacgacttacccgtcccttctcgaggacggacgggtggaatacagagtggctctcactgaagatcgactgccaaggctggaagaaatcagaatctgggggcccctgcaggaagatgcagacattcaggtgtatcggcggtacggagaagagtatggaaacctgacgcggccagatatcaccttcacgtacttccagccgaagccccggcaggcgtgggtgtgggcagcggtgcggggaccgtgctcagtgtcgtgcggcgccggcctgagatgggtgaactactcgtgtctggaccaggctaggaaagaacttgtcgagactgtgcaatgccagggatctcagcaaccccctgcgtggccggaggcgtgcgtgctcgagccctgtccgccttactgggcagtgggagatttcggaccatgttcggcgtcatgtggcggaggacttagagagaggccagtcagatgtgtggaagcccagggaagcctgctgaaaaccctcccgccagcacgctgccgggcaggagcacaacagcctgcggttgcgcttgagacttgtaatccacagccatgcccggcccgctgggaagtaagcgagccgtccagctgcacgtcggcaggaggcgcgggactcgccctggagaatgagacgtgcgtgccaggagccgacggtcttgaagcaccggtcacggagggccccggatccgtggatgagaagctgccagcccctgagccatgcgtgggaatgtcctgccctcctggatggggacacctggacgccacctccgcaggtgaaaaggcgccgtcgccttggggctctataagaactggtgcccaggccgcacacgtgtggacccctgccgccggaagctgttcggtgagctgcgggcgcggactgatggaactgaggttcttgtgtatggactccgccctgagagtgccagtccaggaagagctctgcggattggcctccaagccgggaagcaggcgcgaggtctgccaggctgtcccctgcccggcccggtggcagtacaagctggcagcttgctcagtgtcatgcggcagaggagtcgtccggcgcatcctgtactgtgcccgggcccacggcgaggacgacggagaagaaatcctgctggacactcagtgccagggcctcccgcggccggagccgcaagaggcctgctcacttgagccttgccctccacgctggaaggtgatgtcgttgggaccttgttcagcgtcgtgtgggttggggactgcccgccgctcagtggcctgcgttcagctcgaccaaggacaagatgtggaggtggatgaagccgcatgcgctgcactggtaagaccagaggcgtccgtcccgtgcctcattgctgattgcacctaccgctggcatgtgggcacctggatggaatgctctgtgagctgcggtgacgggatccaaagaagaagagacacctgcctcggaccgcaggcgcaggcccccgtgccggccgacttctgccagcacctgccgaagccggtcaccgtgcgcggctgctgggccggcccgtgcgtcgggcaaggcactcctagcctcgtgccccacgaagaggccgccgccccgggcagaactactgctactccggcgggcgcttcgctggaatggagccaggcgcgaggactcctgttctccccggcgccccaaccccggagacttctgcctggaccccaagagaactctgtgcaatcaagcgcgtgcggaaggcagcacctggaaccgactggaacgatcgacatgcgaggcccgggccaggcagactgtgcggtggctatcggacggccgctgggagaggtcgtgactctccgcgtcctggagtcctcattgaattgcagcgcgggagatatgctcttgctctgggggaggctcacctggaggaaaatgtgccggaagctcctggatatgactttctcgagcaaaactaataccctggtggtgagacagcggtgtggacgcccggggggaggcgtcctgctcaggtacggatctcagctggcgccggaaaccttttatcgcgaatgtgacatgcagctctttggcccgtggggcgagatcgtctccccatcactcagcccggccaccagcaacgccggtggctgccggctgttcatcaatgtggccccgcatgcgagaatcgccatccacgcgcttgccactaatatgggagcagggactgaaggagcaaacgcttcatacattcttatcagagacacccatagcctgcgaaccactgcattccacggtcagcaggtgctgtactgggaaagcgaatcgtcgcaagcagaaatggagttttccgaaggattccttaaggcccaggccagcctgcgggggcagtactggactctgcaatcctgggtgcccgaaatgcaggacccacagtcgtggaagggaaaggaaggcacc

SEQ ID NO: 5679 - DNA, 4281 bp, synthetic construct
  misc_feature 1..4281: note = source = /note="Description of Artificial Sequence: Synthetic coding sequence"
  source 1..4281: mol_type = other DNA
atgcaccaacgccaccctcgcgcccggtgtccccccctgtgcgtggcggggatactcgcttgcggttttttgcttgggtgttggggaccttcgcatttccagcagtcgtgcctgcaggccctggaacctcaggcagtgagttcatatttgtcgcctggcgcacccttgaaaggcaggccaccatcacctggcttccagaggcagaggcagcggcagcgtcgggcagccgggggtatcctgcatctggaactgctggtggcagtgggacctgatgtgttccaggctcatcaggaggacactgagcggtacgtgcttaccaaccttaatatcggagctgagcttcttcgtgatccctcgctgggagcccagttcagagtccacctcgtgaaaatggtcattcttaccgagcctgagggcgcacctaatatcaccgccaatctgactagttctttgctgagcgtctgtgggtggagccagactatcaaccccgaagacgataccgaccctggccatgccgatctagtcctgtacattacacggttcgacctcgagctccccgatggcaacaggcaagtgaggggtgtaacccaactcggtggagcttgctccccaacatggtcctgcctcattaccgaggataccggatttgacctgggggtcaccattgcgcatgaaataggacacagcttcggccttgagcacgatggcgctcctggtagcggctgcggaccgtcaggacacgtcatggcatctgacggtgctgctccccgggccggcttggcgtggtctccttgttctagaaggcaactgctgagcctgctaagcgctggccgtgcccggtgcgtgtgggatcctcccagacctcagccaggtagtgccgggcatcctcccgacgcccagccagggttatattattcagcgaacgagcaatgccgcgtcgcattcggaccaaaagctgtagcctgcaccttcgcgagagagcacctcgacatgtgccaggccctctcctgtcataccgacccactggatcagtcgtcctgtagtaggctgttggtcccccttcttgacggcacggaatgtggggtggaaaagtggtgtagcaaaggtcggtgccgttccctggttgagttgacacccattgcagccgttcacggaaggtggagctcctggggaccccgcagcccatgctcaagatcatgcgggggaggtgtggtgacccgccgccggcaatgtaacaatccgcgaccggccttcggcgggcgcgcctgcgtgggggctgacttacaggccgaaatgtgcaatacccaggcctgcgagaagacccagttagaattcatgagtcagcaatgtgcacgaaccgatggccagccattgcgaagctcaccaggcggcgctagtttttatcattggggagcagctgtgccgcatagtcagggcgacgctctctgccggcatatgtgccgggctattggggagtcatttatcatgaagagaggggatagctttctggacgggacacgctgcatgcccagtggaccaagggaggacggaactctctccctgtgtgtttctggctcttgtcgcaccttcgggtgtgacggcagaatggatagtcaacaggtttgggataggtgccaggtgtgcggcggggataatagtacctgtagtccaagaaagggtagctttaccgccggaagggcacgcgaatacgtgaccttcctgacggtaacccctaatttaactagcgtatatatcgcaaaccaccgccctctctttacacacctggccgtgagaatcggtggacggtacgttgtggccggcaagatgtctatctctccgaacactacatatccgtcattacttgaggacggccgggtcgaatacagggtagcgctaaccgaggaccggcttcccaggctggaagagatacggatatgggggccattgcaagaggacgccgatattcaagtataccggcggtatggcgaggagtacggtaatctgactcggcccgatataacgttcacgtactttcagcctaagcctagacaggcttgggtttgggccgccgtgagagggccatgctcagtctcttgcggagccggcttgcggtgggttaattactcatgtcttgatcaggctcgcaaggagcttgtcgagacagtgcagtgtcaaggaagtcagcagccccccgcttggccggaagcgtgcgtgctggagccatgccccccatactgggcggtaggcgattttggaccctgctccgcaagctgtgggggtggactgcgcgagcgtcctgttaggtgtgttgaggcacagggctctctgttgaagaccttgccgccagctaggtgtcgtgcaggtgctcaacagccggcagtggcattggagacgtgtaacccccagccttgtcccgccaggtgggaggtatctgagccttcgtcttgcacctcggcagggggggccggcctagcactggagaacgagacctgcgttcccggagctgacgggctagaggcgcctgtgacggagggtcctgggtccgtggatgagaagctccctgcacccgagccttgcgtgggaatgtcctgtccgccaggctggggccacctggacgctacttcggcgggggagaaggccccgagtccatggggatcaattaggacaggggctcaagccgcgcacgtctggacacccgctgcaggttcgtgttcggtgtcctgtgggcgcgggttaatggagcttaggtttttgtgtatggactccgctttgcgagtgccagttcaggaggagctgtgcggactcgcttccaagcctggctcccgccgggaggtgtgccaggctgtcccgtgccccgccagatggcagtacaagctggcagcatgctcagtctcttgtgggcggggtgtggtgaggagaattctgtactgcgcccgggcacatggagaagacgacggtgaggagattctcctggatacacagtgtcagggcttgcctcgcccagaaccccaagaagcctgttcactagagccttgtcccccccgctggaaggtcatgtctctcgggccctgttcagctagttgtggcctgggtacagccagaagatctgtggcctgcgtccaactcgaccagggccaggacgttgaagtcgatgaggccgcctgtgcagctcttgtgcgacctgaggcttcggtgccctgcctgatcgctgactgcacgtacagatggcacgttggtacttggatggagtgtagtgtcagctgtggggatgggattcagcgccggcgtgacacctgtctgggacctcaggctcaggcaccggtgcctgcagacttttgtcagcacttgcccaaacctgtgactgtccgaggatgctgggctggcccatgtgttgggcaaggcacacccagtcttgtgccgcatgaggaagcagctgccccaggccggaccacagcgacccccgccggagctagcctggaatggagccaagctcgaggccttttgttcagccctgctccccagccccgccgcctgctgccagggccacaggaaaactcagtgcagagctccgcatgtggacgccaacacctggagcccactgggacgatcgatatgagaggtcctggacaggctgactgtgccgtggcaattggacgaccattgggtgaggtagtgactctccgggtgttggaaagttctctgaactgtagcgccggagacatgctgctcctgtggggacgcctcacttggcgcaaaatgtgtcggaaactcctggacatgacatttagcagcaagacaaacacgctcgtcgtgagacagaggtgtgggcggccaggaggcggagtccttctccgttacgggtcccagctggccccagaaacattttacagggaatgtgatatgcaactgtttggcccatggggggagattgtctcaccttcccttagccccgccacgtctaacgccgggggatgccgacttttcatcaacgtggcaccacacgcccgcatcgcaatccatgcgttggcgacaaacatgggagcaggtacagagggggccaacgccagttacatcctcatcagagacacacattctttacggaccacggcctttcatggacagcaggtgttgtactgggagagtgaatcctctcaggcagaaatggagttttctgagggttttctgaaggctcaagcttcattacgtgggcagtattggactctccagtcttgggttcccgaaatgcaggacccccagtcctggaagggaaaggagggaact

SEQ ID NO: 5680 - DNA, 4281 bp, synthetic construct
  misc_feature 1..4281: note = source = /note="Description of Artificial Sequence: Synthetic coding sequence"
  source 1..4281: mol_type = other DNA
atgcatcaacgacatccgcgtgcgcgatgtccgccgttatgtgttgcgggtatattagcgtgtggttttttactaggttgttggggtccgtcgcattttcaacaatcgtgtttacaagcgttagaaccgcaagcggtatcgtcgtatctatcgccgggtgcgccgttaaaaggtcgaccgccgtcgccgggttttcaacgacaacgtcaacgtcaacgtcgagcggcgggtggtatattacatctagaattattagtagcggttggtccggatgtttttcaagcgcatcaagaagatacggaacgttatgtattaacgaatctaaatataggtgcggaattactacgagatccgtcgctaggtgcgcaatttcgtgtacatttagtaaaaatggtaatactaacggaaccggaaggtgcgccgaatataacggcgaatctaacgtcgtcgttattatcggtatgtggttggtcgcaaacgataaatccggaagatgatacggatccgggtcatgcggatttagtattatatataacgcgttttgatttagaactaccggatggtaatcgacaagtacgtggtgtaacgcaactaggtggtgcgtgttcgccgacgtggtcgtgtctaataacggaagatacgggttttgatttaggtgtaacgatagcgcatgaaataggtcattcgtttggtctagaacatgatggtgcgccgggttcgggttgtggtccgtcgggtcatgttatggcgtcggatggtgcggcgccgcgtgcgggtttagcgtggtcgccgtgttcgcgtcgtcaattattatcgctattatcggcgggtcgagcgcgttgtgtatgggatccgccgcgtccgcaaccgggttcggcgggtcatccgccggatgcgcaaccgggtctatattattcggcgaatgaacaatgtcgagttgcgtttggtccgaaagcggttgcgtgtacgtttgcgcgagaacatttagatatgtgtcaagcgttatcgtgtcatacggatccgttagatcaatcgtcgtgttcgcgattattagtaccgctactagatggtacggaatgtggtgttgaaaaatggtgttcgaaaggtcgatgtcgttcgctagttgaattaacgccgatagcggcggtacatggtcgatggtcgtcgtggggtccgcgatcgccgtgttcgcgttcgtgtggtggtggtgtagtaacgcgacgtcgacaatgtaataatccgcgtccggcgtttggtggtcgagcgtgtgtaggtgcggatctacaagcggaaatgtgtaatacgcaagcgtgtgaaaaaacgcaattagaatttatgtcgcaacaatgtgcgcgaacggatggtcaaccgttacgatcgtcgccgggtggtgcgtcgttttatcattggggtgcggcggtaccgcattcgcaaggtgatgcgctatgtcgtcatatgtgtcgtgcgataggtgaatcgtttataatgaaacgaggtgattcgtttctagatggtacgcgttgtatgccgtcgggtccgcgagaagatggtacgttatcgttatgtgtatcgggttcgtgtcgtacgtttggttgtgatggtcgaatggattcgcaacaagtttgggatcgatgtcaagtatgtggtggtgataattcgacgtgttcgccgcgtaaaggttcgtttacggcgggtcgtgcgcgtgaatatgttacgtttttaacggtaacgccgaatttaacgtcggtttatatagcgaatcatcgaccgctatttacgcatttagcggttcgtataggtggtcgttatgtagtagcgggtaaaatgtcgatatcgccgaatacgacgtatccgtcgttattagaagatggtcgagttgaatatcgtgtagcgctaacggaagatcgtctaccgcgactagaagaaatacgtatatggggtccgttacaagaagatgcggatatacaagtatatcgacgatatggtgaagaatatggtaatctaacgcgaccggatataacgtttacgtattttcaaccgaaaccgcgtcaagcgtgggtatgggcggcggttcgtggtccgtgttcggtttcgtgtggtgcgggtctacgatgggtaaattattcgtgtctagatcaagcgcgtaaagaattagttgaaacggtacaatgtcaaggttcgcaacaaccgccggcgtggccggaagcgtgtgttttagaaccgtgtccgccgtattgggcggttggtgattttggtccgtgttcggcgtcgtgtggtggtggtttacgtgaacgtccggttcgatgtgttgaagcgcaaggttcgctattaaaaacgttaccgccggcgcgttgtcgtgcgggtgcgcaacaaccggcggttgcgttagaaacgtgtaatccgcaaccgtgtccggcgcgatgggaagtttcggaaccgtcgtcgtgtacgtcggcgggtggtgcgggtttagcgttagaaaatgaaacgtgtgttccgggtgcggatggtttagaagcgccggttacggaaggtccgggttcggtagatgaaaaattaccggcgccggaaccgtgtgtaggtatgtcgtgtccgccgggttggggtcatctagatgcgacgtcggcgggtgaaaaagcgccgtcgccgtggggttcgatacgaacgggtgcgcaagcggcgcatgtatggacgccggcggcgggttcgtgttcggtatcgtgtggtcgaggtttaatggaattacgttttttatgtatggattcggcgctacgtgtaccggttcaagaagaattatgtggtctagcgtcgaaaccgggttcgcgacgtgaagtatgtcaagcggtaccgtgtccggcgcgttggcaatataaattagcggcgtgttcggtttcgtgtggtcgaggtgtagtacgtcgtatattatattgtgcgcgagcgcatggtgaagatgatggtgaagaaatattattagatacgcaatgtcaaggtttaccgcgtccggaaccgcaagaagcgtgttcgctagaaccgtgtccgccgcgttggaaagttatgtcgttaggtccgtgttcggcgtcgtgtggtctaggtacggcgcgtcgatcggtagcgtgtgtacaactagatcaaggtcaagatgttgaagtagatgaagcggcgtgtgcggcgctagtacgaccggaagcgtcggttccgtgtctaatagcggattgtacgtatcgatggcatgtaggtacgtggatggaatgttcggtatcgtgtggtgatggtatacaacgacgtcgtgatacgtgtctaggtccgcaagcgcaagcgccggtaccggcggatttttgtcaacatctaccgaaaccggttacggtacgaggttgttgggcgggtccgtgtgtaggtcaaggtacgccgtcgttagtaccgcatgaagaagcggcggcgccgggtcgtacgacggcgacgccggcgggtgcgtcgctagaatggtcgcaagcgcgaggtttattattttcgccggcgccgcaaccgcgtcgtctattaccgggtccgcaagaaaattcggttcaatcgtcggcgtgtggtcgacaacatttagaaccgacgggtacgatagatatgcgaggtccgggtcaagcggattgtgcggttgcgataggtcgtccgctaggtgaagttgtaacgttacgtgtactagaatcgtcgctaaattgttcggcgggtgatatgttattattatggggtcgactaacgtggcgaaaaatgtgtcgaaaattactagatatgacgttttcgtcgaaaacgaatacgctagtagtacgtcaacgatgtggtcgaccgggtggtggtgttctattacgttatggttcgcaattagcgccggaaacgttttatcgagaatgtgatatgcaattatttggtccgtggggtgaaatagtatcgccgtcgctatcgccggcgacgtcgaatgcgggtggttgtcgattatttataaatgtagcgccgcatgcgcgaatagcgatacatgcgctagcgacgaatatgggtgcgggtacggaaggtgcgaatgcgtcgtatatattaatacgagatacgcattcgctacgtacgacggcgtttcatggtcaacaagtattatattgggaatcggaatcgtcgcaagcggaaatggaattttcggaaggttttttaaaagcgcaagcgtcgctacgaggtcaatattggacgttacaatcgtgggttccggaaatgcaagatccgcaatcgtggaaaggtaaagaaggtacg

SEQ ID NO: 5681 - DNA, 4281 bp, synthetic construct
  misc_feature 1..4281: note = source = /note="Description of Artificial Sequence: Synthetic coding sequence"
  source 1..4281: mol_type = other DNA
atgcatcagaggcaccctagagcgaggtgccctcctctgtgtgtggctggaatcctcgcctgtggcttccttctcggctgctggggaccgtcgcacttccaacagtcctgcttgcaggcactggaaccccaggcggtgagttcatatctgtcaccaggggctccacttaaaggcagacctccatccccaggctttcaaagacaaaggcagaggcagcgaagagccgcaggcggaattctgcatttggagctgcttgtggccgtggggcccgatgtgtttcaggcccaccaggaagacacggagaggtacgtgctcacaaatctcaacataggggccgaactactcagggatccgtcgctcggggctcagtttagggtccatttggtcaaaatggttatcctgacagagccagagggggcgccaaacattactgccaacctcactagctcgctgcttagtgtgtgcggatggagtcagacgatcaacccggaggacgacacggacccaggacatgccgatcttgtcctctacattacacggttcgacttggaattgcctgatggcaaccgccaagtcaggggtgtgacccagctgggcggcgcgtgctctccaacctggagttgcttgattactgaggatacagggttcgatttgggggtcaccattgctcacgaaatcgggcactctttcggcttggagcacgatggagctccaggttccggatgtgggccttcaggacacgtgatggcaagtgatggtgccgctcctcgtgccggcctcgcgtggtctccgtgcagcaggcgccagctcctatcgctcctgtcagcggggcgggccaggtgtgtctgggatcctccgcggccacagcctgggtcagctggacaccccccggatgcccagcctgggctctattactccgccaacgagcagtgtcgagtcgcctttggcccaaaggcggtggcctgcacattcgcgcgagagcatctggacatgtgccaggccttgagttgccatactgatcccctcgaccagtcaagttgctcccgattactggttccgctcctcgacgggactgaatgtggtgttgagaaatggtgttcaaaaggtcgatgtcgaagtctggtggaactcacccctattgccgcagttcacggtagatggtcctcttgggggccgagatcgccctgcagcagatcatgcgggggcggagtcgtgactcgaaggcgacagtgtaacaaccctcgcccggcctttggggggagagcctgcgtgggtgctgaccttcaagctgaaatgtgcaacactcaggcgtgtgaaaagacccaactcgaatttatgtctcagcaatgcgcccgcaccgatggccagcctcttaggagctcccccgggggagcgtccttctatcattggggcgccgctgtgccccacagccagggagatgccctgtgccggcatatgtgcagggcgataggcgagagttttatcatgaagcgtggcgactcttttctggacggcacacgatgcatgccgtctggcccccgtgaggacggaacactgtccctgtgcgtgtctggaagctgtaggacctttggatgtgatggccgaatggattcacagcaggtctgggatcgatgtcaggtgtgcggtggcgataactcgacatgttctccaaggaaggggtctttcacagccggacgtgcgagggaatatgtaacctttctgaccgttaccccaaacttgacttcagtttatatagccaaccataggcctctctttacgcatctcgcagtacgcattggtgggagatatgttgtcgcaggtaagatgagcatcagcccgaacactacctaccccagcctcctggaggacggcagagtggagtatagagtcgctttaaccgaggatcgcctgcccagattagaagaaatcagaatatggggtcctctgcaggaggatgctgatattcaggtttatcgaagatatggcgaggaatatggaaacttaacaaggcccgatatcacattcacgtattttcaacctaagccccgtcaggcttgggtgtgggctgctgtgcgagggccctgtagcgtgagttgtggagccggactaagatgggtgaactacagttgtcttgatcaagcccgtaaggaactagtggaaacggtgcagtgccaagggtcccagcagccgcccgcatggccagaggcctgtgtgcttgagccttgtcccccatactgggccgttggtgactttggaccgtgctcggcctcatgcggcggagggttgcgagagagacctgtgcgatgcgtggaagctcaggggagcctgctcaagacacttccccccgcccgctgcagggccggggcacagcagcccgctgtggcactggaaacgtgcaaccctcagccctgtcctgcaagatgggaggtttctgagcccagcagctgcacctctgcaggtggcgcgggcctagccctggaaaatgaaacatgtgtgcctggagctgacgggctcgaggccccagtgacggaggggccgggcagcgtggacgaaaaactgccggcaccggaaccctgcgtaggtatgtcttgtcccccgggctgggggcatttagacgcgacttccgcaggagagaaggcaccttccccttggggttcaatccgaactggcgctcaggcggcacatgtgtggacccccgcggcggggtcatgcagtgtaagctgcggtaggggtctaatggaactgaggttcttatgcatggactctgccttgcgagtaccagtccaggaagaactctgcggtctcgcctctaagcctgggtcaagacgagaagtgtgtcaggcggtgccttgccctgcaagatggcagtacaagctggcggcatgttcagttagctgtggaaggggcgttgtccgaaggattctgtactgcgcacgtgcccacggcgaagatgacggtgaagagatacttctcgatactcaatgtcaggggttgccaagacctgagcctcaggaagcctgcagcctcgaaccttgcccacctagatggaaagtgatgtccctggggccttgttcagcctcatgcgggctggggactgctcgaaggagcgtggcttgtgtacagctggaccagggccaagatgtggaagtcgacgaggccgcatgcgctgccctcgttcgtccagaggcatccgtgccctgcttaattgcggactgtacatacaggtggcacgtgggtacatggatggaatgcagtgtgtcctgtggagacggcatccagcggaggagggatacctgcctgggaccacaggcccaggcgcccgtgcccgcagatttttgtcagcacctgccaaaaccggtgaccgtgcgaggatgctgggctggaccctgcgtgggccagggcactccaagtctagtcccacacgaagaggccgcagcaccagggcgaaccactgctactccagcaggagcttccctggagtggtctcaggcccgtgggcttctgtttagcccggccccacaaccgaggcgtttactgcccgggccccaggaaaactcagtccagtcttctgcatgcggcagacagcacttggaacctacaggcacaattgatatgcgaggcccaggtcaggccgattgtgccgttgcaattggacggcccctcggggaagtggtgactctgagggtcttggagtcatcactcaattgctcggcaggagacatgctcctgctctggggaagacttacttggcgcaagatgtgtagaaaactgttggacatgacctttagtagcaaaacaaatacccttgtcgttaggcagcgctgcggaaggccagggggaggcgtgttgctccgatacgggtcacagctcgcccctgaaacattttacagggaatgtgacatgcagctgttcgggccttggggggaaattgtatctccatccttgtctcccgctacatcaaacgccggcgggtgtaggctgttcataaatgtggcaccacatgccagaatagcaattcacgctctcgctactaatatgggagccggtacagagggcgccaatgcctcctacattctgattcgagacacacactctcttcgaacgaccgcctttcatgggcagcaagtgctgtactgggagtctgaatccagccaagccgagatggaattttctgagggatttctgaaagcacaggcatcactgagagggcagtactggactcttcaatcatgggtgccagagatgcaggatccccagtcatggaaagggaaggagggaaca

SEQ ID NO: 5682 - DNA, 4281 bp, synthetic construct
  misc_feature 1..4281: note = source = /note="Description of Artificial Sequence: Synthetic coding sequence"
  source 1..4281: mol_type = other DNA
atgcaccagcgccacccgagggcgcgctgtccgcctctttgcgtggccgggattctggcttgcggcttcctgttggggtgctggggaccttcgcacttccagcagtcatgcctgcaggctctagagccccaagctgtctctagctacctttccccaggagcaccgctgaaaggtaggccccctagtccaggctttcagcggcagcgccaacgacaacggcgcgccgctggagggatcctgcacttagaactgttagtggcagtaggtcctgatgtatttcaggcccatcaagaggataccgagaggtacgtgcttacaaatctcaatataggagcagagcttttgcgggacccctcccttggggcccagtttagagtgcacctcgtaaagatggtcattctgacagaacccgagggcgccccaaacatcacagcgaacctgacctcatcacttctgtctgtgtgtgggtggagtcagaccatcaatcctgaagatgataccgatcctggccacgcggacctcgtgttgtatataactcgtttcgacctcgagttacccgacggaaataggcaggttaggggtgtgacacagctgggcggggcatgctcccctacatggtcctgcctcatcaccgaagacaccggattcgacctgggtgttacaatcgcgcatgagattgggcactcttttgggcttgagcacgacggggcaccagggtccggttgtggcccctctggtcatgtgatggcctcagacggcgccgcgcctagagcagggttggcgtggtcaccgtgctccagacgccagctcctctccctgctgagcgccggtagggcccggtgcgtgtgggaccctcctcgtcctcagccaggatcagccggccacccacccgacgctcaacccgggctgtattattccgctaatgaacaatgtcgtgtggcgttcggacctaaggctgtcgcctgcacttttgctcgtgagcacctagacatgtgtcaagcactcagctgccacaccgatcctcttgatcaatctagttgcagccgtcttcttgttccactgctcgatggaaccgagtgcggggtagaaaagtggtgctctaaaggcagatgcagaagtctcgtcgaactgactcctatagccgccgttcatggccgatggagttcctggggaccacggagtccatgtagtcgttcttgtggcgggggcgtggtgacaaggcgtaggcaatgtaataatcccagacccgcgtttgggggtcgggcctgcgttggagccgatcttcaggctgaaatgtgcaacacgcaggcctgtgagaaaacacagctggagttcatgtcccagcaatgtgccaggactgacgggcagccactccgctctagccctgggggagcgtctttctatcactggggagccgccgtgccacatagtcagggagatgccttgtgtcgccacatgtgccgtgcgattggtgaatcctttatcatgaaaagaggagattcgttcctcgacgggacccgttgcatgccctctggcccacgtgaagatggaactctcagcctttgcgtgagcgggtcttgtcggacattcggatgtgacggcagaatggactcccagcaggtgtgggaccgttgccaggtctgcggtggtgacaactctacatgtagtccccggaaggggtcattcactgctggtcgcgctagggaatacgtaacattcctcactgtgacgcccaatctcacatctgtctatatagccaatcaccgacccctttttactcacctcgctgttagaatcgggggcagatatgtggtggcagggaagatgtccatctctccaaacaccacctacccctccctgctggaggatgggcgggtggagtaccgagtggcacttacagaagacagattgccaagactggaagagatccggatatggggaccattgcaggaagatgcagacatacaagtgtatcgtaggtacggagaagaatacggtaatctgacacgacctgacatcacttttacatatttccagcccaaaccacgtcaggcatgggtgtgggctgccgtgcgggggccctgtagcgtttcttgcggcgctggcctgaggtgggtgaactactcctgtctcgaccaagcacgcaaggagctggttgagaccgtccagtgtcaggggagccagcagcccccagcctggcccgaggcttgcgtcctggaaccatgtcctccatactgggctgtgggagattttggaccatgcagtgcgtcttgcggaggagggctaagagagcggccagtgcgctgcgtggaggcgcaagggtcgctgctgaagacactgccaccagcccggtgtagagctggtgcacagcaacctgctgttgctctggagacttgtaaccctcagccctgtccagcgcggtgggaggtgagcgagccctcgtcttgcaccagcgccggcggcgcgggacttgccctggagaacgagacctgcgttcctggggccgacgggctggaagcccctgtgacagaaggccctggatccgtcgacgaaaaactgcctgccccagaaccctgcgtcgggatgagctgtccaccgggctggggccacttggatgctacgtcagctggagagaaggcacccagcccttggggctccattaggactggtgcccaagctgcacacgtgtggactccagccgcaggcagctgttccgtgtcttgcgggcggggcctcatggagctgaggtttctgtgtatggactcagctctgcgtgtgcccgttcaggaagagctgtgcggcctagcatcaaagcctggcagtaggcgagaggtgtgccaagccgtgccctgccccgcccggtggcagtacaaactggccgcctgtagcgttagttgtggaaggggtgtcgtccggagaatcctgtactgcgcaagagctcatggagaggatgacggtgaggaaatacttctggacactcaatgccaggggctgcctagaccagagcctcaggaagcgtgtagccttgaaccttgcccgccgcggtggaaggtcatgtcactgggcccttgctctgcaagctgtggcctgggcactgcgaggaggtcagtggcctgcgtgcagctagaccagggtcaggacgtggaggtggatgaagctgcatgcgccgctctggtgcggcccgaagcttctgtgccttgtttgattgccgactgtacataccggtggcatgtaggaacttggatggagtgtagcgtttcttgtggtgatggaatccagcggcgccgagatacctgtctaggaccacaggcccaggctcctgtccctgcagatttctgccaacatctgcccaaacccgtgaccgtgagaggatgctgggcgggtccctgcgtaggtcagggaaccccatccctggttccacatgaagaagctgcggcaccgggtaggacaacagcgacccccgccggtgcatctcttgaatggtcccaggctaggggactgctgttctctcccgcgcctcaaccacgccggttgctccccggtcctcaggagaactcggtgcagtctagtgcctgtggccgacagcacctggaacctacgggcactattgatatgagaggtcctggccaggccgattgtgccgtggccatcgggaggcccctgggagaagttgtgacactaagggtcctggaatccagcctgaactgttccgcgggagatatgctgctcttgtggggcaggcttacatggagaaaaatgtgccggaagctgctcgacatgaccttcagttctaaaactaatacactggtcgtgcgccagcgttgtggcagaccgggcggaggtgtcctgctgcggtatggcagtcagctcgcgccggagactttctatagagagtgtgacatgcagctgtttgggccttggggggagatagtgtcaccctccctgagtccagccaccagtaacgccgggggatgcagactgtttatcaacgtcgcccctcacgcaaggattgctatccacgctcttgctacgaatatgggcgccggtactgaaggggcgaacgccagttatattttgattagagacacccattctctgagaactactgcgtttcacgggcagcaagtgttatactgggaatccgagtctagccaagccgaaatggagttcagtgagggtttcctcaaggcccaggcctcactccgaggtcaatattggactttacaatcatgggtgcctgagatgcaggatcctcagtcctggaagggtaaagaaggcaca

SEQ ID NO: 5683 - DNA, 4281 bp, synthetic construct
  misc_feature 1..4281: note = source = /note="Description of Artificial Sequence: Synthetic coding sequence"
  source 1..4281: mol_type = other DNA
atgcaccagagacatccacgtgcaagatgtcctcccctttgtgtcgcaggaatacttgcatgcggatttctgcttggatgctggggtccctcccatttccaacaatcatgtttgcaagcgcttgagccacaagcagtttcgagctacctttcgccgggggcgccccttaaaggccgaccgccatcccccggcttccagagacaacgacagcgacaacgtagagcagcagggggtattctccatctggaacttctggtggcagtgggccctgatgtgttccaagcacaccaggaagatactgagagatatgtgctcactaatctgaacattggtgcagagctcctcagagatccatcgctgggggcacaatttcgggtgcatctggtgaagatggtgatcttgactgaacccgaaggagcccccaacattaccgcaaacttgacgtcctcgctgcttagcgtctgtggttggagccagaccataaaccctgaagatgataccgatccgggtcacgctgatctcgtgctttacattactcgattcgatcttgaactgcctgatggtaaccgtcaagttcgcggagtgacccagctcggaggtgcgtgctcgcctacctggtcctgcctgattacggaggatactggcttcgacctgggagttactattgcacacgaaatcggtcactcttttggccttgaacacgatggagcaccgggttcaggatgtggcccatccggccatgtgatggcaagcgatggagcagccccaagagcgggacttgcctggagcccatgttcacggaggcagctcctttcactcctttccgcaggtcgcgcgaggtgcgtctgggatcctcctaggccacaaccaggatcagcagggcatccgcctgatgcacaaccaggtctttactactcggcaaacgagcaatgtcgtgtggcattcgggccaaaagcggttgcatgtaccttcgcaagggagcatcttgacatgtgtcaagccctgtcttgtcatactgatcctctggaccagtccagctgttccagactgctggtcccgctgctcgacggtactgaatgtggagtcgaaaaatggtgctctaaaggccgctgccgttcgcttgtcgaattgacccccattgcagccgttcacggccgttggtccagttggggacctagatcaccgtgctcccggagctgtggagggggagtcgtgactagacgccgacaatgcaataatccgcgcccagcattcggaggacgggcatgcgtgggtgcagaccttcaagcagagatgtgcaatacccaagcctgcgaaaagactcaactggagtttatgagccagcagtgtgcgaggactgatggacaacctctccggtcgagcccaggaggggcatccttctaccattggggagcagcagtgcctcattcgcaaggggacgccctgtgtcgtcatatgtgtcgtgcaattggtgagtcgttcatcatgaagcggggagattcctttctggatggtacgcgctgtatgccctcaggaccacgcgaagatgggactctctccctttgtgtgtcggggagttgtagaacctttggatgtgatggaagaatggactcgcaacaagtgtgggatagatgccaggtgtgtggcggcgataactcgacctgctctccacgaaagggatcattcactgccggcagagcccgggaatatgtgacctttcttactgtgacgccaaatcttacctccgtgtacattgcgaaccacaggcctctttttactcatcttgcagtccggataggtggccggtacgtcgtggcagggaaaatgtcaatttcaccaaacaccacttacccgagcctccttgaggatggtagagtggagtaccgtgtggctctgactgaggaccgcctgcctcggttggaagagattcgtatctggggtccactgcaagaagatgcagacattcaggtgtaccgtcgctatggggaggaatacggtaatctcactcgtccagacatcacttttacctactttcaacctaagccccggcaagcgtgggtctgggcagcagtgcggggtccatgctcagtgtcctgcggtgcaggactcaggtgggtcaattactcatgtttggatcaggcccgcaaggagctggtggaaactgtgcaatgtcaaggaagtcaacagcctcccgcatggcccgaggcatgtgtgctcgaaccatgccctccttactgggcagtgggggacttcgggccgtgcagcgcttcgtgtggaggaggtcttagagagcgcccggtgagatgtgtggaggcacagggatcgctgctcaagactctccctcctgcgagatgtcgagcaggtgcgcagcaacctgccgtggccctggagacgtgtaaccctcagccttgtcccgccagatgggaagtgtccgaaccctcctcatgtactagcgccggtggtgcaggcctggccctcgaaaacgaaacctgcgtcccaggagccgatggcctggaggcacccgtgaccgaaggacccggatccgtggatgaaaagctgccagcacccgaaccttgtgtgggaatgtcatgcccccctggatggggacatctggatgccacctcagcaggtgagaaggcacctagcccatgggggtcgatccgcacgggcgcacaggcggcacatgtgtggaccccagccgcaggttcatgttcagtctcatgcgggcgcggactgatggaactgcgatttctgtgcatggattcagctctgcgggtccctgtccaggaagagctttgcggacttgcatcaaagcctggatcaagaagggaagtttgtcaagccgtcccttgtccggccagatggcaatacaagctggctgcctgttcggtttcgtgtggaagaggagtggtgcggcggattttgtattgcgcgagagcacatggagaggacgatggagaggaaatcctcctcgatactcaatgtcaaggcctcccaaggcccgaacctcaggaagcctgctcgcttgagccatgtcctcctcggtggaaggtgatgagtcttggaccttgttcggctagctgtggattggggaccgcacgccggtcggtcgcctgtgtgcaattggatcaaggccaggacgtggaagtcgatgaggctgcatgtgcggcacttgtgaggcctgaagcgagcgtgccatgtctcatcgcagactgtacgtaccgttggcatgtgggaacgtggatggaatgttcggtatcgtgcggggacgggatccagcggcgcagagacacctgtctcggaccgcaggctcaagcaccagtgcccgccgatttttgccagcacctgcctaaaccggtgactgtccggggatgttgggccggaccatgcgtgggacaaggtaccccttccctggtgcctcatgaggaagcggccgcccctggacggaccaccgcaacccccgcaggggcctcccttgaatggtcgcaggcgagaggactcctgttttcgcctgcaccccagccaagaaggctcctgcctggaccgcaggaaaactcggtgcaaagctccgcatgtggcaggcagcatcttgaacccactggtactatcgacatgcgcgggcccggtcaggcagattgcgccgtggccatcggacgtcctctgggcgaggtggtgactctcagagtgctcgaatcatcgctcaattgtagcgcgggggatatgctgttgctttggggtcgactgacttggagaaagatgtgccgtaagctgctcgatatgacttttagttcaaaaaccaacaccctggtggtgaggcaacgttgcggaaggccgggaggcggagtgcttcttagatacggttcgcaacttgccccagaaaccttttaccgggaatgcgacatgcaactgtttggcccatggggcgaaattgtgtcgccttccctgtctccggctacttcgaatgctgggggctgcagactcttcatcaacgtggccccccacgccagaattgccattcacgcgctggcaaccaatatgggtgcgggaaccgagggagcaaacgcatcctacatattgatccgggacacccacagcctcagaactaccgcctttcatggtcagcaggtgctttactgggagtctgaaagcagccaggcggaaatggaattctcggaaggatttctcaaggcacaggcgagtctcaggggacaatattggacccttcaatcttgggtcccagaaatgcaggatcctcagagctggaaggggaaggagggcacc

SEQ ID NO: 5684 - DNA, 4281 bp, synthetic construct
  misc_feature 1..4281: note = source = /note="Description of Artificial Sequence: Synthetic coding sequence"
  source 1..4281: mol_type = other DNA
atgcaccagcggcatccccgggcaaggtgtcccccactgtgtgttgcaggtattcttgcctgcggtttcctgctgggatgttggggaccatcacattttcaacagtcatgtttgcaggcgctggaacctcaggccgttagctcctacctttcaccgggcgcccccctcaagggaaggccaccatccccagggtttcaacggcaaagacaacgacagaggagagcagcaggtggaatcctgcatctggaattgctcgtggctgtgggacctgacgtgtttcaagcacatcaggaagatactgagaggtacgtgctgaccaaccttaacattggcgcagaacttcttcgtgatccttcacttggcgcgcagttcagggtccatttggtgaagatggtcatactgaccgaaccggaaggggcacccaacattaccgctaatcttacttcatcacttcttagcgtgtgtggatggagtcagaccattaatcctgaagatgatactgaccctggtcatgccgacctggtcctttacattactcgttttgaccttgagttgccagacggtaataggcaggtgcggggagtgactcaacttggaggagcatgcagcccgacttggtcatgcctgattacggaggacaccggatttgatctgggagtcaccatagcacacgagattggacactcatttggccttgagcatgatggagcgccaggatccggatgtgggccatcgggccatgtgatggcgtccgatggagcggcacctagagccggtcttgcctggtcgccgtgcagcagacgtcagcttctctcgctgctttccgcaggtagagcacgttgtgtgtgggacccgcccaggccacaacccggaagcgcaggtcatccacccgacgcgcaaccaggtttgtactatagcgcgaacgagcagtgtcgggtcgcatttggaccgaaggcagtcgcctgtacttttgcgagggagcacctggatatgtgccaggcactgtcgtgtcacaccgatcctcttgatcagagctcgtgttctcgactgcttgtgccactgctggatggtaccgagtgcggagtggagaaatggtgttccaaggggagatgccggtcgctggtggagctgactcccatagcagccgtccatggaaggtggtcgtcctggggcccccgctcgccctgctcgcgctcgtgtggcggaggagtggtgacgcggaggcgtcaatgtaacaacccacggcctgccttcggaggtagagcgtgtgtcggcgcagatctgcaagccgaaatgtgtaatactcaagcatgtgaaaaaactcagctcgagttcatgtcccagcaatgtgcacggaccgatggtcagcctctgcggtcgtcccctggaggcgcatcgttctaccattggggagcagccgtgccacattcgcaaggagacgcattgtgcaggcatatgtgtagagcaattggagaaagtttcattatgaagcggggagactcattcctggacggaactagatgtatgccttcgggtccacgcgaggatggcaccctgagcctttgcgtgtccggatcttgtcggacttttgggtgtgatggtagaatggattcgcaacaagtctgggatcggtgccaggtgtgtggtggggacaactccacttgtagcccaagaaagggatcgttcacggcagggagagcaagagagtatgtaacctttctgactgtgactccaaatctcactagcgtgtacattgccaaccatagaccactctttacccatctggcagtgcggatcggtggccgatacgtggtggcagggaagatgtcaattagtccgaacactacctatccaagcctgctggaagatggccgagtggaatacagagtcgctctcactgaggaccgtctgcctcgacttgaagaaatcagaatctggggacccttgcaggaagatgcagacattcaagtgtaccggaggtacggggaggaatacggtaatttgacccgccctgatataacttttacttactttcagcctaagcctagacaggcttgggtgtgggcagccgtccggggaccttgctcggtgagctgcggtgcaggactgagatgggtgaattacagctgtcttgatcaggcccgaaaagagctggtggaaacggttcaatgccaaggatcacagcagccccctgcatggccggaagcatgtgtgctcgagccatgcccaccttactgggccgtcggtgactttgggccctgctccgcatcctgtggaggaggtctgcgagagcgccctgtgcgctgtgtggaggcgcagggttctcttctcaagacccttccgcctgcgagatgtagagcaggagcacagcaacccgcagtggcattggaaacttgtaaccctcaaccctgccctgcacgttgggaagtgtccgaaccttcgagctgtaccagcgcaggcggcgcgggacttgcgctggaaaacgaaacctgcgtgccaggcgccgatggcctggaagcacctgttactgagggtccaggatcagtagatgaaaagctccctgcgcccgaaccgtgtgtggggatgtcgtgcccaccaggttgggggcatctcgatgcaacctcagcaggagaaaaggcaccatcaccatggggctccatcaggactggtgcccaagccgcccacgtgtggactcctgccgccggctcctgcagcgtgtcgtgcgggaggggactcatggaacttaggtttttgtgtatggattcggcactcagggtcccggtgcaagaagaactgtgtggactggcgtcaaagcctggttcgagaagagaagtgtgtcaggcggtcccatgcccggctcgatggcagtacaagctggccgcttgttcggtttcgtgtggaagaggagtggtccggcggattctttactgtgcaagagcgcatggggaagatgacggcgaggaaattctgcttgatacccaatgtcaaggtttgccacgtcccgagccccaagaagcatgctcgcttgaaccatgtcccccacggtggaaggtgatgtctttgggcccatgctcagcatcatgtggtcttggaacggcccggcggtcggtggcctgcgttcagctggatcagggccaggatgtggaagttgatgaagcggcatgtgctgccctggtccggcctgaggcatccgtgccatgtcttatcgcagactgtacttaccggtggcacgtcggtacctggatggaatgctcagtgtcgtgtggagatggaattcagcggcgcagagatacctgcctgggaccccaagcacaagcccccgtccctgctgatttttgtcaacatctccctaagcctgtcaccgtgcgcggatgctgggcaggaccttgcgtcggtcagggcaccccttcgttggtgccccatgaagaggcagcagcgccaggccgcaccacggcgacgcctgccggagcttcacttgagtggtcgcaggcacgggggctcctgttttccccagcaccccaacccagacggcttctccccggacctcaagaaaattcggtgcagtcgagtgcatgtggccgacaacaccttgagcctactggtacgatcgatatgcgtggacctggccaagccgattgcgccgtcgcaatcggccggccactgggagaagtggtgaccttgcgagtgcttgaatcgtcgcttaactgctcagcgggggatatgctgcttctctggggacggctgacttggcgcaaaatgtgcagaaagctgctcgatatgaccttttccagcaaaactaataccctcgtcgtgagacaacgctgcggtaggcctggaggtggagtgctgctcaggtacggaagccaactggcaccggaaactttctacagagaatgtgacatgcaattgtttggaccttggggagaaatagtgtcgccatcattgtccccagcgacttcaaacgccggcggttgtagattgttcataaacgtcgctcctcacgcacggatcgctatccacgcgctcgccaccaacatgggtgcgggtacggaaggtgcgaacgccagctacattctcatccgagatacccactctctgcgcaccaccgcattccacggtcagcaagtgctctactgggagtcggagagctcccaggccgaaatggagttctcggaaggctttctgaaggcgcaagcatctcttcgtggtcaatactggactctccaatcgtgggtgcccgagatgcaagatccccaatcgtggaagggtaaggagggaacc

SEQ ID NO: 5685 - DNA, 4281 bp, synthetic construct
  misc_feature 1..4281: note = source = /note="Description of Artificial Sequence: Synthetic coding sequence"
  source 1..4281: mol_type = other DNA
atgcaccagcggcatccacgtgctcggtgcccccccctgtgtgtggcaggcatcctggcctgcggcttcctgctggggtgttgggggccctcacattttcagcagagctgtctgcaggcgttagagccgcaggcagtgtcctcatatctatcacctggggcgcccctgaagggtagacctccatctccggggttccagcggcaacggcagcgccaacgccgcgccgcagggggaattctccacttggagctgctggtggctgtggggcctgacgtcttccaggctcaccaggaggacacagagcgatacgtgctcacaaaccttaatattggagcggagctgctgcgcgatccttccctgggcgctcaattccgggtgcatctggtgaagatggttattctcacagagcctgaaggggcgccaaacattacggccaacctaactagctcactgctgagtgtgtgcggatggtcccaaacaattaacccagaggacgacacggaccccggccatgcggatctggtactgtatattacccgattcgacctggagttgcccgatggaaatcgacaggtgcgtggcgttacccaacttgggggcgcctgcagtccaacctggtcctgtctgataaccgaggacactggcttcgacctgggggtaaccatagcccatgagataggacacagcttcggactggagcacgacggggcgcctgggtcaggatgtggcccgagtgggcacgtgatggcatccgacggtgcagccccacgcgctggattagcatggtctccctgttcccgccgccagctgctgtcactcctctcagctggcagggccagatgtgtctgggacccaccccggcctcagcccggctcagctggccacccgcctgacgcccagcctgggctctattatagtgccaatgagcagtgtagggtggcgttcggtcctaaagcagtggcctgtacctttgcccgcgagcacctggacatgtgccaggctctctcctgccacactgatccgctggaccagagctcttgttccagacttctggttcccttgctggatggcactgaatgcggagtggagaagtggtgctccaagggacgctgccgttccctggtagagttgactcctattgccgccgttcatggccggtggagcagttggggtccccgttctccttgcagtcgtagctgtggcggaggtgtggtcaccaggcggagacaatgcaataatccccgaccagcattcggcggccgcgcgtgtgtgggtgcggatctccaggccgaaatgtgcaacacccaagcctgtgagaaaactcaactcgagtttatgagccagcaatgcgccaggaccgatggccagcctctgcggtcttcacctgggggagcctcgttctaccactggggtgctgccgttccgcactcccagggcgatgctctttgtaggcatatgtgtcgcgctattggagaatctttcatcatgaaacggggagacagctttcttgacggcacacgctgcatgccgtccgggcccagggaagatggcaccctttcactatgtgtctcaggtagttgtcgcaccttcggctgcgatggtagaatggatagccagcaagtgtgggatagatgtcaggtgtgcggaggggataattccacctgcagccctaggaaaggcagctttacagccggccgtgcccgagaatacgtcacctttctaacagtgaccccaaacttgacaagtgtgtatatcgccaaccacaggccactcttcacccaccttgccgtaaggatcggtggcaggtacgtagtggccgggaagatgtcaattagccctaacacaacctacccatcactgctcgaggacggcagagtggagtaccgcgtggcactcacagaggaccgattgcccaggctggaggaaatccggatttgggggcccctgcaggaggacgccgatatacaggtctatcggaggtacggtgaggaatatggcaatctgacccggccagatataacgtttacatactttcagcccaagccgcgtcaggcttgggtctgggcagctgtccgagggccttgctcagtgtcgtgcggagctgggctgaggtgggtgaattattcctgcctagatcaggcccggaaggagctcgtagagacggtgcagtgtcaggggtcccagcagcctccggcatggccggaagcatgtgtgctagaaccatgccccccatactgggccgtaggcgatttcggcccctgctccgcttcatgtggcgggggattaagagagagaccagtaagatgtgttgaggctcagggatcactactgaaaaccctcccacccgccaggtgccgggctggggcacagcaacctgcagtggctctcgagacctgtaatcctcagccctgtcccgctagatgggaagtgtctgagccgagctcatgcacatctgccggaggcgcaggacttgccctggaaaatgaaacctgcgtgcccggagccgatgggctggaggcccccgtgaccgagggtccaggtagcgtcgatgagaaactgcccgctccggagccctgcgtaggaatgagctgcccacctggatggggacacctcgatgctaccagcgccggcgaaaaggcaccatctccctgggggtctataagaacaggagctcaagccgcccacgtgtggacgcctgccgcggggagttgttcagtgtcttgcggtcggggactgatggaactcagatttctttgtatggattccgccctgcgggttcccgtacaggaggagttatgtggcctggcgagcaagccggggtcccgtagggaagtttgccaggccgtgccatgtcctgcgcggtggcagtataagctcgctgcatgctcagtatcctgtggcagaggggtcgtgaggcgcattctttactgtgcaagggcccacggcgaggatgacggcgaggaaattctgctcgacacgcagtgccaggggctgccacgccctgagccccaggaagcgtgctcgctggagccctgtcctcccaggtggaaggtcatgtctttgggaccatgtagcgcctcatgcgggctcggaaccgcaagacggtccgtggcctgcgtgcagctggaccagggccaggatgtggaagtcgacgaagcagcatgcgccgccctcgtccgccccgaggccagcgtgccctgtctgatcgctgactgtacatatcgatggcacgtcggcacttggatggagtgctctgtgagctgcggggatggaattcagcgacggcgtgatacttgcttggggccccaggcccaagcaccagtccctgcagatttctgtcagcaccttccaaagccagtgaccgttcgtggctgctgggcaggtccttgtgtcggacagggaacaccatcccttgtcccacacgaagaagccgccgctcccggacgaacaacagcgacgcccgcaggcgcatcactcgaatggtctcaggctaggggcctgctttttagccccgccccacagcctagacggctgttgcctggaccccaggagaattccgtgcagagttcagcttgcggccggcagcatcttgagcctacagggaccatcgacatgagaggtccaggacaagctgattgcgctgtggctatcggtagaccgctgggcgaggttgtgacactgagggtcctggagtcgtccctcaactgttcggccggcgacatgctactgctgtggggccgtctgacatggagaaagatgtgtaggaagctgttggacatgactttctcgtccaagactaataccctggtggtcaggcaacgctgcgggcggccaggtggcggcgtccttctccgctatggaagccagctagcacccgaaaccttctacagagagtgtgacatgcagctgtttgggccatggggtgaaatagtgtcaccttccttgtcaccagccacatcaaatgctggggggtgccgactctttataaatgttgcgccgcatgcgcgtattgcaattcacgctctggcgactaacatgggcgcaggtactgagggagccaacgccagctacattttaatacgcgacacacactccctgaggaccacagcttttcacgggcagcaggtcctttactgggagagcgagagtagccaagcagaaatggaattcagcgaaggcttccttaaagcccaggccagtctcagggggcaatattggaccctccagtcctgggtgcctgagatgcaggatccccagagttggaaaggcaaggaaggcacc

SEQ ID NO: 5686 - DNA, 4281 bp, synthetic construct
  misc_feature 1..4281: note = source = /note="Description of Artificial Sequence: Synthetic coding sequence"
  source 1..4281: mol_type = other DNA
atgcaccaaagacacccacgggcccgctgcccacctctgtgcgtggcaggaatcttggcatgcggattcctgcttggctgctggggcccctcccacttccagcaaagctgccttcaggctctggaaccgcaggcagtgtcctcttacctctcacctggagcgcccttgaagggacggcctccttcgcccggctttcaaagacaacggcagcggcagcgccgcgcagcggggggcatcttgcatctggaactgctggtagctgtgggtccggacgtgttccaggcgcaccaagaggacaccgagcgatatgtgctgactaacctgaatatcggagcggaactgctccgagatccgagcctgggagcacagttcagagtgcatctggtgaaaatggtcatactgaccgagcctgagggggcaccaaatatcaccgctaacctgacctcgagcctgcttagcgtgtgcggctggtcgcagaccatcaacccagaggacgacacggacccagggcatgctgacctggtactgtacatcacccggttcgacctggaactgccggatggcaaccgtcaggtgagaggcgtcactcagctcggcggagcctgttcgcctacctggtcatgcctgattactgaagataccggattcgatctcggggttactatcgcgcatgagatcggacactcatttggattggaacatgacggagcgcccgggtccggttgcggaccgtcgggacacgtgatggcatcggacggagcggcaccacgggccggcctggcatggagtccgtgtagccggaggcagctgctgtccctgttgtcagctggtcgggctagatgtgtgtgggacccccctcggccacagcctggatcggccggtcatccgcccgatgcgcaacctggtctgtattactcagcaaatgagcagtgcagagtggcctttggaccgaaggcagtggcatgcaccttcgctagagaacatctggatatgtgccaggcgctctcatgtcatacggaccctctcgaccagtcaagctgctcgcggctcctcgtcccgctcctggacgggactgagtgcggagtggagaaatggtgttcgaagggtagatgcaggtcgttggtggagttgaccccgattgcagctgtccacggcagatggtcatcgtggggaccgagatccccctgttcccggtcgtgcgggggaggggtggttacccgccgacggcagtgcaataatccgcgccctgcgtttggaggtagggcatgcgtcggagccgacctgcaggccgagatgtgcaacacgcaagcctgcgaaaagacccaacttgagttcatgtcgcagcaatgcgcccggactgacggacagccgcttaggtccagcccaggcggggcctcattctaccactggggcgctgctgtgccgcactcgcaaggggacgctctgtgtcggcacatgtgtcgcgcaatcggagagtcattcatcatgaagcggggagattcgttcctcgatggaactcgctgcatgccttccggccccagagaagatggcactttgtccctgtgtgtgagcggctcctgccgcacttttggctgcgacggtaggatggattcccagcaagtttgggaccggtgccaagtgtgtggaggggataatagcacttgctccccacgcaaagggagctttactgcgggacgggctagagaatacgtcaccttcctcaccgttactccgaacctcacctccgtctacatcgcaaatcacagaccgctcttcacccatctggcagtgcgcatcgggggtcgatacgttgtcgcgggaaaaatgtcgatcagccccaacaccacctacccgtccctgctggaggacggccgcgtggagtaccgcgtggctctgaccgaggacagacttcctcgcctcgaagagatccgcatctggggccctctgcaagaggatgctgatattcaagtctaccgacggtacggagaagaatacggaaacctgactaggcccgacatcactttcacttacttccagccgaagccgagacaggcctgggtgtgggccgccgtgaggggaccgtgttccgttagctgcggagccggacttagatgggtcaactactcgtgcttggaccaggcccggaaggagctggtcgagacggtgcagtgtcaggggtcccagcagccccccgcttggccagaagcgtgcgtgctggaaccgtgccctccttactgggctgtgggagactttggaccatgctccgcctcctgcggtggtggactgagagagcgccccgtgcgttgcgtggaagcccaaggatcgctcctcaagactctccctccggcaaggtgcagagccggggcccaacaacccgcggttgccctggaaacgtgcaacccacagccgtgcccagcgagatgggaggtgtcggaaccctcgtcgtgtacttcggctgggggtgccggattggctctggaaaatgaaacctgcgtgccaggagctgatggcctggaagcgccggtgactgaagggccgggaagcgtggatgaaaaactcccggcgcctgaaccgtgcgtgggaatgtcgtgcccgccgggatggggacacctggacgccacctcagctggagaaaaggcgccaagcccctggggatcaatccggaccggagcccaggcagcgcacgtctggactcctgccgcgggatcctgctccgtctcgtgtggtagagggctcatggaactccgattcctgtgcatggactccgcgctgcgtgtgcctgtgcaggaggagctttgcggactcgcatccaagcccggatcacggcgggaagtctgccaagcagtcccatgtccggcgcggtggcagtataaactcgcggcgtgttcggtgagctgtgggaggggggtggtgagacggatcctctattgcgccagagcacatggggaggacgacggggaagagatccttctggacacccagtgccagggcctcccgcgcccagagccccaggaggcttgttcactggagccctgtccgcctcggtggaaggtgatgtcgttgggaccgtgcagcgccagctgcggtctgggcactgcgcgccgatcagtggcttgcgtgcagctcgaccagggacaggacgtggaagtggatgaagcggcttgcgccgccctggtgcggcctgaggcctcggtgccgtgtctgatagcagattgcacctacagatggcacgtgggaacctggatggaatgctcagtctcatgcggcgacggaattcaaagacggcgtgacacctgcctggggccgcaagcccaggcccctgtccctgcggacttctgtcaacatctgccgaagccggtcaccgtgcgcggatgctgggcagggccatgcgtgggacagggaaccccatcactggtgcctcatgaagaggctgccgccccgggacgcactacggctactccggcaggagcgtcgctcgagtggagccaagctcggggactgctgttctcaccggcgccgcagccacggcgcttgctgccgggcccacaggaaaacagcgtgcaatcatcagcctgcggcaggcagcacctggagccgactggaactattgacatgcggggcccaggacaggcggattgcgcggtggccatcggtcgaccgcttggcgaggtggtgaccctgcgcgtcctggaatcgtccctgaactgctcggccggtgacatgctgctgctgtggggcagactgacttggcgcaaaatgtgccgcaaattgctcgacatgaccttttcgagcaagactaacactctcgtcgtgcgtcaacgctgcgggcggcctggaggaggagtccttttgcgctacgggagccagctcgcgcccgaaactttctacagagaatgcgatatgcaactgttcggcccttggggtgaaatcgtgagcccttcgctgtctcctgcaacctcgaatgccggcggctgtcgactgttcatcaatgtcgccccacacgcaaggatcgccattcatgccctcgcgaccaatatgggcgccggaactgaaggagccaacgcgtcctacattctcatccgggacactcatagcctgaggaccaccgctttccatggacagcaggtcctgtactgggaatccgaaagttcgcaggcagaaatggaattcagcgaggggttcctcaaggcgcaggcgtcactgcgcggacagtactggaccctgcagtcctgggtgcctgagatgcaggaccctcagagttggaagggaaaagagggaacc

SEQ ID NO: 5687 - DNA, 4281 bp, synthetic construct
  misc_feature 1..4281: note = source = /note="Description of Artificial Sequence: Synthetic coding sequence"
  source 1..4281: mol_type = other DNA
atgcaccagcgccacccccgagcgagatgccctcccctgtgcgtcgccggcatcctcgcctgcgggtttctccttggctgctggggtcccagtcactttcagcaaagttgtctccaagcccttgagcctcaggctgtgagtagctacctttcccccggggcaccgctcaaaggcagaccacctagcccagggttccagcggcaacgtcagcggcagcgccgtgctgcgggcggaatactgcatctagagctgctggtcgccgtgggccctgatgtgttccaggcccaccaggaagataccgaacggtatgtactgaccaacttgaacatcggtgcggagctgctccgggacccttctttgggggcacaattcagagtgcatctggtgaaaatggtgatcctcacagaaccggagggcgctccaaacattaccgcgaaccttacaagttctctcctgtcagtgtgtggctggagccaaaccattaacccagaggatgatacggatcctggacacgcagacctggtcctgtatatcaccagatttgatcttgaactgcccgatggcaacagacaagtgcggggtgtgacacaattggggggagcttgtagtccgacttggagctgcttgatcactgaggataccgggtttgatcttggcgtgacgattgcgcacgagatagggcacagttttggccttgagcatgatggggcacctgggagcggctgcggaccatctggccatgttatggcttccgacggcgctgccccccgcgccggcctggcctggtcaccctgttcacggcggcaacttctgtctctgttgtccgccgggcgcgcgagatgtgtgtgggaccccccacggccccagccgggaagcgccgggcacccacctgatgcacagccaggcctgtactactcagcaaacgagcaatgcagggtcgcattcggacccaaagctgtcgcttgtacttttgcgagggaacacctggatatgtgccaggcgctctcgtgccatactgaccctcttgaccaatcctcttgctctcgcctgttagttccactcctcgatggtactgagtgtggagtcgaaaaatggtgtagtaaaggccgctgtcgctcacttgtcgagctcacacccattgcggccgtgcacgggaggtggtcttcttgggggcccagatctccctgctctcgatcctgcggcgggggcgtggtgaccaggcgacgccagtgcaacaaccccaggccagcttttggaggacgagcctgcgtgggtgcggacctgcaggcagagatgtgtaacacacaggcctgtgagaagactcaacttgaatttatgtcccaacagtgtgccagaaccgacgggcagccattaagatcatcacccgggggcgctagcttctaccattggggtgctgctgttccccatagtcagggggacgctctgtgcaggcacatgtgcagagctatcggagaaagctttatcatgaaaaggggagacagttttttagacggcacgaggtgcatgcccagcggcccacgcgaagatgggactctgagtctctgtgtcagtggttcatgtagaactttcggctgcgatggacgtatggatagtcagcaggtatgggataggtgccaggtgtgcggaggggacaactcaacttgtagcccaagaaagggaagcttcaccgcaggccgtgcccgagagtacgtgaccttcctgaccgtaactcctaatctcacttcagtctatatcgccaaccacagaccactgtttacacacctggctgtgagaataggcggcaggtatgtggttgctggcaagatgtccatatcgcctaatactacatatccctctctcttggaagatggtcgagtggagtacagggtagcactgaccgaagaccgccttcccagactcgaagaaatacgaatttgggggccactgcaggaagatgcagatatccaggtgtaccgacgctacggcgaggagtatggtaatctaacccgccccgatatcacgttcacatatttccaacctaaaccccggcaggcttgggtgtgggccgctgtgagggggccctgttctgtgtcatgcggcgcgggtctgcgttgggtgaattattcttgtctagaccaggccaggaaggagttggtggagacagttcagtgtcaggggagtcagcagccaccagcatggcctgaagcgtgcgtcctggagccctgcccgccatattgggccgtgggagactttgggccctgctccgcttcctgtggtggcggacttagagagaggccggtccgatgtgttgaagctcagggttcgctgttgaagacactccctcctgcccgatgccgagcgggggcacagcagcccgcggtggctcttgaaacatgcaacccacaaccttgtcctgcccgatgggaagtatctgaacctagctcctgtacgtcagccggcggtgccggtctcgccctagagaacgagacctgtgtccccggagcggatgggctagaagccccagtgacagagggaccaggaagcgtggatgaaaagctgccagccccagagccgtgcgtgggaatgagttgtcctccaggctggggacacctggatgcaacttccgccggtgagaaagcaccatctccctggggttcaattaggactggagcgcaggcagcccatgtttggacacccgccgcgggatcatgttcagtctcatgtggccgcggactgatggagttgagatttctctgcatggattccgctttacgcgtgcccgtgcaagaggaactgtgcgggctggccagtaaaccagggagccggcgggaggtgtgccaggcagttccgtgtcccgcccggtggcagtacaaactcgcggcctgcagtgtctcatgtggcagaggcgtcgtgcggcggatcctatattgtgccagggcccatggcgaggacgatggcgaggaaattcttctcgacacccaatgccagggcttgcctcggccggagcctcaggaggcatgttccctggagccctgtccgccgaggtggaaggttatgtcactggggccctgttccgcgagctgtggacttggaacagctcgacgatcagtggcgtgtgtccagttggaccagggacaggatgtggaggtagatgaagctgcctgcgccgccctggtcagacctgaggccagcgtcccgtgtttgattgccgattgtacatatcgctggcacgtgggtacttggatggagtgctctgtttcttgtggcgatggcatccagaggcgacgcgatacctgcttgggccctcaagctcaggcccccgttccagccgacttctgtcaacacctaccgaagcctgttaccgtccgaggctgttgggctggcccctgtgtcgggcaggggacaccatctctcgttccgcatgaggaagcggccgccccaggccggacgactgccacacccgcgggggccagcttggaatggtcccaggcccgcggcctgctcttctcgcctgccccccaaccaaggcgccttctaccaggccctcaggagaattctgtgcagtcttctgcgtgtgggcgccagcacctcgaacctacaggcacaatcgatatgcgaggcccagggcaggcagactgcgcggtcgccattggtcggccactcggagaagtagtgacccttcgcgtattggagtcgagcctcaactgctctgccggcgacatgctcctgttgtggggacgtctgacctggcggaagatgtgcaggaagctgctggatatgacatttagtagtaaaacaaatactctggtggtacgacagagatgtggccgcccgggaggcggagtattgttgagatacgggtcacagttggctccggagaccttttatcgggagtgtgatatgcagctgtttggaccttggggagagatcgtgagcccatctctgtcgccagctacgtccaacgccgggggttgccgactatttattaatgtcgctccacatgcccgaattgccatccacgctctggctactaacatgggggccggtacggaaggtgctaacgcctcctatatcctcatccgggatacccattctctgcggacaactgcatttcatggccagcaggtgctgtactgggaaagcgaatcctctcaggctgagatggagttctccgagggctttctcaaagcacaggctagcctccgaggacaatattggacgttgcagtcttgggtgcccgaaatgcaggacccccagtcttggaaggggaaggaggggacc

SEQ ID NO: 5688 - DNA, 4281 bp, synthetic construct
  misc_feature 1..4281: note = source = /note="Description of Artificial Sequence: Synthetic coding sequence"
  source 1..4281: mol_type = other DNA
atgcatcagaggcatccgcgggcccggtgcccacccctgtgcgtggcgggtatattggcctgtggatttctactcggatgctgggggccttcccatttccagcaaagctgtttgcaggccctggagccccaggcggtctcttcttacttgtcacccggtgcgccactgaaagggcgtccaccctcaccaggcttccagcgccagagacagcggcagcggagggcagccgggggaatcctgcacctggagctcctagtagccgtaggcccagacgtgtttcaagcccaccaagaagacaccgaacgctatgtcctgaccaatctgaatattggggctgagctgttaagagatccaagtctgggagctcagtttcgagttcatctagtaaagatggtcatcttaacggaacctgagggtgcccctaacataactgctaatctgactagctctctcctgagtgtgtgcggatggagccagaccatcaatccagaggatgataccgacccgggccacgcagatctcgtactgtacatcacccggttcgatctggaactgcccgatggtaaccggcaagtgcgtggagtgactcagctggggggggcttgttccccaacttggtcttgcctcattacagaggacaccggtttcgacctaggggtaactatcgcccacgagattggccattctttcgggttggagcacgacggcgcaccaggatctggttgtgggccctcgggccacgttatggcgagcgatggagcagccccacgtgcaggactagcctggtcaccttgctccagacggcagctcctgagcttgctaagtgcaggtagagcacgatgcgtgtgggatcctcccagaccacagccgggaagtgccggccaccctcctgatgcgcagcccggactatactattcggcaaatgagcagtgtcgggtcgcctttggcccaaaagccgtagcttgcacgttcgccagagagcatttagacatgtgccaggccctgtcctgtcacaccgatccactggatcagtcatcttgtagcaggctgctggtgcctctgctggatggaactgagtgcggcgtggaaaagtggtgcagtaaggggaggtgcaggtctcttgttgagttgacccccatcgcagccgttcatggaaggtggagctcgtggggaccgcgaagcccttgctcacggtcttgcgggggcggtgtggtgaccagacgacggcagtgcaacaatccgcgcccagccttcggaggaagagcatgcgtaggtgccgatctgcaagctgagatgtgtaacacccaggcctgcgagaaaacgcagctggagttcatgagccagcagtgtgctaggacagacggccagcccctgcggtcctctccagggggtgcctccttttaccattggggcgcggcagtgccccacagtcaaggagacgctttgtgcagacacatgtgccgcgccatcggcgaatcttttataatgaaacggggcgattcctttttggatgggactagatgcatgccttcaggcccccgggaggatggaacactgagcctctgcgtgagcggctcttgccgtaccttcggctgcgatgggagaatggacagccagcaggtatgggatagatgtcaagtatgcggcggtgacaactcaacatgtagcccccgcaaggggagctttactgccgggagggcacgggaatatgtgacttttctaactgttacacctaacctgacatccgtttacatcgctaaccaccggccgctcttcactcaccttgctgtgagaatcggaggccgctacgtcgtcgccgggaaaatgagtatcagcccaaacacgacctacccgtcgcttctagaagacggaagggtggagtaccgggttgctctgactgaagatcgcctgccaagactggaagagattcggatttggggccctttgcaagaagacgccgatatccaggtttatcgtcggtacggcgaagagtacgggaacctgacgagacccgacataacgttcacttacttccagcccaaaccgagacaagcttgggtatgggctgctgtcagaggaccatgctcagtgagttgcggggctggccttcggtgggtgaactacagctgtttggaccaagctcgaaaggaactggtcgaaaccgtgcagtgtcagggcagtcagcagcctccagcttggccagaggcttgcgtgctcgagccctgcccaccttactgggcagtgggagactttggaccgtgttccgcctcatgcggtggcggtctcagagagcgtccagtaagatgtgtggaagcccagggaagcctactgaaaaccctgccaccagcaaggtgtagggctggggcgcagcagcctgctgtcgcattggagacgtgtaatccccagccatgccctgccagatgggaggtatctgaaccttcctcctgcaccagtgctggcggagctggcttagcgctcgaaaatgagacttgtgtaccaggagccgacggactggaggcccctgtaacagagggtcccggatcagttgacgaaaagcttcccgcaccagagccatgcgtggggatgtcatgcccccccggatggggacatctcgatgccactagcgccggagaaaaagctccatcaccatggggcagcatcagaacaggggctcaggcagctcacgtatggacccccgccgcgggctcttgttccgtgtcctgcgggcgcgggctgatggagctgagattcctctgtatggatagcgctctgcgcgtaccagttcaagaggaattgtgtggactagcttcaaaaccggggtccaggcgagaggtgtgccaggctgtaccctgtcccgctagatggcagtacaaattggccgcctgctctgtttcttgtggtcggggggtggtgcgccgcatcctttattgcgcaagagctcatggagaggacgacggcgaggagatcctgcttgacacacagtgccagggtttacctcggcccgaaccgcaagaggcctgctcattggagccttgtccccctagatggaaagtgatgagccttggaccctgcagtgcctcttgtgggctggggacagctcggaggagcgtggcttgtgttcagctggaccaggggcaggacgtggaagtggatgaagcagcttgcgccgcgttggttagacccgaagcctcggttccctgtttgatcgcagattgcacttaccgttggcatgtcgggacctggatggaatgcagcgtgtcttgtggcgacggtatccagcggcggcgggacacctgtttaggccctcaggctcaggctcctgtccctgcagacttctgccagcacctgccaaaaccagttacagttagggggtgttgggcagggccctgcgtcggacaggggactccaagcctggtgccgcacgaggaggctgccgcacccggacgcaccactgcgacaccagccggggcttccctggagtggtcccaggctcgcggcctgctattcagtccagccccccagccccggcggttacttcccggtcctcaagagaatagcgtgcagtcttctgcctgtggccggcagcacctcgaacccaccggcactatcgacatgcggggaccgggtcaggccgactgcgcagtagcaatcggcagaccactgggagaggtggttacacttagagtgctggagagtagccttaactgctcagctggcgatatgctgctcctatgggggaggctcacttggcggaaaatgtgtagaaagttgctcgatatgactttttcgtctaagacaaacaccctggtagtgagacagaggtgcggccgcccggggggcggcgtccttctgaggtatggtagtcagctcgcccctgagaccttctatagggagtgtgatatgcagctctttggcccatggggggagattgtgtcaccatccctttcccccgccacaagcaacgccggaggatgccgactgtttatcaacgtggctcctcatgcacggattgctatccacgccctggccactaatatgggcgcaggaacagagggagccaatgctagctacattctgatccgggatactcactctttgcgaaccaccgcctttcatggacagcaggtactttattgggaatccgagtctagccaggcagaaatggaattctcagaggggttcctaaaagcgcaagcttcattgcgcggacaatactggacacttcagtcttgggtcccggagatgcaagaccctcagagctggaaaggcaaggaaggaact

SEQ ID NO: 5689 - DNA, 4281 bp, synthetic construct
  misc_feature 1..4281: note = source = /note="Description of Artificial Sequence: Synthetic coding sequence"
  source 1..4281: mol_type = other DNA
atgcatcaacgccatcctagagctcgctgcccacctctgtgtgtggcgggaatcctggcatgtggctttctgctgggatgctggggaccttcgcacttccagcagagctgtctgcaagcactggaacctcaagcagtctcgtcctacctgagcccgggggccccactcaagggcagaccaccgtcgcctggatttcagagacagagacaacgtcagcgccgagcagccggggggatcctgcatctcgaacttctcgtggcagtgggtcctgatgtgtttcaggctcaccaagaagatactgagcggtacgtcctgactaacctgaacattggtgcagagctgctgcgcgacccttcgcttggtgcacaatttcgggtccacctggtgaaaatggtgattctgaccgaaccagaaggagcaccaaacatcacggcaaacctgacctcttccctgctctcggtgtgtgggtggagccagactatcaatcctgaggatgacaccgacccagggcatgcagatcttgtcctgtacatcactaggttcgatcttgaattgcccgacggtaaccgccaggtgcggggagtcacccaactgggtggtgcatgttcgcctacctggagttgtctcatcactgaagatactgggtttgatctcggggtgactattgcacatgaaattgggcattcattcggacttgaacatgacggggctcctggtagcggttgtggcccatcgggacatgtgatggcttcggatggtgcagcacctcgtgcaggactggcctggtcgccatgttcacgtcggcagcttctctcgctgctttcggcggggcgggcaagatgtgtctgggatcccccaagaccccaacctggctcggcaggccacccaccagacgcacagcccggtctttactattcggctaacgagcagtgtagggtggcgttcggacctaaggcagtcgcatgtacttttgcccgggaacaccttgatatgtgccaagccctgagctgtcatactgatcccctggatcagtcgtcctgttcgcgcctgcttgtgccccttctggatggaactgaatgtggcgtggaaaagtggtgctcgaagggtaggtgtcggtcgctggtggaacttactcccatcgcagctgtgcatggaaggtggtctagctggggtccacgctctccatgttcaagatcctgcggtggaggtgtcgtcactcgtagaaggcagtgcaataacccaagaccagcatttgggggcagagcctgtgtgggagcggacctccaggcagagatgtgtaatactcaggcatgcgagaaaactcagcttgaattcatgtcccaacagtgcgcccggacggacggtcagccccttagaagctcacctgggggtgcgagcttctaccattggggagcagcagtgccgcatagccaaggtgatgcactgtgtcgccacatgtgtcgtgcaattggtgagagcttcattatgaagcgcggggattcatttctcgacggaacgcgctgtatgccaagcggacctagggaagatggtactctgtccttgtgcgtctcgggcagctgtagaacttttggctgtgacggccggatggattcgcaacaggtgtgggatcgctgtcaagtctgtggaggtgacaattcaacttgttctcctagaaaaggtagctttaccgcaggtagagccagagaatacgtgacctttcttaccgtgaccccgaacctgacctccgtgtacatcgcaaaccacaggcccctctttacgcacctggccgtgcgaatcggcgggaggtatgtggtggcagggaagatgtcaatcagccccaatactacctacccctcgctcctggaagatgggagggtggaataccgagtcgcacttaccgaggatcgactcccaagattggaagaaatcagaatctggggtccccttcaggaagatgccgacatccaagtgtacaggcgctacggcgaagagtacgggaaccttactagaccagatattaccttcacctactttcaaccaaagcctagacaggcctgggtgtgggcagcggtgcggggaccctgcagcgtcagctgcggcgcaggtttgagatgggtgaattactcatgcctggatcaagcacgaaaagaactcgtggagactgtgcaatgtcaaggaagccaacagcctcctgcatggcctgaggcctgtgtgctcgagccttgtcctccttactgggccgtcggagattttggtccttgttcggcatcctgcggcggaggtttgcgcgaaagacctgtccgttgtgtggaagcacagggaagtttgctcaaaactctgccccctgcacgctgtagagccggtgcacaacaacctgcagtggccctggaaacctgtaatcctcaaccgtgccctgctagatgggaagtgtcggaaccctcttcgtgtacctctgcgggaggggctggactggcactcgaaaatgagacttgcgtcccaggagctgatggtctggaggcgccagtgactgaaggacccggtagcgtggatgaaaagctcccagcaccagagccttgtgtgggaatgagctgtccccccggatggggacatctggacgcaacgtccgccggagagaaggccccatcgccatggggaagcattcgaactggtgcacaagcagcccatgtgtggacccctgcggcaggctcatgttcggtgagctgtgggcgaggtcttatggagttgcgttttttgtgtatggattccgcccttcgggtgcccgtccaagaggaactttgtggtctggcatccaagcctggttcgaggcgagaagtgtgccaagccgtgccatgtcccgcaaggtggcaatacaagctggcggcttgttccgtttcttgtgggcgcggagtcgtgagacgaatactttactgcgcacgagcacacggggaagatgatggagaggaaattctgctcgacactcagtgccagggtttgcccaggcccgagccacaagaagcatgttcccttgaaccatgtccaccaagatggaaggtgatgagcttgggaccctgttccgcatcatgcggactcgggaccgcaaggcggagcgttgcatgtgtgcaacttgatcaaggacaggatgtcgaagtggacgaagcggcttgcgccgcacttgtcagaccggaagcaagcgtcccttgtctcatagcggattgtacttaccgctggcacgtgggcacttggatggagtgttccgtcagctgtggagacggaatccaacgcagacgggatacttgtcttggcccacaagcccaggcccctgttccagcagacttttgtcaacatctgcccaaacccgtgaccgtccggggctgttgggcaggaccatgtgtcggtcaagggaccccctcactggtccctcatgaggaagcagctgctcccggacgtaccaccgcaacccccgcaggcgcatcacttgaatggtcacaagcacggggtttgctgtttagcccagcaccacagcctcgcagacttctgccagggccgcaagagaattcggttcaatcctcggcatgcggtagacagcacctcgagccaactggaactattgacatgagagggcctggacaggcagattgtgcagtggcaatcggccggcctcttggggaagtggtgaccctgagagtcctggagtcatcccttaactgttccgcgggtgatatgctcctcctgtggggtcggcttacttggagaaagatgtgtagaaagctccttgatatgaccttttccagcaagaccaacacgctggtcgtcagacaaagatgtggcaggccaggtggtggcgtgttgcttcgctacggctcccaactggcaccagaaaccttttatcgtgaatgtgacatgcaactgttcgggccgtggggagagattgtgtcaccttctctttcccctgctaccagcaacgcaggtggctgtcgtctgttcattaacgtggcccctcatgctcggatcgcaattcatgcacttgcaaccaacatgggtgccggaactgaaggggccaacgcatcatacattctcattagagatactcattcgcttcgcaccacggcattccatgggcagcaagttctgtactgggaatcggaatcatcgcaggcagaaatggagttttcggaagggttcctcaaggcacaagcatccctgcgtggtcagtactggactcttcagtcatgggtgccagagatgcaggaccctcaatcatggaagggaaaggaaggaact

SEQ ID NO: 5690 - DNA, 4281 bp, synthetic construct
  misc_feature 1..4281: note = source = /note="Description of Artificial Sequence: Synthetic coding sequence"
  source 1..4281: mol_type = other DNA
atgcaccagcgtcaccctagagctcggtgcccacctctgtgcgtggcaggtattttagcttgcggatttttgttaggctgctggggtccttcccactttcagcagagctgtcttcaggccctggaaccccaggctgtgtcttcttacctttctcccggagcgcctctcaagggaaggccacctagtcctggattccaacgacagaggcagagacagaggagggccgcaggaggtatcctgcatctagagctgcttgtagcagtgggcccagacgtctttcaggcccatcaggaagatactgagaggtacgtacttactaacctgaacattggcgctgaactgctgagggacccaagtctcggagcgcaattcagagtgcatctggtcaagatggttatactaactgaacctgagggcgccccgaacatcaccgcaaacctcacttcttctctccttagcgtatgcgggtggtcacagaccatcaatcctgaggatgacaccgaccccggacatgccgacctggtgctgtatattacgaggttcgacctggaacttcccgatggaaaccggcaggtgcgtggtgtgacccagttagggggggcatgttccccaacttggtcttgcctgatcaccgaagatacggggtttgatctgggagtgactatcgctcacgagatcggacatagcttcggtctggagcacgatggcgcccccgggagtggctgcggcccaagtggacacgtaatggcctcagatggtgccgcaccacgcgcagggctggcttggagcccgtgttctaggcggcagctgctatctctgctatccgctggccgggcgcgttgcgtttgggacccaccgaggcctcagcccggatctgctggccatcctccggatgcacaacctggcttatattacagcgctaatgagcagtgccgcgttgcgtttggacccaaggctgtagcatgtactttcgctagggagcatctggacatgtgtcaggcacttagttgtcacacagacccattagatcaatcctcatgcagcaggttactggtcccgttgctggatggaaccgagtgcggagttgagaaatggtgcagtaagggacgctgtcgaagtttggtggaattaaccccaatagcggccgtccatgggagatggtcatcatgggggccccgtagtccttgctcacgcagttgcggcgggggcgtggtgacccgaagacgtcagtgcaacaaccccaggcctgctttcgggggcagggcctgcgtgggggcagacctgcaggctgagatgtgtaacacccaggcctgtgagaagacacagctcgagtttatgtctcagcagtgtgctcgcacagatgggcagccactacgatcgtccccaggaggggcgagtttctaccactggggagccgccgtgcctcacagtcagggcgacgctctgtgtagacatatgtgcagagcaattggggaatcttttattatgaagaggggcgacagttttctcgatggaacgcggtgtatgccttctgggccccgggaagatgggacactgtccctttgtgtgagtggctcttgtcgcacctttggctgcgacggcagaatggactctcaacaggtctgggataggtgtcaagtatgcggtggcgataattctacatgcagcccaaggaagggatccttcacagcaggcagagctcgcgagtatgtgacctttctcacagtaacccccaatttaaccagtgtctatatcgcaaatcatcgacctctctttacccatctggctgtgaggatagggggtcgctacgtcgtggccggaaaaatgtctatctcccccaacaccacttacccctctctgctggaggacggtcgagtagaatacagagtggcactgactgaggatcgtctgcccaggcttgaggaaataagaatctgggggccattgcaggaggatgccgacatccaggtgtaccggagatatggcgaagaatacgggaatctgacaagacctgacattacgtttacttattttcagcccaaaccaaggcaggcatgggtgtgggcagccgtgagagggccctgtagtgtgtcgtgcggagctggcctgcgctgggtgaactacagttgcctggaccaggctcgtaaagagctcgttgaaacagttcagtgtcagggttctcaacagcctcccgcgtggcctgaagcttgtgtcctggaaccttgcccgccgtattgggcagtgggcgacttcggcccctgttccgcttcgtgcggaggcggcttgagggagaggcctgtacgctgtgtagaagcacagggaagcctactcaagacccttcccccggctagatgtagagcaggagcacagcagcccgccgttgccctcgagacctgtaaccctcagccctgccctgcgagatgggaggtgtcagaacccagcagctgtacatcagctgggggcgccggactggccctggagaacgaaacctgtgtgcccggggctgatggactggaagcccccgtgaccgagggaccaggctcggtggatgaaaagctcccagctcccgagccgtgcgtgggaatgagttgccctcctggctgggggcacctcgacgccacctccgctggcgagaaagccccttcaccatgggggtcgattcgaaccggtgcccaagctgcacacgtgtggaccccagccgcaggtagctgctccgtgtcctgcggccgcggattgatggagctgcgatttctgtgtatggactccgccctgagagtaccggtccaggaagaactgtgtggactggcttcgaagcctggcagtaggcgtgaggtgtgccaggccgtcccttgcccagcacggtggcagtacaagcttgccgcttgctcagtgtcttgcgggcgtggcgtggttcgaagaatactctattgcgccagggcgcacggtgaggatgatggtgaggagatcctgctagatacgcaatgccaaggtctccctcgtcctgagccgcaggaggcatgtagtttggaaccttgcccaccccggtggaaggtgatgtcactgggcccttgtagcgcgtcctgtggccttgggaccgctagacgctcagtggcatgtgtgcagctggaccagggtcaggatgtggaagtggatgaagccgcctgtgccgcactagtgaggcctgaggcgtccgtgccttgtctcatagccgattgtacctaccgatggcacgtggggacctggatggaatgctcggtgagctgtggagacggaattcaaaggagacgcgacacctgccttgggccacaggcccaggcccctgtcccagccgacttttgtcagcacctgcccaaacctgttaccgtgcggggctgctgggctggaccctgcgtcggccagggcaccccgtctctggttcctcacgaagaggctgctgcccctgggcgtacaactgctaccccagccggggcgtctttggagtggtcacaggctaggggtttgctgttcagcccagccccacaacctagaagactactgcccggcccccaggaaaacagcgtgcagtcatctgcatgcggccgccaacaccttgagcctactggcactattgatatgcggggacccggacaagccgattgtgcagtcgccatcggacgtcctcttggggaagtagtcacactgcgggtgcttgagtcatcccttaattgctctgccggtgatatgctgctattgtggggcaggttgacctggcgaaagatgtgcaggaaactacttgatatgacgttttctagcaagaccaataccctcgtggttaggcagagatgtggacgacccggaggaggagtgttgctgcggtacggctcacagctagctcctgagacgttctaccgggaatgcgacatgcagctgtttggaccgtggggcgagattgtcagccccagccttagtccagcaacatctaatgccggcggctgcagattgtttattaatgtagctccccatgcacgcatcgctattcatgccctcgccacaaatatgggcgcagggactgagggcgcaaacgcctcctatattctgattcgcgacacccacagcttgagaactactgcgttccatggacagcaggttctctactgggaatctgagagctctcaggctgagatggagttcagtgaaggattcctaaaggcacaagcctcattgcgcggacagtactggacccttcagtcctgggtgcccgaaatgcaagatccacagtcttggaaggggaaagaaggcacc

SEQ ID NO: 5691 - DNA, 4281 bp, synthetic construct
  misc_feature 1..4281: note = source = /note="Description of Artificial Sequence: Synthetic coding sequence"
  source 1..4281: mol_type = other DNA
atgcatcagaggcatcctcgcgctaggtgtcctcctctgtgcgtcgcaggaattttggcctgcggcttcctcctcggctgctgggggccaagccactttcagcagagctgtttgcaggctctcgaacctcaagccgtgtcatcctacctgtcccccggcgcccctctaaagggacgacccccaagtcctgggttccagagacaacgacagcggcagcgccgtgcagcgggcggtatattgcatctggagctgctggtagccgtgggacctgacgtgtttcaggcccaccaggaggataccgaacgctatgtgctgaccaacctcaacattggcgcggagctgcttcgggatccttccctcggtgcccagtttagagtacacctagttaagatggtgattctgaccgaacccgaaggcgcacctaatattaccgctaacctaacgagtagtctgctgagcgtgtgtggttggtcccagacaattaaccctgaggacgataccgatccaggccacgccgatctagtgctttacattacccgatttgaccttgaattaccggacggaaaccggcaagtccgcggggtaactcagcttgggggtgcatgctcaccaacttggtcctgtctaatcacggaagacaccggctttgacctaggggttacaattgcccacgaaattggtcacagctttgggctcgagcatgacggggcaccgggatccggatgtgggccttcaggacatgtcatggcgtctgacggggctgcacctcgcgcaggactggcctggagcccatgttccaggaggcaactgctttctctcctttccgccggcagggcacgatgtgtgtgggatccacctcggccccagcccggaagcgccggtcaccccccagacgctcagcccggactctactacagtgccaacgagcagtgtagggtagcgttcggacccaaggcagtcgcctgtacattcgcccgggagcatctggatatgtgccaggcactatcctgccataccgaccctctggaccaatcttcttgctctagactcctagtgccactacttgacggcaccgaatgtggagtggagaagtggtgcagcaaggggcgctgtagaagcctggtcgaattaactccgatcgctgccgtgcacgggcgttggtcaagttgggggcccaggtccccttgcagccgaagttgtggaggcggggttgtcaccaggcgacgccaatgtaataaccctaggcctgcctttggaggccgggcttgtgtgggagcggatctgcaggcagagatgtgcaatacccaggcgtgcgagaagacccagctagagtttatgtctcagcaatgcgcccgaactgatgggcagcctctccgatcatcccccgggggtgctagcttttaccattggggggccgctgtccctcacagtcagggcgatgccctgtgccggcacatgtgtcgcgcaatcggggagtcatttatcatgaagcgaggagactcgttcctggatggtacgcgctgtatgccctctggccctcgcgaggacggaacactttccctgtgtgtcagcgggagctgcagaacgttcgggtgtgatggccggatggactctcagcaggtgtgggacaggtgccaggtatgtggaggcgataactctacttgctcacctcgaaaagggagcttcaccgcaggccgtgctagagaatacgtgacgttcctaaccgtcaccccaaatttgacgtccgtgtacattgctaatcacagacccctattcacacatctggctgtgcgaattggtggcagatatgtcgtggcagggaagatgagtatctcaccgaatacaacgtacccttcactgcttgaggatgggcgtgtggagtacagggtcgcattgacggaggaccggctgccccgcctcgaagaaatcaggatctggggccctctgcaagaggatgccgacatccaggtgtacaggaggtatggcgaggaatacgggaacctgactcgtccggatatcactttcacatatttccaaccaaaaccaagacaagcctgggtctgggcggccgtaaggggcccttgttctgttagctgtggagcaggccttagatgggtcaattatagttgcctggatcaagccaggaaggagctggtggagaccgttcagtgtcaggggtctcaacagccacctgcttggcccgaggcatgcgtgctcgaaccttgccccccatactgggccgtgggagatttcggcccatgttcggcctcttgtggtgggggactccgggagaggcccgtacggtgcgtggaggcccaagggagtctgctaaagactttgcccccagcgaggtgtagagcgggtgctcagcaaccagccgtcgctctggagacgtgtaatccacaaccttgccctgcccgctgggaggtttccgagcctagttcctgcacgtctgctggaggcgcagggctcgccctggaaaatgagacgtgtgtccctggcgccgacggtctagaggctcctgtgactgagggtccaggatccgtggacgagaaattgccagccccggagccttgtgtcggcatgtcttgtccccctggctgggggcatctggacgctacctccgcgggtgaaaaagcacccagcccctggggatctatcaggactggagcgcaggccgcgcacgtgtggaccccagccgcgggtagctgtagcgtgtcttgcgggcgtggccttatggaacttaggttcttatgcatggacagtgccctcagggtacctgttcaggaggaattatgtggtttagcctcgaagcctggttcacgccgcgaggtttgtcaggctgtgccatgccccgccaggtggcagtataagctggccgcttgtagcgtgtcctgcggtaggggcgttgttagacgtatcctttattgcgcccgcgcccatggcgaagacgacggcgaggagatccttctggacacgcagtgccaaggcctccctcgccccgagcctcaagaagcctgttctctggaaccctgccctccacgctggaaggttatgtccctgggaccatgctccgctagttgtggcctggggaccgctcgccggagtgtcgcctgcgttcagttggatcagggacaggatgttgaggttgacgaggctgcctgtgcagcactggtgagaccggaagcgtcagtgccatgtttgatagccgactgcacatacaggtggcatgtgggcacctggatggagtgttccgtgagttgcggcgatggcatacaacggagacgcgacacttgtctagggccccaggcccaggcaccagtccctgctgatttctgccagcacctcccgaaaccagtgaccgtgagaggctgctgggccggtccgtgcgtgggccagggtaccccaagcctcgtcccccatgaagaagcagcagcccccggccgtactaccgcaacccctgccggagctagtttagaatggtcccaagccagaggactgctcttttccccagctccacagccaaggcggcttctccccggaccccaggaaaactccgttcagtcttctgcctgcggcaggcagcacctagagcctacggggacgatcgatatgcggggtcccggacaggccgactgtgctgtggcaattggaagaccactcggcgaagtagtcaccctccgagtacttgagagctcactgaactgctctgctggcgacatgcttctgctgtggggacgcctgacatggagaaagatgtgtcgaaagctgctggacatgacattctcttctaaaacaaacactctggttgtgagacaacgctgcgggaggcctggggggggggtcctcctgcgctatggttctcagctcgcccctgaaaccttttatagggaatgtgatatgcagcttttcggcccctggggtgaaatagtgagtccttccctatctccagctaccagcaacgccggtggctgccggctgtttataaacgtcgctccgcatgcaaggatagcaattcatgcccttgctactaatatgggcgctggaacagagggtgccaacgcttcttacattctcatacgcgacactcacagcctacggactaccgcgttccacggacagcaggtgctgtattgggagtctgagagcagtcaggccgagatggagttttccgaggggtttcttaaggcccaggccagtcttcgtggccaatactggactctccagtcgtgggtgccggaaatgcaagacccccaaagctggaagggcaaagaaggcacc

SEQ ID NO: 5692 - DNA, 4281 bp, synthetic construct
  misc_feature 1..4281: note = source = /note="Description of Artificial Sequence: Synthetic coding sequence"
  source 1..4281: mol_type = other DNA
atgcaccagagacatccacgggcacgctgtcctcctctgtgtgtggcaggcattctggcttgcggctttctcctcggatgctggggaccgtcccactttcagcaatcgtgccttcaggccctggaaccacaggcggtgagcagctacctgtcgccgggagcacctctgaagggaaggccgccgtcgccagggttccagcggcaacgccagcgccagcgcagagccgcaggcggcatcctccacctcgaactcctcgtggccgtcggcccagatgtctttcaggcacaccaggaggacactgaacggtacgtcttgaccaacctgaacatcggagctgagctgctgagagatccatcactgggcgcgcagtttcgggtgcacctggtgaagatggtgatcctgactgaaccggaaggcgccccaaatatcaccgcaaatctcacgtcgtcgctgttgtccgtctgcggttggtcccagaccatcaaccctgaagatgataccgatccaggacatgctgacctcgtgctgtacatcactagattcgatttggagctcccggacggaaaccggcaggtccgcggcgtgacgcaactgggtggagcctgcagcccaacttggagttgccttatcaccgaggataccggttttgacctcggtgtgaccatcgcccatgaaatcggccacagcttcggcctggaacatgatggggccccggggtcaggctgcggaccgagcggacacgtcatggcatcagacggtgccgccccgcgcgctgggctcgcttggtccccctgcagccgccgccagctgctgagtctgctctccgctggacgggcaagatgtgtgtgggaccctccgcggccgcagccaggatcggcaggacacccgccagatgcccagccaggcctttactattctgccaacgaacaatgccgcgtggccttcggaccgaaagcggtggcctgtactttcgccagggagcacctcgacatgtgccaggcgctctcctgtcacactgacccactcgaccagtcgtcctgcagcagactgctggtcccgctgctcgatggtactgagtgcggtgtcgaaaagtggtgctcgaagggaaggtgccggtcattggtggagttgactcccattgcggcagtgcacggaaggtggtcgtcttggggcccccgctctccgtgttcccgctcgtgcggaggaggggtagtcaccagacgacggcagtgcaataacccgcgcccggcatttgggggacgggcctgcgttggtgcggatctgcaagccgagatgtgcaacactcaagcatgtgagaaaacgcagctggagttcatgtcccagcaatgcgcgcggactgatggacagccgctgcgctcgtccccaggaggtgcgtcgttctaccactggggggccgcggtgccccattcacagggggatgccctctgtcgccatatgtgccgcgcaattggagaatcattcatcatgaaaaggggtgattccttcctggacggaacccgctgcatgccgtccggacctagggaggacggaaccctctcgctgtgtgtgagcggaagctgtcgaaccttcgggtgtgacggtcggatggacagccaacaagtctgggaccgctgccaagtctgcggaggtgacaattcgacctgctcaccacgcaaaggctcgttcaccgcgggaagagcgcgggagtacgtgactttcctgaccgttactccaaatctgacttcagtctacatcgcgaatcacaggccgctgtttacccacctcgccgtcaggattggcggacgctacgtggtggcagggaagatgtccatttcaccgaacactacttacccttcactcctcgaggacggcagagtcgagtaccgggtggcgctcactgaagatcgcctgcctcggctggaggaaatacggatttggggtcccctgcaggaagatgctgatatccaagtgtaccgcaggtacggcgaagagtatggaaacctgacccgcccggatatcactttcacctactttcaacccaaaccacggcaggcgtgggtttgggcggccgtgcgcggaccgtgcagcgtctcctgcggagccggactgagatgggtgaattacagctgcctggaccaagcacgaaaagaactcgtggaaaccgtccaatgtcagggatctcaacagcccccagcatggcctgaggcctgcgtgctcgaaccgtgcccgccgtactgggctgtgggagacttcgggccgtgctcagcatcctgcggagggggactgcgggaacgcccagtccggtgtgtcgaggcccagggctctctgctcaagaccctgccgccggcccgctgcagagccggtgctcaacaacctgcggttgcgctggaaacgtgcaatccacagccctgccctgcaagatgggaggtgagcgagccctcgagctgcacctccgcaggcggcgcaggcctggccctggaaaacgagacttgtgtgccgggggccgatggtcttgaggctccagtcaccgaaggccccggaagcgtggacgaaaaactgcccgcgccggagccgtgcgtgggaatgtcctgcccgccgggatggggacacctggatgcaacctcagccggagagaaagcaccgtcgccatggggctcaatccggaccggggcgcaggcagctcacgtctggactccggccgccggtagctgctcggtgtcatgcggcaggggcctgatggagctgcggttcttgtgcatggattccgcgctgcgcgtgccggtgcaggaggaactctgcggcctggcctcgaagcccggaagtaggagggaggtgtgccaggccgtgccatgcccggcgcgctggcaatacaagctcgcggcatgctcagtgtcctgcggccggggggtggtccgccggatcctgtactgcgctagagcccacggggaggacgatggcgaagaaatcttgctggacactcagtgccagggactccccagaccggagccacaggaagcatgctctctggagccctgcccgccccgctggaaggtgatgtcactgggtccctgttccgcctcatgcgggttgggaactgcccggcggtcggtggcctgtgtgcagctggatcaaggccaggacgtcgaagtcgatgaggctgcgtgcgcagccctggtgcgcccagaggcctcagtcccatgcctgatcgcggactgcacttacagatggcacgtggggacgtggatggagtgctcggtgtcgtgcggagacgggatccagcgacggcgggacacgtgcttggggccgcaggcgcaggccccagtgccggctgatttctgccagcatctgccaaaacctgtgactgtcagaggatgttgggccggcccgtgtgtgggacagggtaccccttcccttgtccctcatgaagaagccgctgcaccgggacgcaccactgccaccccggcaggtgcatccctggaatggagccaagcccggggactgttgtttagccccgctccccaaccgcggcgcctgctgccgggcccgcaagaaaatagcgtgcagagcagcgcatgcggacgccagcatctcgaaccgaccggaaccatcgacatgcgcggtcctggacaagccgactgcgctgtggctatcggtcgccctttgggagaggtggtgactctgagggtgttggaatcgtcactgaactgctcggctggagacatgctcctgctgtgggggcgccttacctggcggaagatgtgccggaagctcctcgatatgaccttctccagcaagacgaacacccttgtggtgagacagcgctgcggcagaccgggaggtggagtgctgctgcgctacggatcgcagttggctcctgagacgttttatcgcgaatgcgacatgcagctttttggaccttggggagagatcgtgtcgccttctctgtcgccagcgacctcgaatgcgggcggatgtcggctgtttatcaatgtggccccacatgcgaggatcgcaatccacgccttggccactaatatgggagcgggaactgaaggggcgaacgcatcctacatcttgatccgggatacccactccctccgcactactgccttccatggccagcaagtcctgtactgggaatcggagtcaagccaagcggaaatggagttctcagagggtttcctcaaggctcaggcctcgctgcgcggacagtactggacccttcagtcgtgggtccccgaaatgcaggacccacagtcatggaagggaaaggaaggcacc

SEQ ID NO: 5693 - DNA, 4281 bp, synthetic construct
  misc_feature 1..4281: note = source = /note="Description of Artificial Sequence: Synthetic coding sequence"
  source 1..4281: mol_type = other DNA
atgcatcaacgacatccaagagcgcggtgcccaccactttgcgtggccggaatacttgcctgtggatttctgctgggttgctggggaccttctcatttccaacaatcatgtctgcaggcactggaaccacaggccgtgtcctcatacctgagccctggagcgccactcaaagggcgaccaccttcgcctggatttcagaggcaacgtcaaagacagagacgggctgccggaggaattcttcatctggagctgctggtggcggtcggtcctgatgtgtttcaagcacaccaagaggataccgaacgctacgtccttactaacctgaacattggagcagaacttttgcgagatcctagcctcggagcgcagtttcgagtccatcttgtgaaaatggtcattcttaccgagccagaaggtgccccgaacataaccgctaacctgaccagctcactgctctctgtgtgtggatggtcgcaaactatcaaccctgaagatgataccgatcctggacatgcagatctggttctgtacataacgagatttgatctggagcttcctgatggtaacagacaagtccggggagtcacccagctgggcggtgcatgttcaccgacttggagctgcctgattaccgaggatactggctttgatctcggagtgaccattgcacacgagatcggacattcctttggcctggagcatgacggcgctcctggtagcggatgcggaccttcgggacatgtcatggcaagcgatggtgcggcaccaagggcaggacttgcctggagcccttgctcgagacggcaattgttgtcgctcctgtccgcaggccgcgcccgctgcgtgtgggatccaccgaggccgcaacctggaagtgctggccatccaccggatgcgcaaccaggtctgtactactccgctaacgagcaatgtagagtggcctttggccccaaggccgtcgcatgtacttttgccagagaacacctggatatgtgtcaagcgctctcgtgccataccgatccactggaccaatcgagctgctccagattgttggtgcccctgctggatggtactgaatgcggcgttgaaaagtggtgttcgaagggcagatgtcgttccttggtggagctcactccgatcgcggcggtgcatggacgttggtcatcttggggtccccggtcaccttgttccaggtcatgcggtggaggagttgttactcgcaggagacagtgcaacaaccctaggcctgcattcggtggtcgcgcatgcgtgggagcagacttgcaagccgagatgtgtaatacccaggcatgcgaaaagacccaactcgagtttatgtcccaacagtgtgcacggaccgacggccagcctcttaggagctcccctggaggggcctcattttaccactggggggccgcagtgccacatagtcagggagacgccctctgtaggcacatgtgtcgagcaataggagagtcctttatcatgaaaaggggagactcctttcttgatggaactaggtgcatgccctccgggcctcgagaagatggtaccctcagcttgtgtgtgtcgggatcgtgtcgtaccttcggatgtgatggaagaatggactcgcaacaggtctgggatagatgtcaggtctgcggaggcgacaactccacttgcagcccccggaaaggatcatttaccgcaggtagggcacgggaatacgtgacgtttctgaccgtcactccaaaccttactagcgtgtacatagccaatcaccggcctctgttcacgcaccttgctgtacgcatcggtggacgatacgtggtggcgggtaaaatgtccatatcgcctaataccacttatccttcccttctcgaggacggacgggtcgagtacagggtggcactgactgaagatagacttccaagacttgaggagatccgcatttggggaccacttcaggaagatgcagacattcaagtgtaccgtcggtacggtgaagaatacgggaatcttacgcgaccggatattacttttacctactttcaacccaagcctcgccaggcatgggtctgggcagcagtgcgcggtccgtgctccgtgtcatgtggagcagggcttcggtgggtgaattactcgtgtctggaccaggcacgaaaagaactggttgaaactgtgcagtgccaagggtcgcagcaacctccggcatggccagaggcatgcgtgctcgaaccctgtccaccttactgggcagtgggggacttcgggccttgttcggcatcttgcgggggcggtttgagagaacgccctgtgagatgtgtggaagctcaaggttcccttcttaagacgctccctcctgcaagatgcagagcaggtgcacaacaacccgcagttgcgctggaaacctgcaacccccaaccatgtcccgcgcgttgggaagtgtcagaaccctcatcctgtactagcgcgggtggagctggacttgcactggaaaacgaaacttgtgtgccaggagccgatggccttgaagcccccgtcacggaaggtccaggctcggtggatgaaaagctgcctgcacccgaaccttgcgtggggatgtcgtgtcctccaggttggggtcaccttgatgcaacttcggccggagaaaaagcacctagcccctgggggtccatcagaactggagctcaggcagcacacgtgtggactcccgccgcaggttcctgttcagtgagctgcggtcgaggcctcatggaactccgttttctgtgtatggacagcgcacttcgggtgccggtccaagaggagctttgcgggcttgcaagcaaaccaggctcgcggagagaagtgtgtcaggcggtgccttgtccagcccgctggcagtacaagctggcagcatgttcagtgtcgtgcggtagaggggtggtccggcggatcttgtactgtgcgagggcgcatggcgaagatgatggagaagaaatactccttgatactcaatgtcaaggactgcctagaccagagcctcaggaggcatgttcccttgaaccgtgcccaccccgttggaaagtgatgtccctgggaccatgtagcgcgagctgtggactcgggactgcccggcgtagcgtggcctgtgttcagcttgatcaaggacaggatgtggaggtggacgaggcagcctgtgcagcactggtgaggcctgaagcatcggtaccgtgcttgatcgcagattgcacctaccggtggcatgtgggaacctggatggaatgttccgtgtcctgcggtgacggaatccaaagacggcgcgatacttgcctgggacctcaggcccaagcccccgtgccagcagatttctgtcaacatctccctaagcctgtgactgttaggggatgctgggccggaccttgcgtcggccaaggtaccccatcactggtccctcatgaggaggcagcggcaccggggcggaccaccgcgacccctgccggagcgagccttgaatggtcacaagcgcgtggactgcttttttcgcctgccccacaaccgcggcggttgcttccaggtccacaggagaactcagtccaatcatcggcatgtggacgacaacatctggagcctaccggtaccattgatatgaggggacccggtcaggcggattgcgcagtggcaatcggacggcccctgggcgaggtggtgactctgagagtccttgagtcatctctgaactgttcggcaggcgatatgcttcttctctggggacgcctcacttggcggaaaatgtgcagaaaactccttgatatgactttttcgagcaagactaacaccctggtggtgcgccagcggtgcggacgaccaggtggaggtgttttgctcagatacggctcacaacttgcacctgaaactttttacagagagtgcgatatgcaactctttggcccttggggagaaattgtgagcccatcactgtcccctgcaacttccaatgcaggtggatgtagacttttcattaatgtcgcacctcacgcaaggatcgcaatacacgcgctggcaaccaacatgggtgccggaactgagggagccaatgcaagctacattctgattagagatactcactcgctccgtactacggccttccacggacagcaagtgctctactgggaatcggaaagcagccaagccgaaatggagttctccgaaggtttcctgaaggcacaggcatctcttcgcggacagtactggactctccaatcctgggtgccagaaatgcaggacccacagtcgtggaagggcaaggagggcact

SEQ ID NO: 5694 - DNA, 3306 bp, synthetic construct
  misc_feature 1..3306: note = source = /note="Description of Artificial Sequence: Synthetic coding sequence"
  source 1..3306: mol_type = other DNA
atgttccagctgcctgtcaataaccttggcagcttgcggaaggcccggaaaacagtcaaaaagatcctgagtgacattggcctcgaatactgtaaggaacacatcgaggactttaagcagttcgaacccaacgacttctatttgaagaatacaacatgggaggacgtgggcctttgggatccctcccttacaaaaaatcaggattatcgtacaaaacccttctgttgtagtgcatgcccttttagtagtaagttcttttccgcatataagagccacttccgcaacgttcattccgaagacttcgagaaccgcatcctgctaaactgcccctactgtacctttaacgccgataaaaagacgctcgaaacccacattaaaatcttccatgcccccaacgcctccgctccgagttcctcactgagcacgttcaaagacaagaataaaaatgatggcctgaagcctaaacaggcagacagcgtggagcaggcggtctactactgtaaaaaatgcacttacagagatcccttatacgagattgtgaggaagcacatttatagagaacatttccagcatgtcgccgccccatacattgcgaaggcgggggagaagtcgctaaatggagccgtgcctctgggctccaacgcgcgggaagaaagcagtattcattgcaaaagatgtttatttatgcccaaatcttatgaagccctcgttcagcatgtgatcgaggaccatgaaaggattggttatcaggttactgccatgatagggcacacaaatgtggtcgtacctcggtcgaagcccttaatgttgattgcccccaagccacaggataaaaaaagcatggggctccctcctagaattggctccctggcctccgggaatgtgcgatctctgccctcccagcagatggtaaatcgcctatctatacctaagccaaacctgaatagcacgggagtaaatatgatgtcatcggtacacctccagcagaataactacggtgtaaaatctgtcggccagggatacagcgtcgggcagagtatgaggctcggactgggtggtaacgccccagtgtccattccccaacaatcccagtcagtgaagcagctcctcccctctggaaacggccggtcatatgggcttggctcggagcaacggtctcaggcccctgccagatattcccttcagtctgctaatgcgtcctcgctgagcagcggccagctcaagagcccctcactgtcccagtcacaggcctcacgggtactgggccagtcatccagcaagccagcggccgctgcgactggtcctccaccaggcaatacttccagcacgcagaaatggaagatttgtaccatctgcaacgagctattccccgaaaacgtctacagtgtgcactttgagaaggagcacaaagcagagaaagttccggccgttgccaactacattatgaagattcacaacttcaccagtaagtgcttatactgtaaccggtatctgcccactgacaccctactgaatcacatgctcatccatggactgtcttgtccctactgccgctccacctttaacgatgtggaaaaaatggcagcccatatgcgaatggtacacatcgatgaggagatgggacctaaaacagacagcacactctcctttgatctcactctgcaacaaggcagtcacaccaatatccatctactcgtcactacgtataacctccgggatgcaccagcggagtctgttgcataccacgctcaaaacaaccctcccgtgcctcctaaaccccagcctaaagtacaggagaaggccgatataccagtgaaaagctccccccaggcagccgtgccctacaagaaggacgttggcaagacactttgtcccttgtgtttctccattctaaagggtccaattagcgacgcccttgctcaccacctgcgagaaaggcatcaggtgatacagaccgttcaccccgtagagaagaagctgacatataaatgcattcactgccttggcgtctacaccagtaatatgaccgcaagcactatcacactccatctggtccactgccggggggtgggaaagactcagaacggtcaggacaagacgaatgccccttcgaggctcaaccagtccccctccttggccccagttaagcgcacttacgagcagatggagtttcccttgctcaagaagcgcaaactcgacgatgattccgattctccatcgttcttcgaggagaaaccagaggagcctgtggtcctggcacttgatcctaaggggcatgaagatgattcctatgaggcacggaagtctttcctaaccaaatatttcaataaacagccctatccaactcgacgcgagatcgagaagctcgctgccagcctttggttgtggaaatctgatatcgcaagccatttcagtaacaaacgtaaaaaatgcgtccgagattgcgaaaaatacaaaccaggtgtgctgttgggattcaatatgaaggagctcaacaaggtcaagcacgaaatggactttgacgccgagtggctgtttgagaaccacgacgagaaggactctcgggttaacgcatccaagaccgcggataagaagctaaatctgggcaaagaagatgactcatcgtcggattcctttgaaaacctagaagaggagagtaacgaaagcggttcccctttcgatccagtcttcgaagtcgaacccaaaatcagcaacgataaccctgaggaacacgttttaaaggtcatcccggaagacgctagtgaatctgaagaaaagctggaccagaaagaggacggttcgaagtacgaaaccatccatctcactgaagaacccaccaaactgatgcataatgctagcgactctgaggtggatcaggacgacgttgtagaatggaaggacggggcttcccctagcgaatctggtcctgggtcccagcaggtgtctgacttcgaagataacacatgcgagatgaagcccggcacatggtccgacgaatcaagccagagtgaagatgcaaggtcgagcaagccggccgccaagaaaaaagccactatgcaaggggacagagagcagttaaaatggaagaacagtagctatggcaaagttgagggtttttggagcaaggaccaatcacagtggaagaatgcaagcgaaaacgacgagaggctgagtaatccacagatcgagtggcagaattccaccatcgattctgaagatggagagcagttcgacaacatgacagatggagttgccgagcctatgcacgggagcttggccggggtcaagttaagctcacaacaggca

SEQ ID NO: 5695 - DNA, 3306 bp, synthetic construct
  misc_feature 1..3306: note = source = /note="Description of Artificial Sequence: Synthetic coding sequence"
  source 1..3306: mol_type = other DNA
atgtttcaattaccagtgaacaatttgggatctctccggaaggcaagaaaaactgtaaaaaaaattctctccgatataggattggaatattgtaaggagcatatagaagatttcaagcaatttgagccaaatgatttttatttgaagaacacaacttgggaggacgtgggactgtgggatccctctttgacaaaaaatcaagattaccgtactaagcccttttgctgttcagcgtgcccattttcatcaaagtttttctctgcatataagtcacactttagaaatgtgcatagtgaggattttgaaaatcgcatattgctcaattgtccgtattgcactttcaatgctgacaaaaagactttggaaacacatattaaaatttttcatgctcctaacgcgtctgctccatcatcatcgctctcaactttcaaggataaaaataagaatgacggtctcaagcccaaacaagcagatagtgtcgagcaggccgtatactattgcaaaaagtgtacttacagagacccactttacgaaattgtgcgtaaacacatttaccgtgagcatttccaacatgttgctgctccgtacattgccaaagccggagagaaatcactcaatggagcggttccactaggctctaatgcacgggaggaatccagtatccactgtaaacgctgtttatttatgccaaagtcgtacgaagcccttgtgcaacatgtaatcgaagatcatgaacgcattgggtatcaagttaccgctatgattggacacacgaacgtagtcgtccctcgttcgaaaccgctcatgctgattgccccgaagcctcaggataaaaaatctatgggtttgccacctcgcataggatctttggccagtggaaatgtgcgttcgctaccatcacaacaaatggtcaaccgcctgtcgattccaaaaccaaatctaaactcgactggagtcaatatgatgtcgtcagtacacctccaacaaaataactacggggttaagtccgtcggacagggatattcggtcggacaaagcatgcgacttggacttggaggcaatgctccggtgtctattccacaacagtcccaatctgttaaacaactcctaccatcgggtaatggtcgttcttatggattaggttcagagcagcgtagtcaggctccagctagatattccctacaatctgctaatgcatccagtttgagttccgggcaactgaagagcccttcgctgtctcagtcacaagcatcgagagttctcggacaatcatccagtaaaccggcggcagcagctacgggaccaccaccaggaaatacatcgagcacacaaaagtggaaaatttgcacaatttgtaatgagttgtttccggagaatgtatactctgtgcatttcgaaaaagaacataaagctgagaaagtaccagccgttgcaaactacataatgaaaattcataatttcacctcgaagtgcttatactgcaatagatacttacctacggataccttattaaaccatatgcttattcatggtctttcttgcccatattgtcgtagtactttcaacgatgttgaaaagatggctgcacacatgaggatggttcacatcgatgaggaaatgggccctaagaccgattcgacacttagctttgatctgacacttcaacaaggctcacatacgaatatccacctccttgtgacaacttataatctaagagatgcacctgctgaatctgtggcttaccatgctcagaataatccaccagttccgcccaaacctcagcctaaggttcaagaaaaggctgacatcccggtcaaatcatcgcctcaggctgctgttccttataagaaggatgtgggtaagactttgtgcccactttgtttctctattttaaaaggaccaatctcagacgctctggcacatcatcttcgagagagacaccaagtgatccagacagtgcatcccgtcgagaaaaagctgacatacaagtgtattcactgccttggagtttacactagtaatatgactgcatctactataacgctccatctggtccattgtcgcggagtcggtaagactcaaaatggtcaggataaaaccaatgcgccaagccgcttaaaccaatcaccgtcgttggcaccagtcaagcgcacttatgaacagatggagtttccattgcttaaaaagcgtaaacttgatgatgattctgattctccatcgtttttcgaggagaagccggaagagccagttgtgttggcccttgatccgaagggacatgaggacgattcgtatgaggctagaaaatcgtttctaacaaagtactttaataaacaaccatacccaacccgaagggaaatagaaaaacttgcagcttcattgtggctttggaagagtgatattgcgtctcatttttccaacaaacggaagaaatgcgtaagagactgtgaaaagtacaagccgggagtactcctcggatttaacatgaaagaacttaacaaggtaaaacatgaaatggatttcgatgcagaatggttatttgaaaaccatgacgaaaaagattcgagagttaatgcaagtaaaacagctgataagaagcttaacctcggaaaggaagatgattcttcctcagatagcttcgagaacctggaagaagaaagtaatgaaagtggttctccgtttgacccagtgtttgaagttgagccaaagatctcgaatgacaaccctgaggaacatgtgctcaaggtgatcccagaggacgcttcggaatccgaagagaagctagatcaaaaagaggacggaagtaagtacgagacaattcatcttacggaagaaccgacaaaattaatgcacaatgcgtcagattctgaggtcgatcaagatgatgttgtcgaatggaaggatggagcgtccccatctgaatcaggaccagggagccagcaggtatcggattttgaggacaatacgtgcgagatgaagccagggacgtggtccgatgagtcatcacagagtgaagatgctcgttcaagcaagccagcagcaaaaaagaaagcgactatgcaaggagatcgtgaacaattgaaatggaaaaattcttcttacggaaaagttgaaggattctggtcaaaggatcaatcacaatggaagaatgcatcagaaaatgatgagcgtctttcaaatcctcaaattgaatggcaaaactcaacaattgatagcgaagatggggagcagttcgataatatgactgatggtgtcgcagagccaatgcatggatctcttgcaggtgtaaaattgtcttctcaacaggct

SEQ ID NO: 5696 - DNA, 3306 bp, synthetic construct
  misc_feature 1..3306: note = source = /note="Description of Artificial Sequence: Synthetic coding sequence"
  source 1..3306: mol_type = other DNA
atgtttcagttgcctgttaataatctcggtagcctccgcaaagctcgaaaaactgttaagaagatcctgagtgacattggactggagtactgtaaggagcacatcgaggacttcaaacagttcgaaccgaacgatttttatttgaagaacacgacgtgggaagacgttggcctgtgggaccccagcctgacaaaaaaccaggactacagaaccaagccattctgttgctccgcttgtcctttcagcagtaagtttttctccgcttacaagagccatttccggaatgtacattctgaggacttcgagaatcggatcctcttaaattgcccctactgtacattcaacgccgacaagaagaccctagagacccatatcaaaattttccatgcccctaacgcctccgccccttctagtagtctgagcacatttaaagataagaacaagaacgacgggctgaagccaaaacaggccgacagcgtggagcaagcagtctactactgcaaaaagtgtacatacagggacccattatacgagatagtgcgcaaacacatttatagagagcacttccagcatgtggccgccccatatatcgcaaaggccggcgagaagagccttaacggagcggtgcctttagggagtaacgcaagagaagaatcctctatccactgtaaacgttgcctgtttatgccgaaatcttatgaagcattggtacagcatgtcatagaggatcatgaacggattggataccaggtcacggcgatgattggccacactaatgtggtagtcccccgatccaaaccactgatgctcatcgctccaaagccccaagataagaagagcatggggctgccccctcggattggcagtttggccagcgggaacgtcaggtctctgcctagtcaacagatggtcaatcgcctaagcatccccaaacctaacctgaatagcacaggggtgaatatgatgtccagtgtgcatctgcagcagaataattacggagttaaatctgttggacagggatattcagtcggacagagcatgaggctgggcctcggcggcaatgcgccagtgtcgatcccccaacagtctcagtcagtcaaacagctgttgccgagcgggaacggaaggagttatggcctgggcagcgagcaaaggtcacaagctccagccaggtactccctgcagtctgccaatgcttctagcttgagtagcggccagctaaaatcgccaagtctgagccagagccaagctagtagggtcctcggacaaagtagctctaagccggccgccgcagctacaggccctcccccgggcaatacatccagcacccagaagtggaagatctgtaccatatgtaacgagcttttcccagagaatgtctacagcgtgcattttgaaaaagagcacaaggccgaaaaggtgcctgccgtggcaaactacataatgaagatacataatttcacttctaagtgcctttactgtaacagatatttgccgaccgataccctgttaaatcacatgttgattcacggcctcagctgcccttattgtagatctaccttcaatgatgttgaaaagatggctgcacatatgcggatggtgcacatcgacgaggagatgggccctaaaacagactccacgctgagcttcgaccttactcttcagcaaggaagccacactaatattcatctgcttgttactacctataacctgagagatgctcccgccgagtccgtagcctaccacgcccagaacaaccctcctgttccccccaaaccgcagccaaaggtgcaggagaaggccgatattccagtaaagagcagcccccaggcggcggttccctacaagaaagatgtcggcaagaccctgtgccccttgtgcttctctatcttgaaaggtcccatctctgatgccctggcccatcacctcagagaacgccatcaggttattcaaacggtgcaccctgtagaaaagaagctgacatacaagtgcattcattgcttgggtgtgtacacttctaatatgaccgcgagcacaataaccctgcatttggtacattgtcgaggcgttgggaaaacacagaatggtcaggacaaaaccaacgccccttctagattaaaccagtcaccttctcttgcccccgtgaaacgcacctatgagcaaatggagtttcccctgcttaagaaacgcaagctggacgacgacagtgattctccatcattctttgaggagaagcccgaggagcctgtggtcctggctctcgatccgaagggccacgaggatgactcctacgaggcgcgcaaatcttttctcaccaaatattttaacaagcagccgtaccctactcgcagagagatcgaaaagctcgcagcaagcctgtggctctggaagtctgacattgcaagccactttagtaacaaacgcaaaaagtgcgtgagagattgtgagaagtacaagcccggggtcttgctggggttcaatatgaaggaactaaacaaagtgaaacacgaaatggacttcgatgccgaatggctgttcgagaaccatgacgagaaagacagccgagtgaacgcttccaagactgcagacaaaaaactaaacttgggaaaggaggatgatagttccagcgattctttcgaaaatttagaggaggaatcaaatgagagtgggtcgccgttcgaccctgtgttcgaagtagaacctaaaatctcaaatgataaccctgaagagcacgtcctgaaagtcattcctgaagatgcgtccgagagcgaggaaaaactggaccagaaggaagacggaagtaagtatgagacaatccatctaacagaagaaccaaccaaactgatgcataacgccagcgattctgaggtcgaccaggatgacgtggtggagtggaaagacggagcatctccttccgaatcaggtccaggctcacaacaggtgagcgactttgaggataatacgtgcgaaatgaaacctgggacgtggagtgacgagtcctcacagagcgaagatgctaggagctcaaaacctgctgctaaaaaaaaggccactatgcagggcgatcgcgaacagttgaaatggaagaattcttcttatggaaaggttgaggggttttggtccaaagaccagagccaatggaagaacgcctctgaaaacgacgagcgactttctaatccacagattgaatggcagaacagcaccatcgactctgaggatggtgaacagtttgacaacatgactgatggggtcgcagagcctatgcatggatcgctcgctggcgtcaaattgagctcacagcaggct

SEQ ID NO: 5697 - DNA, 3306 bp, synthetic construct
  misc_feature 1..3306: note = source = /note="Description of Artificial Sequence: Synthetic coding sequence"
  source 1..3306: mol_type = other DNA
atgtttcaactgcccgtgaacaaccttggctccctacgcaaagctcgtaagacggtgaagaagatcctgagcgacattggccttgaatattgcaaagagcatatagaggattttaagcaattcgaacccaacgatttctacctgaagaatacaacctgggaagacgttggtttgtgggacccctcgctgacgaagaatcaagactatcgaacaaagccgttttgctgtagcgcttgccccttctcatccaagttttttagcgcctacaagtcccatttccgaaatgttcactcggaagatttcgagaaccgtatactgctgaattgcccgtattgtacattcaatgccgataagaaaacactggaaacgcatatcaagatattccacgcacccaatgcgagcgccccatcttcttcgctgagcaccttcaaagacaaaaacaagaacgacggtttgaaaccgaaacaggccgactcagttgagcaggccgtgtattactgtaagaagtgtacataccgcgatcctctttacgagatcgtccgcaagcatatctacagggaacactttcagcatgttgccgcaccgtacatcgcgaaggctggcgagaagtcactcaatggcgccgtgccgctcggctcgaacgcacgggaggagagtagcatacactgcaagcgttgcttgtttatgccgaagagctatgaagcactcgtgcagcacgtgattgaggatcatgaacgtataggttatcaggtcaccgcgatgattggacacacgaacgtggttgttccgcgctcgaagccgctgatgctaatcgcgcccaagccgcaggataagaagagtatgggcctaccgccccggatcgggagcttagcatcgggaaacgtaaggtctctgccctcccaacagatggtgaaccgtctgagcattcccaaacccaatctaaactcaaccggcgtgaatatgatgagttcggtgcaccttcaacagaataactacggcgtgaagtccgtgggccaggggtacagtgtgggtcagtcaatgcgcctgggtttaggcggcaatgcgccagtgagtattccccagcagtcgcagagtgttaagcaactgcttccaagcggtaacggacggtcctatggtctcggatccgagcagcgctcgcaggcgcctgcaagatactcgctgcagtcagcaaacgccagttccttgtcctcgggccagctgaagtctccctcattgtcgcagtcccaggcctcgcgagtgcttggccaatcttcaagcaagccagccgccgctgccactggacccccgcctggcaacacctcgtccacccagaaatggaagatatgcacaatttgtaacgaattgttccccgaaaatgtttacagcgtgcatttcgaaaaggagcataaggccgagaaggttcccgctgtggcaaactacataatgaagatacacaacttcacgtctaaatgcttgtattgcaacaggtacttacctaccgacacgctgctgaatcacatgctgatccacggtctaagttgcccctattgccggagtacgttcaacgatgttgaaaagatggcagcccacatgcgtatggtgcacatcgatgaggaaatgggcccgaagacggacagcactttgtccttcgacttgaccctgcaacagggcagccacactaacatacacctgctggttaccacctataacctgcgagatgctccagcggaatccgtcgcctaccatgcgcagaataacccgccggttccacccaaaccccagccaaaggtccaagaaaaggcagatatccccgtcaaaagttctccgcaggccgccgtgccctataagaaggacgttgggaaaaccctttgtcccctgtgcttctcgatattgaagggaccaatctccgacgccttggcgcaccacctgcgcgagcggcaccaagtgattcagaccgtgcatccggtggagaaaaaactgacctacaagtgtattcactgcctgggcgtgtacacatctaacatgacggcatcgacgatcacgctgcatctggtacactgccgaggagtgggcaagactcagaatggacaggacaagacgaacgccccctctcgcttaaatcagagcccaagtttagccccggtgaaacgcacctacgagcagatggaattcccgttgttgaagaagcgtaagctcgatgacgactcagacagcccatccttctttgaggagaagcccgaggagcccgtggtgctggccctcgatccaaaaggtcacgaagacgatagttatgaggcaagaaagtccttcctgacgaagtactttaataaacagccgtacccaacgagaagggagatagagaaactcgccgcctctctgtggctctggaagagcgacatcgcctctcattttagcaacaaacgtaagaagtgcgtgcgcgattgtgaaaaatacaagcccggcgtgttgctgggtttcaatatgaaggaactgaacaaagtcaagcatgaaatggatttcgatgccgagtggctattcgaaaatcacgacgagaaggacagcagggtcaacgcaagcaagactgctgacaagaagctcaatctgggcaaggaagatgacagttccagcgactctttcgagaatctcgaggaggagagcaacgagagcggaagtccctttgatcctgtgtttgaggttgaaccgaagatctcgaatgataacccggaggagcacgtgctgaaggtgatacccgaggacgcgtcggaaagcgaggagaagctcgatcaaaaagaagacggcagcaagtatgagaccatccatttgacggaggagccaacgaagttgatgcataatgcttcagacagtgaggtggatcaggatgacgttgtggagtggaaagatggtgcctccccctctgagtccggccccggctcccaacaggtgtccgatttcgaggacaacacgtgcgagatgaagccaggcacctggagcgacgaatcgtcgcagagcgaagacgcccgttctagcaaaccggctgccaagaagaaggcgaccatgcaaggagaccgcgagcagctgaagtggaagaacagttcttacggaaaggtggaaggcttctggtctaaggaccaatctcaatggaagaacgccagtgagaatgacgagcgtttatctaacccccaaatagaatggcaaaattcgactatcgacagcgaggatggggagcaattcgacaatatgaccgacggtgtcgctgagcccatgcatggatccctggccggcgtgaagctgtcatcccagcaggct

SEQ ID NO: 5698 - DNA, 3306 bp, synthetic construct
  misc_feature 1..3306: note = source = /note="Description of Artificial Sequence: Synthetic coding sequence"
  source 1..3306: mol_type = other DNA
atgtttcagctccccgtcaataaccttggcagccttaggaaggctaggaagaccgtgaaaaagatcttgagcgatatagggctggaatattgcaaagagcatattgaagattttaaacagttcgaacctaacgatttttatttgaaaaatacaacatgggaagatgtcgggttgtgggacccttccttgacaaaaaatcaggattaccggactaagcctttctgttgttctgcctgtccattcagcagtaagtttttttctgcctataaatcccacttcaggaatgtgcacagcgaggatttcgaaaaccgaattctgttgaactgtccttattgcacctttaacgcggacaaaaagactctggagacacacatcaagatctttcacgctcctaacgcttctgcccctagcagcagtctaagcacattcaaagacaagaataagaacgatggattaaaacccaaacaggcagacagcgtggaacaggctgtttactattgtaagaaatgtacttatcgggacccattgtatgaaattgtccgaaagcacatctacagagagcatttccagcacgtagccgctccatacatagccaaggcaggagagaagtcacttaatggcgccgtgccgctgggctctaacgcacgtgaggaaagtagtattcattgtaagaggtgcttatttatgccaaaaagttacgaagcgttggtgcaacacgttattgaagatcacgagaggatcggctatcaagttactgcaatgataggccacactaatgttgtggtccctaggagcaagccgctgatgctcatagcccccaagccgcaggacaagaagtccatgggcctccctcctcgaatcgggtctctggcgtcaggcaatgtccggtcactgccaagtcagcagatggtgaatagactgtccattcctaaaccaaacctgaattcgacaggggtgaatatgatgtctagtgtgcatttacagcaaaacaattacggtgtgaagtccgtgggacagggctactccgtagggcagagcatgagacttgggttgggcggcaacgccccagtgagtattccgcaacagtcccagtcggtcaaacagttacttccctctggcaatgggcgttcctacggtttaggttcagaacagaggtcccaggcccctgccaggtactctctgcagtctgccaatgcctcctcactgtcttccggccaactcaagtccccatctctctcacagtcccaggccagcagagtgctggggcagagtagttctaagcctgctgctgccgccactgggcctcctccagggaataccagcagcactcagaagtggaagatttgcactatctgtaatgaactgttccctgagaacgtgtattccgttcacttcgagaaggaacataaagccgaaaaagtccctgctgtcgctaactatataatgaaaatccacaacttcacttcaaagtgcctgtactgtaacaggtacttaccaacggatacacttctgaaccatatgcttatccatggcctgtcttgcccctactgccgctcgacttttaatgatgtggaaaaaatggccgcccacatgcgaatggtccatattgatgaggagatgggaccgaagacagattccacactctcgttcgacctgactctgcagcaggggagccatacaaacattcatctcttggtgaccacatacaacctcagggacgctccagccgaatctgtggcataccacgcccagaataacccacctgtccctcccaagccccagccgaaggtccaggagaaggctgacattcctgttaagagttcaccccaagccgcagtgccgtacaagaaggatgttggcaaaacactgtgtcccctctgtttctctattttaaaaggaccaattagcgatgccttagctcaccatctgcgagaacggcatcaggttatccagacagtgcaccccgtcgagaagaaactgacctacaagtgtattcattgcctgggagtgtatacttcaaatatgacagcgtccaccataactctccatctggtacactgcaggggcgttgggaagactcaaaatggtcaagacaagaccaatgcaccaagcagactcaatcagtccccttcattagctcctgtgaagcgtacctatgaacagatggaatttccccttctgaagaagcgaaaactggatgacgactcagactccccaagtttctttgaggagaagccggaagagccagtagttttagctctcgacccgaagggacacgaagacgacagctatgaagcccgaaagtccttcctgaccaaatacttcaataaacagccatatcccacaagacgggagattgagaaattggctgccagcctgtggctgtggaaatctgatatcgcctcccatttctccaataaaaggaagaagtgtgtgcgagactgcgagaaatacaaaccaggcgtcctgctgggcttcaacatgaaagagctaaacaaagttaaacacgaaatggatttcgatgccgaatggctgttcgaaaatcatgatgagaaagacagtagagtgaatgctagcaagaccgcggataagaaactcaatctgggcaaggaggatgacagctcttccgattcatttgaaaacttagaggaagaaagtaatgagtccgggagtcccttcgaccccgttttcgaagtcgaacccaagatcagtaatgacaatccagaagagcacgttttgaaggtgatacccgaagatgcctctgagagcgaagaaaagttggatcaaaaagaagatggttccaaatatgagaccattcacttgaccgaggagcccactaaactgatgcacaatgcctctgatagcgaggtagaccaggatgatgtggttgaatggaaagatggggctagtcccagcgaaagcgggccgggatctcagcaagtatcagattttgaagacaacacgtgcgaaatgaagcccggcacgtggagcgacgaatctagccagagcgaagacgccagatcaagcaagccggccgcaaaaaagaaagctaccatgcagggtgatcgagagcaacttaaatggaagaatagcagctacggtaaggtggaaggcttctggagcaaagaccagagtcaatggaaaaacgcctccgaaaacgatgaacgtttgagcaacccacagattgaatggcagaattctaccattgactccgaggatggggaacagttcgacaatatgacggatggtgtggccgaacctatgcatggttcgttagccggagtgaaactgtcgtctcaacaggcc

SEQ ID NO: 5699 - DNA, 3306 bp, synthetic construct
  misc_feature 1..3306: note = source = /note="Description of Artificial Sequence: Synthetic coding sequence"
  source 1..3306: mol_type = other DNA
atgttccaacttccagtgaacaatttgggctccctccgcaaggccagaaagacggtgaagaagatcctgagcgatattggcctggagtactgcaaggaacacattgaggatttcaaacaatttgaacccaacgatttctacctcaagaacactacttgggaagatgtgggactgtgggacccctcccttactaaaaaccaggattatcggactaagcctttttgttgttccgcgtgtccattctcgtcgaaattcttttcggcctacaaatcacacttccgcaatgtccactctgaagatttcgagaaccgtattctgcttaattgtccctactgtacctttaatgccgataagaaaactctcgagacgcacattaagatctttcacgcaccaaacgcatcggcaccgtcgtcgagcctgagcacctttaaggacaaaaacaagaatgacggactgaagcccaaacaagcagattcagtcgaacaggcggtttactactgtaagaaatgcacctaccgggatcccctttacgagattgtccggaagcacatttacagagaacactttcaacacgtggcggccccatacattgcaaaagcaggagaaaaatccctcaatggtgccgtgccccttggatcaaacgcacgagaggagtcctcaattcattgcaagcggtgtctgtttatgcccaagtcgtacgaggcccttgtgcaacatgtgatcgaagatcacgagagaatcggctaccaggtgaccgcaatgatcggacacaccaatgtggtggtgccccggagcaagccattgatgcttattgcacctaagcctcaagacaagaaatcgatggggcttccacctaggatcggctccctggcaagcggaaacgtgagatcgttgccatcgcagcaaatggtcaatcgcctgtccattcctaagcctaatctgaactcaacgggtgtcaacatgatgtccagcgtgcatcttcagcaaaacaactacggtgtcaagtccgtgggacagggttactctgtgggccaatcgatgagactggggcttggcggaaacgcaccagtctccatccctcagcagagccagtccgtcaagcaactgctcccaagtggtaacggacgctcatacggacttggttcggaacaaagatcgcaagccccagcaaggtactcacttcaatcggcaaacgcctcctcgctgagcagcggccaacttaaatcgcctagccttagccagtcacaggcatcaagagtgcttggacagtcctcctcaaagcccgccgcggcagcgactggtcctccccccggcaacacctcgagcacccaaaaatggaagatctgtactatctgtaacgagctgtttcctgaaaacgtctactcggtgcactttgaaaaggagcataaggccgaaaaggtgccagcagtggcgaattacatcatgaagattcataactttacctccaagtgcctctactgcaacaggtacctgcccaccgatacgctgctcaatcatatgttgatacacgggctttcgtgtccatactgccgatccacgtttaacgatgtggagaagatggcagcacatatgaggatggtccacatagacgaagagatgggccctaagaccgattcgacgctttcattcgacctgactctgcaacaaggatcccatactaacatccacctgcttgtcaccacttacaatctccgagatgctcccgcggaatccgtggcataccatgcacaaaacaaccctcctgtgcctccgaagccgcaacctaaggtgcaggaaaaggcagatatccctgtcaaaagctcgccacaagcggccgtcccttacaagaaggacgtgggcaagaccctctgtcctctgtgtttttcaattcttaaaggccctatttccgatgcattggcacatcacttgagagaacgtcaccaagtgattcagactgtccatccagtcgagaagaaactgacctacaagtgcattcattgtcttggtgtgtacacttcgaatatgactgcatccacgatcacccttcaccttgtgcattgtcgaggagtgggtaagacccaaaatggccaggacaaaaccaacgcgcctagcagacttaaccagtccccctcgctcgcgcccgtcaagcggacgtacgagcaaatggaatttccgctgctgaaaaagagaaagctcgacgatgattccgactccccttcgttcttcgaagagaagccagaggagccggtggttctggccctggatcctaaggggcatgaggatgatagctacgaagcgcgcaagtccttccttacgaagtacttcaataagcagccctaccccaccaggcgcgagatcgaaaaactggccgcatcactgtggctgtggaagtcggacattgcttcacatttctcaaacaagagaaagaagtgcgtgagagattgtgagaagtacaagcctggagtgctgctgggatttaacatgaaggaacttaacaaagtcaaacatgaaatggatttcgatgcagaatggctttttgaaaaccacgatgagaaggatagcagggtgaacgcgtccaagactgcagacaagaaacttaatctcggaaaggaggatgattcttcctcggattcctttgaaaacctggaggaggagtcgaacgagagcggatcccctttcgatccagtctttgaagtggagcctaagatatccaatgacaatcctgaggaacatgtccttaaagtgatccctgaagatgccagcgagtccgaggaaaaacttgaccaaaaggaagatgggagcaagtacgagactatccatctgaccgaggaaccaactaaactgatgcataacgcaagcgacagcgaagtggatcaagacgatgtcgtggagtggaaagacggtgcaagccctagcgaatccggacccggatcacagcaagtgtcagattttgaggacaatacttgcgagatgaaacccgggacttggtccgacgagtcctcgcagtcggaggatgcacgatcatccaagcctgcagccaagaagaaagcaaccatgcaaggagatagagaacaactgaagtggaaaaacagctcgtacggcaaggtcgagggcttttggtccaaggatcagtcgcagtggaagaacgcatccgagaatgacgagagacttagcaacccgcaaattgaatggcagaactctactatcgattcagaagatggagaacaatttgacaatatgaccgatggagtggctgagccaatgcatggttccctcgcaggagtcaaactttcatcacaacaggcc

SEQ ID NO: 5700 - DNA, 3306 bp, synthetic construct
  misc_feature 1..3306: note = source = /note="Description of Artificial Sequence: Synthetic coding sequence"
  source 1..3306: mol_type = other DNA
atgtttcagctcccagttaacaacctcggttctctgcgaaaggcccgaaaaacagtgaagaaaattctctctgacattggactggaatactgtaaggaacatattgaggacttcaaacagtttgagcccaatgatttctatctgaagaacactacgtgggaagacgttggactctgggacccctccttgacgaaaaaccaggactacaggacaaagcccttctgctgcagtgcttgcccctttagcagcaaatttttctcagcatacaaaagtcacttccggaacgtacactctgaagactttgaaaaccgcatcctgctgaattgtccatattgtaccttcaatgccgacaagaaaactctggagacccacataaaaattttccatgcccccaacgcctccgctccatcatccagcctgtcaactttcaaagataagaacaagaacgacggacttaagccaaagcaggccgattctgtggagcaagctgtatattactgtaagaagtgcacatatagagacccattgtacgagatcgtcagaaagcacatataccgggaacatttccaacatgtggcggctccttacattgccaaagccggcgaaaagagccttaacggggccgtacctctggggagtaacgcacgcgaggagtcttctattcactgcaaacggtgtctgttcatgcccaagtcttacgaagctctggtacaacatgttatcgaagatcatgagcgaatcggataccaggtgacagccatgatcggacacacgaacgttgtggtcccaagaagcaagcccctgatgctgatcgctcctaagccccaggacaaaaagtccatgggactgccaccgcgaatagggagtctcgctagcggtaacgtccgctcacttcccagtcagcaaatggtcaaccggctgtctattcctaagcctaatctcaatagcaccggcgtgaatatgatgtcttcagtgcacctgcagcagaataattacggtgtgaagtctgtgggtcagggttacagtgtcgggcaatccatgcgactgggtcttggcgggaacgctcccgtatcaattccccagcaatcccagtctgttaagcaactcttgccatccggcaatggacggtcctacggactgggatcagagcagaggtcacaggccccagccagatactcccttcaatccgcaaacgccagctcactttccagcggtcagcttaaatccccctctcttagtcagagccaggcaagccgagtcctgggtcagtcttcctcaaaacctgctgcagccgctaccgggccaccccctggtaacacttccagtacgcagaagtggaagatctgcaccatatgtaacgagcttttccctgaaaacgtttattcagtccactttgagaaggagcataaggcggagaaggtgccagcagtagccaattatatcatgaagatacacaacttcaccagcaagtgtctttactgcaatagatacctgccgaccgacactctgctgaatcatatgctgattcatggactctcatgcccctactgtcgctccaccttcaatgacgtggagaagatggcagctcatatgcggatggtgcacatcgatgaagaaatgggcccaaaaaccgatagcacactgtcttttgatctgaccctgcagcaaggctcccacacgaatatccatctgctcgtaactacatacaatctgcgcgatgctcctgctgaaagcgtcgcataccacgcccagaataatcctccagttcccccgaagccacagcccaaggtacaggagaaagccgacattccggtgaagagctctccacaggctgcggtgccctataaaaaggacgtggggaagaccctgtgtccgttgtgcttcagcatccttaagggcccaatctccgacgccctggcccatcaccttcgcgagcggcaccaggtaatccaaacagtccatcccgtcgagaagaagttgacgtacaagtgtatacactgcctgggcgtatacacctctaacatgaccgcgtctacaatcaccctgcacttggttcactgcagaggtgttggcaagacccaaaacgggcaggataagactaatgcgccgagtaggctgaatcagagccctagcctggcaccagtgaagcgcacttatgaacaaatggagttcccactcctcaaaaagagaaagctggacgacgatagcgattctccatcctttttcgaagagaagcctgaagagccagtcgtcctcgctctggacccaaagggacatgaggatgatagctatgaagcgcgcaagagttttctcactaaatattttaataaacagccttaccccacaaggagagagatcgaaaagctcgctgcttctttgtggctttggaagagcgatattgcgtctcacttcagcaacaagcgcaagaaatgtgttcgggactgcgagaagtataaaccaggagtgctcctggggttcaatatgaaggagctcaataaggtgaagcatgaaatggatttcgatgccgagtggctgttcgaaaaccatgacgagaaggactcaagagtcaatgcaagcaaaacagctgataagaagctgaacctgggaaaagaagacgacagctcctcagactcattcgagaacctggaagaggagtctaacgagagcgggagtccctttgatccagtgtttgaggtcgaaccaaagatcagcaacgacaaccccgaggagcatgtcctgaaggtgatccccgaggatgcctccgaaagtgaggagaagcttgaccagaaagaggacggctctaagtacgagacaatacacctgaccgaggagccaacgaagctgatgcacaacgcatccgatagtgaggtcgaccaggacgacgtcgttgagtggaaggacggcgcaagcccaagtgagtctggccctggcagccaacaagtttcagactttgaggataatacctgcgaaatgaaaccaggcacctggtctgatgaatcttcccagtccgaagatgcccggagcagcaagcccgccgcaaagaagaaagccactatgcagggcgatagggaacagctgaaatggaagaatagcagctatgggaaagtggagggcttctggagtaaagatcaaagccaatggaaaaacgcctccgagaacgacgaacgcctgtctaatcctcagattgaatggcagaacagtaccatcgactcagaagacggtgaacaattcgacaatatgacagatggcgtagcagagccaatgcacggctccctggccggtgtgaagctgagcagccagcaggcg

SEQ ID NO: 5701 - DNA, 3306 bp, synthetic construct
  misc_feature 1..3306: note = source = /note="Description of Artificial Sequence: Synthetic coding sequence"
  source 1..3306: mol_type = other DNA
atgtttcaattgcctgtgaacaatctgggctccctcagaaaggcaaggaaaactgtgaagaaaatactaagtgacattggactggagtattgtaaggaacatatcgaggattttaaacaatttgagccaaacgatttttatctcaaaaacaccacctgggaggacgtcggactatgggacccctcactgactaagaaccaggattatcgtactaagccgttctgctgctccgcctgccctttctcatctaagttcttcagcgcctataagtcccacttcaggaatgtgcatagcgaggattttgaaaatagaattcttctgaactgcccttattgcacattcaacgccgataaaaaaacactggaaacacatatcaagattttccatgcccccaatgccagcgccccctcttcctctctgagcacattcaaggataagaacaagaatgacggccttaagcctaaacaggccgactccgtggagcaagctgtgtactattgtaaaaagtgtacttatcgcgaccctctctacgagatcgtgagaaagcacatataccgggagcactttcagcacgtcgccgctccctacatcgccaaggcgggagaaaaatcccttaatggcgcggtgccactgggaagcaacgcacgagaggaatccagcatccattgtaagagatgccttttcatgccaaagagttacgaggcacttgtacagcacgttatcgaggaccatgagcggattgggtatcaggtcactgcaatgataggacacaccaacgtggtggtgcccagaagcaaaccattgatgctgattgcaccaaaaccccaagataagaagtcgatgggattaccgccccgaatcggatccctggccagcggtaacgtgagaagcctcccctctcagcagatggtgaataggctttccatacctaagcccaacctgaacagcacaggcgtcaacatgatgtccagcgtgcacctccaacagaacaactatggcgtaaagtctgtaggtcaagggtacagtgtaggtcagtccatgaggcttggcctgggcggtaatgccccagtgtccatccctcagcagtcgcagtcagtgaagcagctcctgccatccggcaacgggaggagctacggcctcggcagcgagcagcgtagtcaggctcctgcccggtatagcttacagagtgcgaatgcttctagtttaagcagtggtcagctgaagtccccttcactctcacagtcccaggcctcgcgggttctgggtcagtctagctccaaaccggctgccgccgccaccggtccaccccccggtaacacttcgagcacccagaagtggaagatttgcacaatttgtaacgagttatttcccgaaaacgtgtactcagtgcactttgaaaaggagcacaaagcggagaaggtgcctgcagtagccaattatattatgaagattcataattttacatccaagtgtctgtactgcaatcgttatttaccgactgacacattgcttaaccacatgctgatacatggtctgtcttgtccatactgcagatctacctttaatgacgtagagaagatggcagcacacatgcggatggtgcatatcgacgaggagatgggcccgaagactgattccacactgtccttcgatctgaccttgcaacagggctcccacacgaatatccatctgctggtgacaacatataatctgagagacgccccagccgagtctgtcgcgtaccatgcacagaacaaccccccagtgccaccaaagcctcagccgaaggtgcaggagaaggccgatatcccggtgaagagcagtccgcaggctgctgtgccttataagaaggatgtcgggaagaccctctgtccgttatgcttctcgatactcaaaggacctatcagtgatgcactcgcccatcatctaagggagcgacaccaagtcatacaaactgtgcaccctgtcgaaaaaaagcttacctataagtgtattcattgcctgggagtctatactagtaatatgactgcctcaaccatcacactgcacttagtgcactgccggggcgtgggcaaaacccaaaatgggcaggataagactaatgcaccctctcggcttaaccaatccccctcactggcacctgtgaaacgtacctatgaacagatggaattccctctcttgaagaagcggaagttggacgacgacagcgattctcccagttttttcgaagaaaagccagaggagcccgtggtcctcgccctcgatccaaaaggacatgaagacgacagctatgaggcgcgtaaatcctttctgacaaagtatttcaataaacaaccctatccaactcgacgtgagatcgagaaactcgcagcatccctatggctgtggaagagcgatatcgcaagccacttctctaataagaggaaaaaatgtgtacgagattgcgaaaagtacaaacccggtgtgctactcggatttaacatgaaagagctgaacaaagtcaagcatgagatggacttcgatgctgagtggttgttcgagaaccatgacgaaaaagattcaagggtgaatgctagcaagaccgccgataaaaaactgaaccttggcaaggaggacgattcttccagcgacagttttgagaatctggaggaagaatcaaatgaatcggggtcacccttcgatcctgtattcgaagtcgagcccaagatctccaatgataatccagaagaacatgtgctcaaggtaataccagaagacgcttctgagagcgaggaaaaactggaccagaaagaggatgggtccaagtatgagacaattcatctaacagaagagcctacgaagctgatgcacaacgcctcagacagtgaagtggatcaagatgatgtagttgaatggaaagatggtgcctccccttctgagagtggccctggatctcagcaagtatctgatttcgaagacaatacctgcgaaatgaaaccaggtacatggtcagatgagagttcacaatcagaagacgcccggagttcgaagcctgccgctaaaaagaaagctactatgcagggcgatagggaacagctcaaatggaagaactcaagttatgggaaggtcgagggcttctggtctaaggatcagtcgcagtggaaaaatgctagcgaaaatgacgaacggctgtctaatcctcaaatcgagtggcagaacagtaccatcgactctgaagacggggagcagtttgacaacatgaccgatggtgtggctgaacccatgcacgggtccctggctggggtgaaactctcttctcagcaggct

SEQ ID NO: 5702 - DNA, 3306 bp, synthetic construct
  misc_feature 1..3306: note = source = /note="Description of Artificial Sequence: Synthetic coding sequence"
  source 1..3306: mol_type = other DNA
atgttccaactgcccgtcaacaacttgggatccctgcgcaaggccagaaagaccgtcaagaagatcttgtcagacatcggcctcgagtactgtaaagagcacatcgaagatttcaaacagttcgagcccaacgacttctacttgaagaacacaacctgggaagatgtcggactttgggatccgagcctcaccaaaaaccaggattaccgtactaagccattctgctgttctgcctgccctttcagctctaagttcttctctgcatataagagccactttcgtaacgttcatagtgaggatttcgagaaccgcatcttgctcaactgcccctactgcacattcaatgccgataaaaaaaccttggagacacacattaagatcttccacgctcccaatgcctcggcaccgtcgtcgtcgctctcgaccttcaaggataagaataaaaacgatgggctcaagccgaagcaggccgattccgtcgagcaagcggtctactattgcaagaagtgtacctatcgcgaccccctgtacgagattgtccgcaagcatatctatcgcgagcacttccagcatgtggcagccccttacatcgctaaggctggagagaagtcactgaacggagcagtccccctgggcagcaatgcacgtgaggaatcaagcatccactgcaagcgttgtctctttatgcctaagtcttatgaggctttagtgcagcacgttatcgaggaccatgaacgaattgggtaccaggtcacagccatgataggccataccaatgttgtggttccgcggagcaagcctcttatgctgatcgcccccaagccgcaagacaagaagagtatgggcctccccccgcgtattggctcgctcgcgtccggcaacgtacgttctctcccaagccagcagatggtcaacaggttgagtatcccaaagcctaacctgaatagcaccggcgtcaacatgatgtcgtctgttcacctgcagcagaataactacggggttaagagcgtgggacaggggtactcggtcggccagtcaatgcgcctcgggctcggaggtaatgcccctgtgagcattccgcagcagagtcagtccgtgaagcaactcctcccttctggcaacggtcgctcttacggcctggggtccgagcagcggagccaggcccccgcccgctatagcctgcagagcgctaacgcgagttccctgtccagcggtcaactgaagtcgccctcactctcacagagccaagcgagccgcgtgctcggtcagagttcctccaagcccgcggcggcagctaccggtccaccacccggcaacacctcgagtacccaaaagtggaaaatctgcacaatctgtaacgagctgttcccggagaatgtctattctgtccacttcgaaaaggagcacaaggcagaaaaggttccagctgtggctaattatattatgaagatccacaacttcaccagcaagtgcctttactgtaaccgttacctccccactgacacactgctgaatcacatgctgattcatggactgtcttgcccttactgtcggtctaccttcaacgacgttgagaagatggccgcgcacatgcgcatggttcacatcgacgaggaaatgggaccgaagactgattctacgttgtccttcgatctgaccctccagcagggtagccacaccaacatccacctgctcgtgaccacgtataacctgcgtgatgctcctgcagagagcgttgcctatcacgcacagaacaacccccctgtgccgcctaagcctcagcccaaggtgcaagagaaggccgatatcccggtcaagtccagcccacaggctgctgtcccgtacaagaaggacgtcggcaaaaccctgtgtcccctgtgcttctctatcctgaagggccccatctcggacgccctggctcaccatcttagagagcggcatcaggtcatccagacagtccaccctgtcgaaaaaaagttgacctacaagtgcatccactgcctcggcgtttacaccagtaacatgacggctagcaccatcaccctgcatcttgtccactgtcggggtgtgggcaagacccaaaacggccaggacaagaccaatgccccgtcccgtctcaaccagagtcctagcctcgcacctgtcaagcgtacctatgaacaaatggagttcccactccttaagaagcggaaactggacgatgactctgacagtccttcgttcttcgaggaaaagcccgaggagccggtggtcctggctctcgatcccaagggccacgaggatgactcctacgaggcccgtaaaagtttcctgaccaagtacttcaataagcagccctacccgacccgtcgtgagatagagaagctcgctgccagtttatggctgtggaagtccgacatcgctagccacttttccaacaagcggaaaaagtgcgtgcgagattgtgagaagtacaaaccgggggtccttcttggattcaacatgaaggaattgaacaaggttaagcacgagatggatttcgacgccgaatggttgttcgagaatcatgacgagaaggactcgcgcgtgaacgcgtctaagaccgccgacaagaagctcaacctcggcaaggaggacgatagcagctccgatagtttcgaaaatttggaggaggagtcaaacgagagtgggtctcccttcgaccctgtgtttgaggtcgaacctaagatctctaatgacaaccctgaagaacatgtcctcaaggtcatccccgaggatgcgtcggagtccgaggaaaaactggaccagaaagaagacgggtccaagtacgaaacgatacacctcactgaggagcccacgaagttgatgcataacgcgagtgatagcgaagtcgatcaggatgatgttgtcgagtggaaggacggcgcttctccttccgagagcggtcctggatctcaacaggtctcagactttgaggacaacacctgcgagatgaagcctggtacctggtcggacgagtcctcgcagtctgaagacgcacggagttcgaagcccgctgctaagaagaaggccacaatgcagggtgatcgggagcaattgaagtggaagaacagctcctacggtaaggtcgagggcttctggagtaaggaccagagtcagtggaagaatgcttcggaaaacgacgagcgtctctccaacccgcagattgagtggcagaactcaaccattgacagcgaagatggcgagcagtttgacaatatgactgacggcgtcgccgagccgatgcacggttcgctggccggcgtcaagttgtcgtcgcagcaggcc

SEQ ID NO: 5703 - DNA, 3306 bp, synthetic construct
  misc_feature 1..3306: note = source = /note="Description of Artificial Sequence: Synthetic coding sequence"
  source 1..3306: mol_type = other DNA
atgtttcaattgccagtgaataaccttggctcactgcgaaaagcaagaaagactgtgaagaagatcctctccgacatcggcctcgagtattgcaaggagcatatcgaagatttcaaacagttcgaacccaacgacttttacctcaagaacacgacatgggaggacgttgggctctgggacccaagcctcactaagaaccaggattataggactaagcccttttgttgttctgcctgcccattttcttcaaaatttttctcagcctacaagtcacactttagaaacgtgcactcggaagattttgaaaaccgaatccttctgaactgtccatactgtacattcaatgccgataaaaagactctcgagactcatatcaaaatctttcacgcaccaaacgcgtctgcaccctcatcatccctctcgactttcaaggataagaacaaaaatgacggtcttaagcctaaacaggccgactcagttgagcaggcagtgtattactgcaagaaatgtacctatagggacccactgtacgaaatcgtcaggaagcacatctaccgcgagcactttcagcacgttgcagccccatatatcgccaaagctggggaaaaatctcttaacggcgccgtgcctctggggagtaacgcacgagaggaatcttccattcattgtaagcggtgtctgttcatgcccaagagttacgaggcgctagtccagcacgtgatcgaagatcacgagcggattggctatcaggttaccgccatgatcggacacacaaatgtagttgtgccccgatctaaacctctgatgcttattgctcctaaacctcaggataagaaatctatggggctgccccccagaattgggtctttagcctcaggcaacgttaggtctctaccaagtcaacagatggtgaatcgtctgtccatcccaaagcccaacctaaatagcactggtgtcaatatgatgtcatccgtacatctacagcagaacaattatggtgttaaaagcgtgggacaggggtatagcgtcggccaatcaatgagacttggcctgggcgggaacgctccggtttctataccacaacaatcgcagtccgtcaagcaactgctgccatccggtaacggccggagctacggcctgggctccgagcagcggtcccaagcccccgcgcgctactctctacagagcgcgaacgcctcgagcctgtcctcagggcaactgaagagcccgtcactatctcagagccaggcttccagggtactaggccagtcgtcatcgaaacccgccgcagccgccacagggcccccccctgggaataccagttctactcagaaatggaagatatgcaccatatgcaacgagctgtttcccgaaaatgtttattccgtccactttgagaaagaacacaaagcggaaaaagtacctgccgtcgcaaactatattatgaagattcataattttacgtcaaagtgtctgtactgtaataggtatctccccaccgacaccttattaaaccacatgctgatacacgggcttagctgtccttactgccgctccacattcaatgacgtggagaaaatggccgctcacatgaggatggtccatattgacgaagaaatgggtcccaagaccgactcgactctgtccttcgacctgactctgcaacagggcagccacaccaatatccacttactggtgacaacatataatctgcgggacgcgccggcggagagtgtagcctaccacgcccagaataaccctccggtaccacccaagcctcagcccaaggttcaggagaaggcagacattccggtaaaatcttctcctcaggcagctgtgccatacaaaaaagacgtcggcaaaactctctgtcccctatgtttcagcatcttgaaggggcccatttctgatgctctagctcaccatttacgagaaaggcaccaagtgatccagactgtgcaccccgtggaaaagaaactgacttacaaatgtatccactgtcttggcgtgtatacaagcaatatgactgcctccacaataaccttgcacttagtccattgtcgcggagtcggaaagactcagaatgggcaggacaagacaaatgctccttctaggctcaaccagtctccaagtctggctcccgtgaaacgtacgtacgagcaaatggagtttccccttctgaagaagcgtaagttagatgacgacagcgactctccatctttcttcgaagaaaagcctgaggagccggttgtgttggctctggaccccaaaggccatgaggacgatagctacgaggccagaaagagcttcctgacaaaatacttcaacaagcagccttatcctacgcggcgcgaaatagaaaagctagccgcctcactctggctgtggaaaagcgacattgccagccattttagcaataaacggaagaagtgcgtccgagactgcgagaagtacaagccaggagttcttctgggattcaacatgaaagagctgaacaaggtcaagcacgagatggatttcgacgccgagtggctattcgagaaccacgatgagaaggacagtcgggtaaacgcttcaaaaacagctgacaagaagcttaacctgggaaaggaggatgattcctcctcggattctttcgagaatctagaagaagaatctaacgagtccggcagtccattcgaccctgtcttcgaagtcgaacctaagattagcaacgataatccagaggaacacgtgttaaaggtcatccccgaagacgctagtgaatcagaagagaaattggaccagaaagaagacggttccaaatacgaaaccatacatctgacagaggaacctacgaagctcatgcataatgcctctgatagcgaagtggaccaggatgatgtagtcgagtggaaggacggcgcctcgccatcagagagtggccctgggtcccaacaggtgtccgacttcgaggacaacacgtgcgaaatgaaacccgggacgtggagtgatgagtcaagtcagtcagaggacgcccgcagttctaaacctgctgccaaaaagaaagccaccatgcagggcgacagggagcagttgaaatggaagaactctagctatgggaaggtcgaagggttctggagtaaggatcagtctcaatggaagaatgcgagcgaaaacgatgagcgactgtccaaccctcagatagaatggcagaactcgactatcgattccgaagatggcgagcagttcgacaacatgaccgatggcgtcgcagaacctatgcatgggagcctggctggcgtgaaactgtccagtcagcaggca

SEQ ID NO: 5704 - DNA, 3306 bp, synthetic construct
  misc_feature 1..3306: note = source = /note="Description of Artificial Sequence: Synthetic coding sequence"
  source 1..3306: mol_type = other DNA
atgttccaactgcctgtaaacaatctgggctcgctgcgaaaggcgaggaaaacggtcaaaaagattctgagcgacattggacttgaatactgcaaggaacacattgaggatttcaagcagttcgaaccgaacgatttctacctgaaaaacactacctgggaagatgtcggactgtgggacccgtccctgactaaaaaccaggattacaggactaagcctttctgttgctcagcttgtccgttctcgagtaagttcttcagcgcatacaagtcgcactttcggaatgtccattcagaagatttcgagaaccgcatcctcctgaattgcccgtactgtacctttaatgcggataagaaaactctggagactcatatcaagatattccatgcaccaaatgcatcagccccatcgtcctcgttgagcacgttcaaggacaagaacaaaaacgacgggctgaagcctaagcaggccgactccgtcgaacaggccgtgtactactgcaaaaagtgtacctacagggacccgctgtacgagatcgtaagaaagcatatctatcgggagcactttcagcacgttgcggcaccatacatcgccaaggccggggagaagagcctcaacggcgcagtgccgctgggatcaaacgcacgggaagagtcgtcaatccactgtaagcggtgcctgttcatgccgaaatcatacgaagcgttggtgcagcatgtgatagaagatcatgaacggatcggataccaggtgactgccatgattggacatactaacgtggtggtcccacgctccaaacccctcatgttgatcgcgccgaaaccccaggacaagaaatcgatgggtctgccaccaaggattggatccctggcctcaggcaacgtccggagcctgccgtcacaacagatggtgaacagactgagcatcccgaagccgaacctcaacagcacgggagtcaacatgatgagctccgtgcacctgcaacagaataactacggagtgaagtcagtgggacaaggttactctgtcggccagtccatgcggctgggactcgggggaaatgcacccgtttcgataccccaacaatcccagagcgtgaaacaactcctgccgtccggaaatggccggtcgtatggactcggcagcgaacaacggagccaggcccctgcccggtactcccttcaatcggccaatgcgtcgtcgctgtcctcaggacaactgaagtccccatcactgagccagtcccaagctagccgggtcctggggcagagctcatcaaagcctgccgcggcggctaccggcccaccacccggtaacacttcatcgactcagaagtggaagatctgcaccatctgcaatgagctcttccctgagaacgtctacagcgtgcacttcgaaaaggaacacaaagctgaaaaggtcccggcggtggccaattacatcatgaagatccacaacttcacgtccaagtgcctgtactgcaaccggtacttgcccactgacacgctgttgaatcacatgctgatccatggcttgagctgcccctactgtcggagcacctttaacgacgtggagaaaatggcagcccatatgaggatggtccacatcgacgaagaaatgggtcccaagacggactcgactctgagctttgacctcactttgcagcagggctcccataccaacatccacctcctggtgaccacctacaatctgcgggatgcgccggccgagtcagtggcgtaccacgctcagaacaaccccccagttccaccaaagccgcagcccaaggtgcaggagaaagcagatattccggtgaagagctccccgcaagcggccgtcccttacaaaaaagatgtgggaaagactctctgccccctgtgcttctcgatcctgaaggggccgatcagcgatgctctcgctcaccacctgcgcgagcgccatcaagtcatccagaccgtgcatcctgtggaaaagaaacttacttacaagtgcattcactgtctgggagtttacacctcaaacatgaccgcgagcactatcaccctccacctcgtccactgcagaggggtggggaaaacccaaaatggccaagacaagactaatgctccgagccgactcaaccaatcaccgagccttgcgccggtgaagcggacctacgaacaaatggaattcccccttttgaaaaagaggaagctcgatgatgattcagactccccgtcattctttgaagaaaaaccggaggagccagtggtgcttgccctcgaccccaagggccatgaggacgattcctacgaggcacgcaagagcttcctgaccaaatacttcaacaaacagccatacccgacccgccgggagattgaaaaactggctgccagcctctggctgtggaagtccgacatcgcatcgcacttctcgaacaagagaaagaagtgcgtgagggattgcgagaagtacaagccgggcgtgctgctcgggtttaacatgaaggaactgaacaaggtgaaacacgaaatggacttcgacgcggagtggctgtttgagaatcatgacgaaaaggatagccgggttaacgccagtaagaccgccgacaagaagctgaaccttgggaaggaggatgattccagctcggacagcttcgagaacctcgaagaggaatccaacgaatccgggagcccattcgaccctgtgtttgaagtggaaccaaagatttccaacgacaaccctgaggaacatgtgctgaaggtgatcccggaggacgcgtcggaatccgaagaaaaactcgatcaaaaagaagatggatccaagtacgaaaccatccacctcaccgaggaacctaccaaactgatgcacaatgccagcgactcagaggtggaccaggacgatgtcgtcgagtggaaggatggagcgtcccccagcgaatcaggccctggatcacagcaggtgtcggacttcgaggacaatacttgcgagatgaagccgggaacctggtccgacgaatcctcacaatccgaggatgcccggtcgtctaaaccggcggcgaagaagaaggcgaccatgcaaggagatcgcgagcagctgaaatggaaaaactcctcgtacggaaaggtggaaggattctggtcgaaggatcagtcgcagtggaagaacgcgagcgaaaacgacgagagactctccaatcctcagatcgaatggcagaactcgaccatcgacagcgaggatggagagcagtttgacaacatgaccgatggtgtggccgagcccatgcatggatcgctcgccggagtgaagttgagctcccagcaggcc

SEQ ID NO: 5705 - DNA, 3306 bp, synthetic construct
  misc_feature 1..3306: note = source = /note="Description of Artificial Sequence: Synthetic coding sequence"
  source 1..3306: mol_type = other DNA
atgttccagctgcctgtcaataacctcggctcgctgagaaaagcacgaaagaccgtcaaaaagatcctttcagatatcggactggagtactgtaaggaacacatcgaggatttcaagcaattcgagccgaatgacttttaccttaagaacacgacctgggaggatgtgggactctgggacccttcgctgaccaagaaccaggattaccggactaaaccattctgttgttcggcgtgtccgttttcatcgaagtttttcagcgcatacaagtctcacttcagaaatgtgcattcagaggattttgaaaaccgcatcctgctgaattgcccttactgcacttttaacgcggacaaaaagaccctggaaactcacatcaagatttttcacgcacctaacgcgtcggcgcctagcagcagcctgtcaacttttaaggacaaaaacaagaatgatggactgaagcctaaacaagccgacagcgttgaacaagcagtgtactactgtaaaaagtgtacctaccgcgatccgctttatgagattgtgagaaagcatatctaccgcgaacattttcagcacgtcgcagcaccctacatagccaaggcgggggagaaatctcttaacggagcagtgccactgggctcgaatgcacgggaggaatcatcaattcattgtaaaagatgtctctttatgccaaaatcttacgaggcacttgtgcagcacgtgatagaggaccacgaaaggattggataccaggtgactgcaatgattggacatactaacgtggtggtcccacgctcgaaacctcttatgttgatagccccgaagccgcaagataagaaaagcatgggacttccaccaagaatcggatccctggcctcgggtaacgtgcgcagccttcctagtcagcagatggtcaaccgcctctccattcccaaacctaaccttaactccactggtgtgaacatgatgtcgagcgtccatcttcagcagaataactacggggtgaagtcggtcggacagggttactcagttgggcagtcgatgcggttgggactcggcggaaatgcccctgtctcgattccccaacaatctcagagcgtgaagcagctgctgcctagcgggaacggaaggtcctacggtcttggaagcgagcaacgatcgcaagccccagctcggtactccctccagagcgcaaatgcaagctccctttcctccggacagcttaagagcccaagcctctctcagtcacaggcatcaagggtcctcggtcaatcctccagcaagcctgccgctgcagcgaccggacctccacctgggaacactagctcaacgcaaaagtggaagatttgtacgatttgcaacgaattgtttccggaaaacgtctattcggtgcactttgaaaaagaacacaaggccgaaaaagtgccagcggtcgcaaattacattatgaaaatccacaacttcacctccaagtgtttgtattgcaatagataccttcctactgacactcttcttaatcatatgctgatccatggactgtcctgtccttactgtcggtcaacctttaacgacgtggaaaagatggcagctcacatgaggatggtgcatatagacgaagaaatgggtcctaagacggattcgactctgagcttcgatctgactttgcaacaaggttcgcacactaacattcatctcctggtgactacgtacaacctgcgcgatgcacccgcagaatcggtggcctaccatgcccagaacaaccccccagttcccccaaagccccaaccaaaggtgcaagagaaggcggacattccagtcaagtcaagcccacaagcggcggtcccttataagaaggacgtgggaaagaccctttgcccactttgcttttcgattcttaaaggccccatatcagatgcacttgcccaccaccttagagaacggcaccaagtcatacaaactgtccaccccgtggaaaagaaactcacttacaaatgcattcattgccttggagtgtacacttcaaatatgactgcgtcaaccattacccttcatctggtgcattgccgtggggtgggtaaaacccaaaacggccaggacaagacgaatgctccgtcccgcctgaatcaatcgccaagcctcgcacctgtgaagagaacctacgagcagatggagttcccgctccttaagaaacgcaagttggatgacgattcggattccccgtcgtttttcgaggaaaagccagaagagcccgtggtcctggcgcttgaccctaagggacatgaggatgactcgtacgaggcaaggaagtcctttcttactaagtacttcaataaacaaccctacccaactcggcgggagatcgagaagctggcagcatccctgtggctgtggaagtcggatatcgcatcacacttctcaaacaagcgcaagaagtgcgtgcgggactgtgagaaatacaagcccggggtgctgcttggattcaacatgaaggagctgaataaggtcaagcacgagatggatttcgacgcagaatggctcttcgaaaatcatgacgagaaggattcgcgcgtgaatgcatcaaagaccgccgataagaaactcaaccttgggaaagaagatgactcctcatctgattcctttgagaatctggaagaggaatcgaacgaatcgggatctccatttgatccagtgtttgaagtggaaccaaagatatcaaacgataacccagaagaacacgtgctcaaggtcataccagaagatgcttccgaatcggaggagaagttggatcaaaaagaagatggatccaagtacgaaaccattcacttgaccgaggaacctactaaacttatgcataacgcatcagattctgaagtcgatcaagatgatgttgtcgagtggaaagatggcgcgtccccctcggagtccggcccaggaagccaacaagtgtccgactttgaggacaacacctgtgagatgaagcctggcacctggtcggacgaaagcagtcagtccgaagatgcacggagctcaaagccagcagcgaagaagaaggccactatgcagggggatcgcgaacaacttaagtggaagaactcgtcatacggaaaagtggaaggcttttggtcgaaggatcaatcacagtggaaaaatgcctcggaaaacgatgaacggcttagcaaccctcagattgagtggcaaaactctaccatcgactcagaggatggggaacaattcgataacatgaccgatggagtcgccgaacctatgcacggttcactggcgggtgtgaaactctcgtcacaacaggcc

SEQ ID NO: 5706 - DNA, 3306 bp, synthetic construct
  misc_feature 1..3306: note = source = /note="Description of Artificial Sequence: Synthetic coding sequence"
  source 1..3306: mol_type = other DNA
atgttccagttgccagtgaataacctgggatccctgagaaaagctcgcaagactgtgaagaaaatcctctccgatatcggcctggaatactgcaaagaacacatcgaggacttcaagcagttcgaaccgaacgacttttatctcaaaaacaccacctgggaggatgtgggtctttgggatccatcgcttactaagaatcaagattaccgcaccaagcccttttgctgctccgcctgtccattttcttcgaagttcttctcggcatacaagtcacactttcggaatgtccactcagaagatttcgaaaatagaatcctcctcaactgcccctactgtactttcaatgcagataagaaaaccctcgaaacccacatcaagatcttccacgcaccaaatgcttcggccccatcgtcgtccctgtccaccttcaaggataagaacaaaaatgacgggctcaagcctaaacaagcagatagcgtggaacaagcggtgtactactgtaagaaatgtacctaccgtgatccgctgtacgagatcgtccgcaaacatatctacagggaacatttccaacacgtggcggccccgtacattgcgaaggcaggcgagaagtcgctcaacggcgccgtgccactgggatccaacgcacgcgaggaatcgtcgatccattgtaaaaggtgtctgttcatgccaaagtcatatgaagcgctggtgcaacacgtgatcgaggaccatgaaaggatcgggtaccaagtgaccgccatgatcggacacaccaacgtcgtggtcccacggtccaagccgctcatgctcattgctccaaagccacaggataagaagtccatgggactgccgccgagaatcggatcattggcctccggcaacgtgcgctcccttccaagccagcaaatggtcaaccgactctctatcccaaaacctaacctgaattccaccggggtgaatatgatgtcctcggtgcacctccaacaaaacaactacggagtgaagtccgtggggcagggatacagcgtgggacaatcaatgcgactcggtctgggtgggaacgcccctgtgtcaatccctcagcagtcccaatccgtgaagcagctgctgccaagcggcaacggtcggtcgtacggcctgggaagcgaacagcgctcccaggcgccagcacggtactccctgcaatccgccaacgcatcatcgctgagctctggccaactcaaatcaccgtcactgtcacagtctcaggcctcgcgcgtgctgggacagtccagctcgaagccggcagccgctgcgactggcccgccaccggggaacacgtcctcgactcagaagtggaagatctgcacgatctgtaacgagctgtttcctgagaacgtgtactcggtgcatttcgagaaggaacacaaggccgagaaggtccccgccgtggctaattacatcatgaagatccacaacttcacctcgaagtgcctctactgcaataggtacctgcctaccgataccctgctgaatcacatgctcatccacgggctgagctgcccttactgccggtcgactttcaatgatgtggaaaagatggcggctcacatgcggatggtccacatcgatgaggaaatgggaccgaaaaccgactccactctgagcttcgacttgaccctccagcagggatcgcataccaacatccatctgcttgtgaccacttacaacctccgcgatgccccggcagagtccgtggcctaccacgcccagaacaatccgccggtgccgccgaaaccccaaccgaaggtccaggagaaggcggatatcccagtcaagtcgtcgccacaggcagctgtgccatacaagaaggatgtcggaaagacgctgtgccctctttgcttctccatcctgaagggaccaatctcagacgccctggcccatcacctccgcgagcgccaccaggtgatccaaaccgtgcatccagtcgagaaaaagctcacctacaagtgcatccactgccttggagtgtacacgtccaacatgaccgcctcgaccatcactctccacctggtgcactgcagaggcgtgggaaaaacccagaatggccaggacaagactaatgcaccttcgcggctgaatcaatcacctagcctggcccctgtgaagcgcacttacgagcagatggagtttccactgttgaaaaagagaaaactggatgacgactccgattcgccttcctttttcgaagagaaacccgaagaaccggttgtgttggcactggatcctaagggacacgaggacgactcctacgaggcccgaaagtcttttctgacgaagtacttcaacaaacagccctacccgactaggcgggaaatcgaaaagctggccgcgtccctgtggctgtggaagtcggacatcgcctcgcatttttcgaacaagagaaagaaatgcgtgagggattgtgaaaagtacaagcctggagtgctcctgggcttcaacatgaaagagttgaacaaggtgaaacacgagatggatttcgacgccgagtggctgtttgagaatcatgacgaaaaagactcacgcgtgaacgcaagcaaaaccgcggataagaagctcaacctcggaaaagaagatgactcctcttcggattcattcgaaaacttggaagaagagtccaatgaatcgggctccccgtttgatccggtgttcgaggtggagccgaagatcagcaatgacaaccctgaggagcatgtgcttaaggtgattccggaagatgcaagcgagtcagaggaaaaactcgaccagaaagaagatgggtccaagtacgaaactatccacctgactgaagaaccgaccaaacttatgcacaatgcatcggactcagaagtcgatcaggatgacgtggtcgaatggaaggacggagcatcgccctcggagtcaggaccgggaagccagcaggtgtccgacttcgaagataacacttgcgaaatgaaaccaggcacttggagcgatgaatcgtcccaatccgaggacgcgcggtcatcgaagcctgcagctaagaaaaaggcaaccatgcagggagatagagaacagcttaaatggaagaactcgagctacggtaaagtggagggattctggtcaaaggaccaaagccaatggaagaatgccagcgagaacgacgagcggctgagcaacccccagatcgaatggcagaactccaccatcgactcggaagatggtgaacagttcgataacatgaccgacggcgtcgcggagccaatgcatgggtccctcgcaggagtcaagctgtcgtcccagcaggcc

SEQ ID NO: 5707 - DNA, 3306 bp, synthetic construct
  misc_feature 1..3306: note = source = /note="Description of Artificial Sequence: Synthetic coding sequence"
  source 1..3306: mol_type = other DNA
atgttccaactgccggtgaacaacttgggttcactgaggaaggcacggaaaaccgtcaaaaagatcctttccgacattggactggaatattgtaaggaacatatcgaggactttaagcagtttgaaccaaatgacttttaccttaagaatactacttgggaggacgtggggctctgggacccgtccttgactaagaaccaggattacagaaccaaacctttctgctgttcggcttgtccgttctcatctaagtttttcagcgcctacaagtcccatttcagaaacgtgcactcagaagatttcgaaaacagaattttgttgaactgtccgtactgcaccttcaatgcagacaagaaaactctcgagactcacattaagatctttcatgccccaaacgcgtcagccccttcaagctcgctgtccactttcaaggataagaacaagaatgatggactgaagccgaagcaagcggactcggtcgaacaggcggtgtactattgcaagaagtgcacttatagggatccgctgtacgagatcgtcagaaaacatatctaccgcgaacacttccagcatgtggcagccccgtacatagccaaggccggagaaaagagcctgaatggggctgtgcccctgggctcgaatgcccgcgaggagtcctcgattcactgcaaacggtgtctcttcatgccgaagagctacgaggctttggttcagcacgttatcgaagatcacgaacggatcggctaccaggtgaccgccatgataggacacactaacgtcgtggtgccgcgttcgaagccgctcatgctgatcgcccctaagccacaggacaagaagagcatgggcctccctccccgcatcggcagcctggcgtcgggcaacgtgcggtcactgcctagccagcaaatggtcaaccgcttgtccattccaaagccaaatttgaactcaacgggcgtcaacatgatgtcaagcgtgcacttgcaacagaacaactacggcgtgaagtcggtcggtcagggatactccgtggggcaatccatgagactgggacttggtggcaacgctccggtgtcgatccctcagcaatcccagtccgtgaagcagctgctgccatcagggaatggcagatcctacggcctgggatcggaacagcggtcccaagcccccgcccgctacagcctccaatctgcaaatgcctcgagcctgagctccggccagcttaagagcccaagcctgtcccagtcgcaagcatcccgggtgctcggacagtcctcatccaagccagcggccgcggctaccgggccgcccccgggaaatacgtcgtcgacccaaaaatggaaaatctgcacgatctgcaacgaactgttcccagagaacgtgtactcagtccatttcgaaaaagagcataaggccgaaaaggtgccggccgttgcgaactacatcatgaagatccacaacttcaccagcaagtgcctgtactgcaaccgatacctgcctactgacactctgctcaaccacatgctgattcatggactgtcatgcccctactgccggtcgaccttcaacgacgtggaaaagatggcagcccacatgcggatggtccacatcgacgaagagatgggcccgaaaaccgattcgaccctgtcattcgacctcaccctgcaacaaggctcacacactaacatccacctgctcgtcaccacttacaatctgagagatgctcctgccgaatcggtggcataccacgcccaaaacaacccacctgtgccgccgaagccgcagccgaaggtgcaagaaaaggctgacatccccgtgaaaagctcgccacaagctgccgtgccttataagaaagacgtcggaaagacgctttgtcctctgtgcttcagcatcctcaagggtccaatctcggatgcgctggcccatcatctgagagaaagacaccaggtgattcagaccgtgcacccagtcgaaaagaagctcacctacaaatgcatccactgccttggtgtgtacacgtcgaatatgaccgcctcaaccatcaccttgcacctcgtgcactgtcggggagtcggcaagacccagaacgggcaggataagaccaatgccccgtcgaggctgaaccagtcaccaagcctcgccccggtgaagcgcacctacgagcagatggaatttcccctcctcaaaaagcgcaaactggatgatgatagcgattcaccatcattcttcgaagagaagccagaggaaccagtggtgctggcccttgatccgaaaggacatgaagatgactcctacgaggcgcggaagagctttctgaccaagtacttcaacaagcagccatacccgactcggcgggaaatcgaaaaactggccgcctccctgtggctgtggaagagcgacatcgcgagccatttctccaacaagcgcaagaagtgtgtgagagattgcgagaagtacaagccaggagtcctcctgggcttcaatatgaaggagctgaataaggtgaaacacgaaatggacttcgatgcagagtggctgttcgaaaatcacgatgaaaaggacagccgggtgaacgcgtccaagacggctgacaagaaactgaacctgggcaaagaggacgatagctcctccgactcatttgagaatctggaggaagaatcgaacgaatcaggatccccgtttgaccctgtgttcgaagtggaaccaaagatcagcaacgacaacccagaggaacatgtgctgaaggtgattccggaagatgctagcgagagcgaagaaaagctggaccaaaaggaggatggctcgaaatacgaaaccattcacctcaccgaggaaccgaccaagctcatgcacaacgcgagcgacagcgaagtggaccaggacgatgtcgtggaatggaaggacggggcgtcaccatcggagtcagggccgggatcccaacaagtgtcagatttcgaggacaacacttgtgagatgaagccgggaacttggtcagacgagtcatctcaatcggaggacgcccgcagctccaagccggccgccaagaaaaaagccactatgcagggagatcgcgaacagctcaagtggaagaattcctcgtacggaaaagtcgagggcttctggagcaaggatcagtcgcagtggaagaatgcctcggagaatgatgagcgccttagcaacccgcaaatcgagtggcaaaactccaccatcgattccgaagatggagagcagtttgacaacatgaccgacggagtcgctgaaccaatgcatggctcgttggccggagtgaagctgagctcgcagcaggcg

SEQ ID NO: 5708 - DNA, 3306 bp, synthetic construct
  misc_feature 1..3306: note = source = /note="Description of Artificial Sequence: Synthetic coding sequence"
  source 1..3306: mol_type = other DNA
atgttccagctcccggttaacaaccttggaagcctgaggaaagccaggaagacggtaaaaaagattctctccgatattggcctggagtattgcaaagaacacatcgaggattttaaacagtttgagcctaatgacttttatctcaaaaacactacatgggaggacgttggactttgggatcccagtcttacgaaaaatcaagattaccgaaccaagcccttctgttgctccgcctgcccatttagctccaaattcttctccgcctataagtctcatttcagaaatgtgcactccgaggacttcgagaaccgtatactgctgaattgcccatattgcactttcaacgccgataagaagacgcttgagactcatatcaagatctttcacgcccctaatgcgtcggcaccgtcctcttctctgagcacttttaaggacaaaaacaaaaatgatggtctgaagcccaaacaggctgacagtgttgaacaggctgtctactattgcaaaaagtgtacataccgggacccactgtatgagattgtgaggaaacatatctatagagagcactttcaacatgtcgcagctccgtatatcgctaaggccggagaaaaaagtctgaatggagccgtacccctagggtccaacgccagggaggagagtagtattcactgtaagcggtgcctctttatgcctaagagttacgaggcactcgtccaacatgtgatcgaggaccatgaaaggattgggtatcaggtgaccgccatgataggacacaccaatgtcgttgttccccgcagcaagccacttatgctgatcgccccgaaacctcaggataaaaaatcaatggggctccctccccggatcggctccttggccagcggtaatgtccggagcctgccatcccagcagatggtgaatcgcctctctatccccaaaccgaacttaaattccaccggggtcaacatgatgtcttctgtccacttgcaacagaataactatggcgtgaagtccgttggccagggttactcggttggacaatcaatgcgactggggttaggtgggaacgcccctgtcagtatcccccagcagagtcagtccgtgaagcaattgctaccctccggaaacgggaggtcctacgggctgggcagcgagcagagatctcaagcgcctgcgcgttattccctgcagagtgcaaacgctagctccctgagcagcgggcagctgaaaagcccttcattgtcgcagtcacaagccagcagggtgcttggccagagctcttctaagccagctgctgctgccacgggacccccgcccgggaacactagttcaactcagaaatggaaaatttgcactatatgtaacgagttgttccctgaaaatgtgtacagtgtacacttcgaaaaggagcataaagccgaaaaagtgcctgcggtagccaattatatcatgaagatacataacttcacctctaaatgcttatactgtaaccggtacctcccgacggacaccctgctcaatcacatgttgatacacggtcttagctgcccatactgccgatctactttcaacgacgtggaaaaaatggctgctcacatgcgcatggtgcacatcgatgaggaaatggggcccaagaccgattcaactctgagctttgatctgactctgcagcaggggtcccatacgaacatccatctgctcgttaccacctacaatctgcgcgatgcacccgcagaaagcgtggcgtaccatgcccaaaacaatcctccagtgcctcctaagccacagcccaaagtgcaggagaaggcagacatcccagtgaaaagctcccctcaggcagccgtaccctataaaaaggatgtgggaaagacattgtgtcccttgtgcttctccatcctgaagggacccatttctgatgctcttgcccatcacctgagggaacgacaccaagtcatccagactgtgcaccccgttgaaaagaaactcacttacaagtgtatacactgtctcggcgtgtacactagtaacatgacagccagtacaattaccctccatctggtgcactgtagaggagtcgggaagacacagaacggtcaagacaaaacaaatgcacctagtagacttaaccagtcgcccagcttggcgcccgtgaaacggacatacgagcaaatggagttccctttactcaagaagcggaagctcgatgatgattctgattccccaagtttcttcgaagagaagccagaggagccggttgtcctcgcattggacccaaaaggacacgaagatgactcttacgaagctagaaaaagcttcttgacgaagtatttcaataagcagccctaccccacacgccgcgaaatcgagaagctcgccgctagtttgtggctgtggaagtctgacattgcttcccatttttcaaacaagcggaagaagtgcgttagagactgtgagaagtacaagccaggggtgctattagggtttaatatgaaagaactaaacaaagtaaaacatgagatggattttgacgccgaatggctgtttgagaaccacgacgagaaagattccagagtgaacgcctccaagacggctgacaaaaaattaaaccttgggaaggaggatgattcttcctcagacagttttgagaatcttgaggaggagtccaatgagtccggcagcccttttgatccagtctttgaagtcgagccaaagatttccaacgacaatcctgaggagcatgtgttgaaggtcatcccagaagatgcatctgagtcggaggaaaagctggaccaaaaagaggatggcagcaagtacgaaacaatacatctgacagaagagcctacaaagctaatgcataatgccagcgactcagaagtggatcaggacgacgttgttgagtggaaagacggcgcttctccatcggagagcgggcctggatctcagcaggtgtcggactttgaagataacacctgcgaaatgaagccaggcacctggtccgacgagtcaagccagagtgaagatgctaggagctcgaagcctgcagccaagaaaaaagccactatgcagggagatagggagcagttgaagtggaaaaactcttcctacggcaaagtggagggcttctggtctaaggatcagtctcagtggaagaatgcatcagagaacgacgaacggctctctaacccacagattgaatggcagaacagcactatagattcggaggatggagagcagttcgataacatgaccgacggtgtagctgaacccatgcacggttcgctcgcaggcgtgaagctgtctagtcagcaggcc

SEQ ID NO: 5709 - DNA, 3306 bp, synthetic construct
  misc_feature 1..3306: note = source = /note="Description of Artificial Sequence: Synthetic coding sequence"
  source 1..3306: mol_type = other DNA
atgtttcaactccccgtcaacaacctaggatcccttaggaaggcccggaaaacagtgaagaaaatcctgagtgacatcgggctcgaatactgcaaagaacacatcgaagatttcaagcagttcgaaccgaacgacttctacttgaagaacaccacatgggaggacgtcgggttgtgggaccccagcctcacaaaaaatcaagattatagaaccaaaccattctgctgctcagcttgccctttctctagcaaattcttttccgcatacaagagccacttccggaatgtgcatagcgaggacttcgagaaccgcatcttgttgaattgtccatactgtaccttcaacgctgacaaaaagacactagaaacccatattaagatatttcacgctcctaacgcttccgctccctcatcgtctctgtcaacattcaaggacaagaataagaatgacggactgaaacctaagcaagcggacagtgtggagcaagccgtgtattattgcaagaagtgtacctaccgcgaccctctctatgagattgtgcgaaagcacatctacagggaacacttccagcacgttgccgccccctatattgcgaaagccggagagaagtcacttaatggagccgttccactgggcagcaacgcaagagaggagtcctctattcattgtaagcggtgtctgttcatgcccaagtcatacgaagctctggtgcagcatgtgatagaggaccatgagaggatcgggtatcaagtgacggccatgatcggccacactaatgtcgtggttccacgatctaaaccgctgatgctgatcgcccctaagcctcaggataagaagagtatgggcctcccaccacgaattggttccctcgcgagcgggaacgtgcgctccttaccatctcaacagatggtcaaccgcctgtccatccctaagccgaacctaaactccaccggggtcaacatgatgagcagcgtacatcttcaacaaaataattatggtgtgaaatccgtggggcaaggatacagcgtcgggcaaagcatgagactggggctcggaggtaacgctccagtatcaatcccccaacagtcacagagtgtaaaacaactattgccctccggaaatggaaggagctatgggcttgggagtgagcagagaagccaagcccccgctaggtacagtttgcagtccgcaaatgcctccagcttatcaagtggtcagcttaaatctccttctctctcacagtcccaggcatcccgcgtgttggggcagtcatcctcaaaacccgctgccgctgctaccgggcccccacccggaaacacaagtagcactcagaaatggaaaatctgtaccatttgtaacgagctcttccctgaaaatgtgtattccgttcatttcgaaaaggagcataaggccgagaaagtgcccgcggtggcaaactacataatgaagatacataatttcaccagcaaatgcctgtattgtaatagatatttaccaaccgacaccttgctgaaccatatgcttatacacggcttgtcttgcccctattgtcggtcaaccttcaatgatgtggagaagatggccgcccatatgcgcatggtgcacatagacgaggaaatggggcccaaaaccgattccaccctgtcctttgacctgacactacagcagggctcacacaccaacatccatttgctggtgacaacatataatttacgggacgcccctgccgagtcagtcgcatatcatgcacagaacaaccccccagttccaccgaagccccagcctaaggtgcaagaaaaggccgatatccctgtgaaatcttctccccaggctgctgttccttataagaaggatgtgggaaaaacattgtgccctctctgttttagtatactcaaaggccccatctctgatgctctagctcaccacttacgggagcggcaccaggttatccagacagtgcaccccgtggagaagaaactgacctacaagtgcattcactgcttgggagtgtataccagtaatatgacagcctctacaattacactgcacctggtccactgccgcggcgtcggtaaaacgcagaacggacaggataaaacaaacgcccccagcagactgaaccagagccccagtctggcaccggtaaagaggacctacgagcagatggaattcccgctgctgaaaaagagaaagttggacgacgatagcgatagtccatcattctttgaggagaaaccagaagagcctgttgtgcttgctctcgaccctaaaggccatgaagatgattcatacgaggcgcgtaagtcctttctgaccaaatactttaataaacagccctacccgacacggcgggagatagaaaagttagcggcgtccctgtggctgtggaagtctgatatcgcctctcacttctctaataaacgtaagaaatgtgtgcgtgactgcgaaaaatacaaacctggagtgctcctgggatttaacatgaaagagctcaacaaggtgaaacacgaaatggacttcgacgcggagtggctcttcgagaaccacgacgagaaggactcccgagtgaatgccagtaaaactgcagacaagaaactcaatctcggtaaagaagacgacagttcatctgactctttcgagaatttagaggaggaatccaacgagagcggaagccctttcgaccctgtgtttgaagttgagcccaaaattagcaacgacaatccagaggagcacgttcttaaggtgatacctgaagacgcctccgagagtgaggagaaacttgaccagaaagaagacggttctaagtatgagaccattcatctgaccgaggagccgacgaagctcatgcataatgcctccgattcagaggtggaccaggacgatgtggtcgaatggaaagacggagcctctcccagtgaatccggccccggctctcagcaggtctcagacttcgaggataacacctgtgaaatgaaacccggtacttggagcgatgagtcctcccagagtgaagacgctagaagtagtaaacccgcggccaagaagaaggcaacgatgcagggcgacagggagcagcttaaatggaagaacagctcgtatggaaaagtggaagggttttggtccaaggatcagagccagtggaaaaacgcctctgagaatgacgaacgcttatccaatccccagatcgagtggcagaactcaactatcgatagcgaggacggagagcagtttgataatatgactgacggggtagcggaacctatgcatggctctttagccggggttaagctttccagtcagcaggct

SEQ ID NO: 5710 - DNA, 3306 bp, synthetic construct
  misc_feature 1..3306: note = source = /note="Description of Artificial Sequence: Synthetic coding sequence"
  source 1..3306: mol_type = other DNA
atgtttcaacttcctgtcaacaatctggggtccctgaggaaagcacggaagacagtcaagaagattctgtctgatattggtctggaatattgcaaagaacatatcgaggatttcaagcagtttgagcccaatgacttctatctgaagaacacgacctgggaggacgtggggctttgggatcctagcctgaccaagaatcaggactacaggactaaacccttctgctgcagtgcctgtcccttcagctctaagtttttcagcgcctacaagagccacttccggaacgtgcattctgaagatttcgagaaccgaattctcctcaactgcccatactgtacatttaatgccgacaagaagaccttggaaacgcacattaagattttccatgcgcccaacgccagcgctcctagttcgtccctttcaacctttaaggataagaataagaatgatgggctgaagcctaaacaggcagacagcgtggagcaagccgtatactattgcaagaagtgcacatacagagatccgctctacgaaattgttcggaagcatatctacagagaacactttcagcatgtagcggccccctatatcgctaaagctggggagaaatcactgaatggagcggtccccctgggaagtaatgcgcgcgaagaaagtagtatccattgtaagaggtgcctgttcatgccgaaatcttacgaagcattggttcagcacgtgatcgaagaccacgaaagaatcgggtatcaggtgaccgccatgattgggcacactaacgtcgtggttcctcggtccaaaccactgatgctcatcgcgccaaaaccacaggataagaagagcatggggctcccaccccggattgggagcttggctagcgggaatgtgcgaagcctaccctcacagcagatggtgaatcgtctatcgatccccaagccaaatctcaatagcacaggggtcaatatgatgagcagtgtgcatctccagcagaataactacggagtgaaatctgtcggtcaaggatactccgtggggcaatcaatgcgattgggcctgggcgggaatgcaccagtgtcaatcccccagcagtcacagtcagtgaaacagctgcttccatcaggcaacggacggagttatggattaggctctgaacaacggtctcaggcccccgcaaggtactccttacagagcgcaaacgccagttccctgagctccggccagctgaagagtcccagtctgtcccaatcgcaggccagtagggtgctgggccagtccagctcaaaacctgccgctgccgccaccgggccccctcccggtaacactagctcgactcagaagtggaagatctgtactatttgtaatgagctctttcctgagaatgtctactccgtacatttcgagaaagaacacaaggccgagaaggtgcctgcagtggctaattacattatgaagatccataatttcacttccaagtgcctgtactgcaataggtatcttcccactgacacactattgaaccacatgcttatccacggcctgagttgtccctactgtcgctctacctttaatgatgtagagaaaatggctgcgcatatgagaatggtacacatagacgaagaaatgggacctaagacagactctactttatccttcgacctgacattgcaacagggctctcataccaacatacacctccttgtcacaacatataatttgcgtgatgctcctgctgaaagcgtagcttatcatgcccagaataatcctccagtgcctcccaagccgcagcccaaggtgcaggagaaggcagatattcctgtaaaatctagtccacaagctgctgtcccctataagaaggatgttggtaagaccctatgccccctgtgcttttcaatcctgaagggccctatttccgacgcgttggcacatcacctgcgggaacgacatcaggtgatccagaccgtccacccggtggagaaaaagctgacatataagtgtattcattgcctcggtgtctacacatccaacatgacagcatccacgattaccctacatctggtccattgcaggggcgtcggtaaaactcaaaacggacaagacaagaccaatgcgccttcgagacttaatcagtcaccatccctggctccagtaaagaggacatatgaacagatggagtttccccttctgaagaagagaaagttggatgacgactccgactctccatcgttcttcgaggagaaacctgaggaacctgttgttctcgccctggacccaaagggacacgaggatgacagctacgaggccagaaaatctttcttaacgaagtatttcaacaagcagccttatcccactcggcgtgagattgagaagctggcggcctccctgtggctatggaagtccgatattgcctctcacttttccaataaaaggaaaaaatgtgtgagagattgcgagaaatataagcccggagtgctcctgggattcaacatgaaagagctgaataaggtgaaacacgaaatggattttgatgctgagtggctgttcgaaaaccacgacgaaaaagattcgagggtcaatgcttcaaagaccgccgacaaaaagctcaacctgggaaaagaggacgacagttcctctgattcttttgagaatctggaagaggaaagtaacgagagcggctccccatttgatcctgtgttcgaggtggaacccaagatttctaatgataacccggaagaacatgtccttaaagtgatcccagaggacgcttccgagagcgaagagaaattggaccagaaggaggacgggagcaaatacgaaactatccatctaactgaagagcccaccaagctgatgcataacgcatccgattctgaggttgaccaggatgacgttgtggagtggaaggatggagcctccccttctgagtcgggtccagggagtcagcaggttagtgactttgaggacaatacctgtgagatgaagcccggaacatggtctgatgagtctagtcaaagtgaggacgcccggtcctctaaacctgcagccaagaaaaaggccacaatgcaaggcgaccgggagcagctcaagtggaagaactcctcgtacggcaaggtggagggcttttggtccaaggaccagagtcagtggaaaaacgctagcgaaaacgatgagcggctctcaaacccccagatcgaatggcaaaattcgacaatcgactccgaggacggcgagcagttcgacaatatgaccgacggggtggccgaacctatgcacgggtctctagccggcgttaagctgagctctcaacaggcc

SEQ ID NO: 5711 - DNA, 3306 bp, synthetic construct
  misc_feature 1..3306: note = source = /note="Description of Artificial Sequence: Synthetic coding sequence"
  source 1..3306: mol_type = other DNA
atgttccagctccctgtcaataatcttggctcgctgagaaaagctcgcaagactgtgaaaaagatcctctcagatattgggctcgagtattgcaaggagcatatcgaggatttcaaacagttcgagccaaacgacttctacctgaagaatactacttgggaggacgttggactgtgggacccgagtctgactaagaatcaagattaccgcactaagcctttctgctgcagcgcctgcccattttcgtcgaagttcttctcagcatacaagtcccatttccggaacgtgcactcagaggactttgaaaatagaatcctgttgaactgcccctactgtactttcaacgcagacaagaaaaccctcgaaacccacattaagatattccacgccccaaatgcctcggctccctcctcatcactgtcaacgttcaaagataagaacaagaatgacgggctgaagccgaagcaagctgattcggtggaacaggcagtgtactactgcaaaaaatgtacgtaccgcgacccgctgtatgaaatcgtccgcaagcacatctaccgggagcatttccaacacgtcgctgctccatacatcgccaaagccggagaaaagtccctcaatggagccgtgccgctgggatccaacgcccgcgaggaaagctccatccactgcaagagatgcctcttcatgccaaagagctacgaggcgctggtccagcacgtcatcgaggaccatgagcgaatcgggtaccaggttactgcaatgatcggtcatactaacgtggtcgtgcccagatcgaagcccctcatgctgatcgcgccgaaaccgcaggataagaaatcgatgggccttcctccgcggatcggttcgcttgcgtcgggaaacgtgcggagcctgccgagccaacagatggtcaaccgcctgtcgatcccgaagcctaacctgaactccacgggcgtgaatatgatgagctccgtccacctccagcagaacaactacggggtcaagtccgtgggacagggctacagtgtgggacagagcatgcgcctgggactcggaggaaacgcgccggtgtcgattccacagcagtcgcagtcagtgaagcagctgttgccgtcgggcaatggacgctcgtacggactggggtccgaacagcgctcccaggcccctgcacggtacagcctgcaatctgccaacgcctcctccctctcctcgggacaactcaagtcgccgtcactgagccagagccaagcgtcaagggtgctgggacagtcctcgtcgaagcctgcagccgccgccaccggcccaccgccaggcaacacgagctcaactcaaaagtggaaaatttgcactatctgtaatgaattgttcccagaaaacgtctactcagtgcacttcgaaaaggaacataaggcggaaaaggtgccggctgtcgcgaactatatcatgaagatccacaactttacgtcaaaatgcctgtattgcaatcgctacctgccgactgacaccctcctgaaccatatgctgatccacggcctgtcctgtccatactgtcggtccaccttcaacgatgtggaaaagatggcggctcacatgcggatggttcatatcgatgaggaaatgggccccaagaccgactctaccctgtcctttgacctcaccttgcagcagggaagccacactaacatccacctcctggtgaccacctacaacctgcgggatgccccggcagaatccgtcgcctaccacgcgcagaataatccgcccgtgccacctaaaccgcaacccaaggtgcaggaaaaggccgacatcccagtgaagtcgtcgccgcaggccgcagtgccgtacaagaaagatgtgggtaagaccctgtgcccactttgcttctccatcctcaagggaccgatcagcgatgctctggcccatcatctgagggagagacaccaggtgattcagactgtgcacccagtcgaaaagaagctgacctacaagtgcattcattgcctcggagtgtacaccagcaatatgactgcgtcgactatcacgctgcacctcgtccactgtcggggagtgggaaagacccaaaacgggcaggacaaaactaatgcgccttcacgactcaaccagagccctagcctggcacctgtgaaacggacctacgagcagatggaattcccactgctgaaaaaacggaagctcgacgacgactcagattcaccgtcatttttcgaggaaaagccggaagaaccggtcgtgctggcattggaccctaagggtcacgaagatgactcttacgaggccagaaagtcgttcctgaccaaatactttaacaaacagccatacccgaccaggcgcgaaatcgagaagttggcagcgtcgctttggttgtggaagagcgacatcgcctcccatttctcgaataaaagaaagaaatgcgtgagggattgtgaaaagtacaaacccggggtgctccttggattcaacatgaaggaacttaacaaggtgaagcacgagatggactttgacgccgaatggctctttgagaatcatgacgaaaaggattctcgtgtgaacgcgagcaaaaccgccgataagaagttgaacctcggaaaagaagatgatagctccagcgactcgttcgagaacttggaagaagagtccaatgagtccggatcacccttcgatccggtgtttgaagtcgaacccaagatctcgaatgacaaccctgaagagcacgtacttaaggtgattccggaggatgcatctgagagcgaggaaaaactggaccaaaaggaggacgggtccaagtacgaaactatccatctcaccgaggaaccaaccaaacttatgcacaacgcctcagattcggaggtcgaccaggacgatgtggtggagtggaaagacggagcgagcccttccgaaagcggccctggaagccaacaagttagcgacttcgaagataacacttgcgagatgaaaccgggaacttggtccgacgagtcatcgcaatctgaggacgcgagatcctcgaagccggctgccaagaagaaggccaccatgcaaggcgaccgcgagcagctgaagtggaagaactcgtcctacggtaaagtcgaaggtttttggagtaaagaccagtcccaatggaagaacgcgtcagaaaacgatgaaaggctgagcaatccgcagatcgaatggcaaaattccaccatcgatagcgaggacggcgagcaattcgacaacatgaccgacggagtcgctgaaccaatgcatggctccctcgcaggtgtgaagctgtcgtcacaacaagct

SEQ ID NO: 5712 - DNA, 3306 bp, synthetic construct
  misc_feature 1..3306: note = source = /note="Description of Artificial Sequence: Synthetic coding sequence"
  source 1..3306: mol_type = other DNA
atgttccagttgcccgtgaacaacctgggaagtctgaggaaagccaggaagacggtgaagaagatcctgagtgacatcggcctagagtattgcaaagagcatattgaggattttaagcagttcgagccaaacgacttctatctgaagaacacaacctgggaagacgttgggctgtgggatccgtcattgaccaagaatcaggactatcgtacgaagcctttctgctgctccgcttgcccctttagtagtaagttcttctcagcctacaaaagccacttccgcaacgtgcatagcgaagattttgaaaatcgcatcttgctgaactgcccctactgcaccttcaatgccgacaaaaaaacactcgagacccacataaaaatatttcacgctccaaatgcaagcgccccctcatcctcactgtccacctttaaagataaaaacaaaaacgatggcttaaagcctaaacaggccgattctgtggagcaggctgtgtactattgtaagaagtgtacttatcgggatccactgtatgagatcgtgcggaaacatatttaccgggagcattttcagcatgtggccgccccctatatagcaaaggctggagagaagagcctcaatggggctgtcccactggggtcgaatgcacgcgaggagagcagtatccactgcaagcgttgtctattcatgcctaagtcttacgaggctctggtgcagcacgtaatcgaggatcacgagcgcatcgggtaccaggtcactgccatgattggccatactaacgtggtcgttcccaggagcaaaccactaatgcttattgcccccaagccccaagataaaaagtcaatggggttgccgcctcgcatcggctctctcgcctctgggaacgtgcggtctttgccaagccagcagatggttaacagactgtccatacctaaacctaatttgaactccaccggagtcaacatgatgagctctgttcacctgcagcaaaacaattatggggtcaagtcagtgggtcagggctactctgtggggcagagcatgcggctcggcctgggagggaacgcccccgtttctatacctcagcaaagccagtcagtgaagcagctgctgcccagcggaaatggtcgcagctatggcctcgggagcgagcagcgttcccaagctcctgccagatacagcctccaaagcgcgaatgcgtcttcactgagcagtggtcaactaaagagcccatctctgtcccagtcgcaggcgagccgcgtgttagggcagtccagctccaagcccgccgccgcagctacagggccacccccagggaataccagcagcactcagaaatggaaaatctgcaccatatgtaatgagctcttcccagagaacgtgtattccgtgcactttgagaaggagcacaaggctgagaaggtgccagccgtggcgaactatataatgaagatacacaattttacgagcaagtgtctgtattgtaacagatacctccctacagacacactcctgaatcatatgctcatccacggccttagttgtccttactgccgttccactttcaatgatgtcgagaaaatggcagctcacatgcggatggtgcatattgatgaggaaatgggacccaagaccgacagcacattaagctttgacttgaccttacagcagggctcacataccaatatccacctgcttgtgacaacctacaacctgcgggacgctccggccgagagcgtcgcttatcatgcacagaacaatccccccgtacctcctaagcctcagcccaaagtacaggagaaggcagatattcctgtgaagagcagcccacaggctgcagtgccatacaaaaaggatgtcggtaagacactctgcccgttgtgctttagcatactgaaggggcctatatcagatgcgctggcccatcacctgagggaacgccatcaggtgatccagactgtgcatccagtggagaaaaaacttacctacaagtgtattcactgcttaggcgtctacaccagtaatatgaccgcctcaacaatcaccctgcacctggtgcattgcaggggcgtcgggaaaacacagaatggtcaggacaagaccaatgccccctctaggttaaatcaaagcccaagtctggccccagtgaagcggacctatgagcagatggaattccctcttctcaaaaaacgaaaacttgatgatgactcagattcgcccagtttcttcgaagaaaagccagaggagccagttgtgctcgccctcgatccaaaaggccacgaggacgacagctacgaagctcgtaagtcgttcttgaccaagtactttaataagcaaccttatcccactcgtcgagaaatcgaaaagttggccgctagcctgtggttgtggaagtcagacatcgcctcccatttcagcaacaagagaaaaaaatgcgtgcgcgactgtgagaagtataagcccggtgtactccttggattcaacatgaaagaactcaacaaagttaagcacgagatggattttgacgccgaatggttgttcgagaatcatgacgaaaaagacagcagggttaatgcttcaaagactgcggataaaaaactcaacctcggcaaggaagatgactcctcctccgatagctttgagaatctggaagaagaatccaacgaaagcggttctccatttgatcctgtgtttgaggtcgaaccgaagatctctaacgacaatcccgaagaacatgtgctgaaagttatcccggaagatgcatccgagtccgaggaaaagctcgaccagaaggaagatggaagcaaatatgagactatacacctcacggaggagcccactaaactgatgcacaacgcgagcgatagtgaggtggaccaagatgatgtcgttgagtggaaggacggcgccagcccttccgaatccggccccggaagccagcaagtctctgacttcgaggacaacacctgtgagatgaagcccggcacgtggtcagatgagtcttcccagtccgaggacgcccggagcagcaagccagctgcaaaaaaaaaggctacgatgcagggagatcgggaacagctgaagtggaaaaatagcagctatggtaaagtggagggtttctggtctaaggaccagagccagtggaagaacgcatccgagaacgacgagcgtctgtccaatccccaaatcgaatggcagaactcaacaatagattccgaggatggagagcagtttgacaacatgactgatggagtggccgagcccatgcacggctctttagctggcgttaagctgagtagccagcaggcc

SEQ ID NO: 5713 - DNA, 3306 bp, synthetic construct
  misc_feature 1..3306: note = source = /note="Description of Artificial Sequence: Synthetic coding sequence"
  source 1..3306: mol_type = other DNA
atgtttcagttgcctgtgaataacctcgggtcactgaggaaagcgagaaaaaccgtcaaaaagattctgtcagacatcgggttagaatactgtaaggaacatatcgaagattttaagcagtttgagcctaatgatttctatctgaagaacaccacgtgggaggacgtggggttatgggatccatccttgactaagaaccaagattaccgaacaaagcccttctgttgcagcgcttgtcccttcagttcaaaattcttttctgcctacaagtctcactttcgtaacgttcacagcgaggattttgagaacaggatcttactcaactgcccttactgcacatttaacgctgacaaaaagactctcgagacacatatcaagatctttcacgctcctaatgctagcgcccctagcagcagcctctcgacgttcaaggacaaaaataagaacgatggtctcaaacccaagcaggctgattctgtggaacaggctgtgtactattgtaaaaagtgcacatacagagaccctctgtacgagatcgtgcggaagcacatctaccgcgagcatttccagcacgttgcggccccctatatcgctaaggcgggggaaaaatctttaaacggggccgtcccactgggaagtaacgctagggaagagtcatccatacattgcaagcgttgcctcttcatgcccaagagttacgaagccctggtgcagcacgtaatcgaagaccacgagaggatcgggtatcaggtgacggctatgattggacataccaacgttgtggtgcctaggagtaagccactgatgctaatagcacctaagcctcaggataaaaagagcatggggcttcccccaagaattggatctctggcgtcgggtaacgtgaggtcattgccgagccagcagatggtgaaccgacttagtataccaaagcctaacctcaactctactggagtgaatatgatgagctcagtgcatctccagcagaacaattacggcgttaagtcagttggacagggctattccgtaggtcagagcatgcggctcggtttgggcggcaacgctccggtgtccataccacagcaatcacagtccgtcaaacagttgttgccttccggtaatgggcggtcttacgggctcgggtcagagcaaagatcacaagctcctgcccggtatagtctccagagcgccaatgcatctagcctcagctcgggccaacttaaatccccgagcctttctcagagccaagcctcccgtgtgcttgggcaaagcagttcaaagcccgctgctgcagctactggccccccaccgggaaatacatctagtactcaaaagtggaagatctgtacaatttgcaatgagctgttccccgagaatgtgtatagcgtacacttcgaaaaagagcacaaagcagagaaggtcccagcagtcgccaattacatcatgaaaattcacaatttcacctcgaagtgcctgtactgcaaccgctacttgcctactgataccttgctgaatcatatgctcatccacggtctttcttgtccctattgccggtcaactttcaacgatgttgagaagatggctgctcacatgaggatggttcacattgacgaagagatgggaccaaaaacagactcaacactttcatttgacctaacactccagcagggatctcacacaaatattcatctccttgtcacaacatacaatttgcgagacgcacccgcagagtctgtggcttatcacgctcagaacaatccgcccgtgccgcctaaaccacagccaaaagtacaggaaaaggctgatatcccagtcaagagttcgccacaagcagctgttccttacaaaaaagatgtggggaagacactatgccctctgtgcttttccattttgaagggacctatttctgacgctttagcccaccacctgcgggagaggcatcaggtcattcagactgtgcaccccgtagagaaaaagttaacttacaaatgcattcactgtttgggggtgtatacgagcaatatgaccgcctctaccattacacttcacctcgtgcactgccggggcgtgggaaaaactcagaacggccaggacaaaactaatgccccttcgagactcaatcagtctccctccctagctccagtcaaaagaacttatgagcaaatggagtttccactgctcaaaaaaaggaagcttgacgacgatagtgacagtccctccttcttcgaagaaaaaccagaggaaccagtggtgttggctttggacccaaagggccatgaagatgacagctatgaggcccggaagtctttcctgacaaaatacttcaacaagcagccatatcctacacgcagggaaatcgaaaagcttgccgcttcgctatggctgtggaagtctgacatagcgtctcacttcagcaacaagaggaaaaagtgtgttcgggattgcgaaaaatataagccaggggtcctcctgggattcaatatgaaggaactgaataaggttaagcatgagatggacttcgatgctgaatggctgtttgaaaaccacgatgaaaaagattcacgagtgaatgcatccaagaccgccgacaagaagctaaacctgggaaaggaagacgacagcagttccgacagctttgaaaacctggaggaggagtccaacgagtcaggctccccttttgatcccgtgttcgaggttgaaccaaaaatttcgaatgacaacccagaggagcatgtgctgaaggttattcccgaggatgcctctgaatccgaagagaagctcgatcagaaggaggatggctcaaagtatgagaccatccatctgacggaggagccaaccaaactaatgcataacgcctccgatagtgaggtggaccaagatgatgtggtggagtggaaagatggcgcttcaccttctgagtccgggcccggaagccagcaggtttctgacttcgaggacaacacatgtgagatgaaaccgggaacctggagcgatgagagcagtcagtccgaggacgcacggtctagcaaaccagctgctaaaaagaaggccaccatgcaaggcgatcgggagcaattaaaatggaagaattctagttatgggaaagtggaaggattttggagcaaagatcagtcccagtggaaaaatgcttctgagaacgatgaacgtctttcaaaccctcagattgaatggcagaatagtaccatcgacagtgaagacggggaacagttcgacaacatgacagatggcgttgccgaacctatgcatggaagcctggccggggtaaagctgagctctcaacaggct

SEQ ID NO: 5714 - DNA, 3306 bp, synthetic construct
  misc_feature 1..3306: note = source = /note="Description of Artificial Sequence: Synthetic coding sequence"
  source 1..3306: mol_type = other DNA
atgtttcagttgccggttaataacttgggcagcttgcgaaaggctagaaaaacggtaaaaaaaatcctgagcgatataggattggaatactgcaaggaacacatcgaggatttcaagcaatttgagcccaatgacttttacctgaaaaataccacctgggaagacgttggtctttgggatccctccctcaccaagaatcaagattacaggacgaagcccttttgttgtagtgcctgtccattcagtagcaagtttttcagcgcctataagtcccacttcaggaacgtgcacagcgaggacttcgagaataggatcttactgaactgtccctattgcacctttaacgctgacaagaagactctggagacgcacattaaaattttccatgcgcccaatgctagtgccccctcatcgtccctgtcgacctttaaagataagaataagaacgacggccttaaacccaagcaggctgacagcgtggagcaggcagtatactattgtaaaaaatgcacctatcgagaccccttgtacgagatcgtgcggaagcatatctacagggaacacttccaacacgtggccgccccgtacatagctaaggctggagagaagtctctcaatggggctgtgccgctcggctccaatgctagagaggaatcttcaatccactgcaaacgctgcctgtttatgccaaaaagctatgaggcgctggtacagcacgtgatagaggaccatgagaggatcggctaccaggtgaccgccatgatcggccataccaatgtcgtagtgccccggagcaagcccttgatgctgatcgctccaaaacctcaagataagaagagcatgggccttcccccacgaattggctctttggcttctggcaatgtgagaagcttgccctcccagcagatggtgaaccggctgtctatcccgaagcccaatctcaattccaccggcgttaacatgatgtcttctgtccatctgcaacagaataactacggcgtaaaatccgttggacagggctactccgtcggccagtcaatgagacttggccttggaggtaatgctccggtgtccatcccgcagcagtcacaatcagtgaagcagttgttaccctccggtaatggtcggtcatatggcctgggatcagagcaaagatcgcaggcacctgcccgttacagccttcaatctgcgaatgcctcctcactgagttccgggcaattaaagagcccctcactgtcacagagtcaggcctctcgcgtgctgggacagagtagttctaaacccgcagcagcagctactggtccccccccaggtaacacttcatccacccagaaatggaaaatctgcacgatatgcaatgagctttttcccgaaaatgtctactcagttcattttgagaaggaacacaaagccgagaaagtgcccgcagtggcaaactacataatgaagatccacaactttacatctaaatgcctgtactgtaaccgctatctaccaaccgacacactcttaaatcacatgcttatacatggcctgagttgtccatactgcaggtccaccttcaatgatgtggaaaaaatggctgcacatatgaggatggtacacattgacgaggagatgggccccaagaccgatagtaccttatcgttcgatctgacattgcagcagggtagccacacgaacatacacctgctggtgaccacctataacctgcgcgatgctcctgcagaaagtgtggcgtaccacgctcagaataatcctcctgtccctcctaaaccccagcctaaagtccaggagaaggctgatatccctgtgaaaagtagtcctcaggctgcagttccgtacaaaaaggacgtcggaaagaccctgtgtcccctgtgcttttcaatactgaaagggcctatcagcgatgctctggcccatcatttaagagagaggcaccaggtcatacagaccgttcaccctgtggagaagaaactcacttacaagtgcattcactgcctgggggtttacacttccaatatgacagcaagcaccattaccctccacctcgtgcattgccggggcgtcggcaaaacacaaaacggccaggacaaaactaacgccccgagccgattaaatcagagtcctagtttggcgcctgtaaaacggacatacgaacaaatggagtttccccttcttaaaaagcggaagttggatgacgacagcgactcaccgtcgttcttcgaagagaaaccagaggaacccgtggttttggctctggatccaaaggggcacgaagacgattcatacgaggcacgtaaatctttcttgaccaagtattttaataagcagccttacccaacgagaagggaaatcgagaaactggcggcctccctctggttatggaaatctgacatcgcctcccatttttcaaacaaaagaaagaagtgcgtccgtgactgcgaaaagtacaagcccggggtattactgggtttcaacatgaaagagttgaataaggtcaagcacgaaatggatttcgatgcagaatggctgttcgaaaaccacgacgagaaagactccagagttaatgccagtaagactgctgacaaaaagttaaatctgggtaaagaagacgattctagcagtgatagcttcgagaacctggaggaggaatcaaatgaaagcggttccccttttgaccctgtcttcgaagtggagcctaaaatatctaatgataacccagaggagcatgtgttaaaggtcattccagaggacgcatccgagtccgaagaaaagctggatcaaaaggaggacggttcaaagtacgaaacgatccatctgactgaagaaccgacaaaactgatgcacaacgcatcggactctgaggtggaccaggatgacgtggttgagtggaaagacggagctagccccagtgagtcaggcccaggctcccaacaagtgtccgattttgaggacaatacctgtgagatgaagccaggaacttggagcgatgaatctagccagagtgaggacgctaggtcatcaaagcccgcggctaaaaagaaggccaccatgcagggagatcgagaacagctgaaatggaaaaatagcagctatggcaaggtggagggattctggagcaaagaccaaagtcagtggaagaatgccagcgaaaacgacgagcgcctatccaatccccagattgaatggcagaattccacaatcgactccgaggacggagagcagtttgataatatgacggacggcgtggcggaacctatgcatggtagcctagctggcgtgaagttatcgagccagcaagct

SEQ ID NO: 5715 - DNA, 3306 bp, synthetic construct
  misc_feature 1..3306: note = source = /note="Description of Artificial Sequence: Synthetic coding sequence"
  source 1..3306: mol_type = other DNA
atgttccaactcccagtgaacaatctgggatcgttgagaaaagcgagaaagaccgtcaaaaagatcctgtcggatattggtctggaatactgtaaggaacatatcgaggatttcaagcaattcgagccaaacgatttctacctgaagaacaccacctgggaggacgtcggactttgggatccgtcattgactaagaatcaagattaccgtactaagcctttttgttgctccgcttgtccgtttagctcgaagttctttagcgcctacaagtcacattttcgcaatgtgcactcagaagatttcgagaaccggatcctgcttaactgtccatattgcacgtttaacgcagacaaaaagacccttgaaactcacattaagattttccatgcacctaatgcatctgcaccgtctagttcgctgtccactttcaaagataagaataagaacgatgggctcaaaccaaagcaagcagattcagtggagcaggcagtgtattactgcaagaaatgcacctacagggatcccctgtacgaaatagtgcgaaagcatatctatcgtgagcattttcaacacgtggcagcaccctacatcgcaaaagccggagaaaagtccctgaacggtgcagtgccactcggaagcaacgcacgtgaggaatcgagcattcattgtaagcggtgtctgttcatgcctaagtcctacgaagccttggtgcaacacgtgattgaagatcatgaacgcatcggataccaggtcactgcgatgataggacatacgaacgtggtggtgccacgtagcaaaccgctgatgctcatagcaccaaagccacaagacaaaaagtcaatggggctccctcctagaattgggtcccttgcatcaggtaatgtcagatcgcttccctcccaacaaatggttaatagactttcgattccgaaaccaaacctcaactcaaccggggtcaacatgatgtcatccgtccacctccagcaaaacaactatggagtgaagtcggtggggcagggctactcggtcggtcagtctatgcgacttggactgggtgggaacgcaccagtttccatacctcaacaatcccaatcggtgaagcaacttctcccttcgggaaatggaagatcgtacggtcttgggtcggaacagcgttcgcaggcaccagctcgttactcactgcaatcggcgaatgcatcgtcactgtcctcgggccagctgaagtccccttcgttgagccaatcccaggcatcgagagtgcttggccagtcgtcaagcaaacccgccgcagcagcgaccggacctccaccaggtaacactagttccactcaaaagtggaagatatgcaccatttgtaatgagttgtttcccgaaaacgtgtactcggtgcatttcgaaaaagaacacaaggcagaaaaggtgccggcagtcgcaaattacatcatgaagattcataactttacgagcaagtgtctgtactgtaacagataccttcctaccgatactctgcttaatcatatgctgatccacggtctgtcatgtccatactgccggagcaccttcaatgacgtcgaaaagatggccgcacatatgagaatggtccatatcgatgaggaaatgggacccaagactgactcgactcttagctttgatctcactcttcaacaaggctctcataccaatattcacctgcttgtgacgacttacaacctgcgagatgcacctgcggagtccgtcgcgtaccacgcacagaataatccacctgtccctcccaagccacagccgaaggtgcaagaaaaggcagatattcctgtgaaaagctcgccccaggctgcagtgccatacaagaaggacgtgggaaagactctgtgccctctgtgtttttcgattctcaagggtcctatctcggatgccctcgctcatcatttgcgcgaaagacaccaggtgatccaaaccgtgcatccagtggaaaagaagctgacctacaaatgtattcactgccttggagtctacacttcaaatatgaccgcctcgaccatcaccctccatctggtgcactgtcgtggtgtgggcaagacccagaacggccaggataagaccaacgccccttccagacttaatcaatcgcccagcttggcacctgtgaagcgcacttacgagcaaatggagtttccactcttgaaaaaacgcaaacttgatgacgactcagacagccctagcttttttgaggaaaaacctgaagagccagtcgtgctggctctggacccaaaggggcacgaggacgacagttacgaagcacggaaatcctttttgaccaagtacttcaacaagcagccatacccaacccggcgcgaaatcgagaagctcgcagcgtcactgtggctctggaagtccgatattgcaagccactttagcaacaaacgcaagaagtgtgtgcgggattgtgaaaagtacaagcctggagtgcttctcggatttaacatgaaggagcttaacaaggtgaaacatgaaatggattttgacgccgagtggctgttcgaaaatcatgatgagaaggactcccgggtgaatgcgagcaagaccgcggacaaaaaactgaatcttggtaaagaggacgactcgagcagcgactcgtttgagaacctcgaagaagaatcgaatgagtccgggagccctttcgaccctgtgtttgaagtcgaacctaagatatccaatgacaacccggaggaacatgtgcttaaggtgattcccgaggacgcatccgaatcggaagaaaaactcgaccaaaaggaagatggctcaaagtacgagactatccaccttaccgaggagccaaccaaacttatgcataacgcatccgatagcgaagtggaccaagatgatgtggtggaatggaaggacggcgctagcccttctgagtcgggaccaggatcgcagcaggtgtccgacttcgaggataatacttgtgagatgaagcccggaacctggagcgatgaaagctcgcaatccgaggatgcacgatcatccaaaccagcagctaagaaaaaggcaaccatgcaaggagatcgtgaacagcttaagtggaaaaacagctcatacggaaaggttgaaggtttttggtcaaaggatcagtcacagtggaaaaatgcatcagaaaatgatgagagactctctaacccacaaattgagtggcaaaacagcaccattgacagcgaggacggagaacaatttgacaatatgaccgacggggtggctgaacctatgcatgggagccttgcaggtgtcaagctgagctcccagcaggca

SEQ ID NO: 5716 - DNA, 3306 bp, synthetic construct
  misc_feature 1..3306: note = source = /note="Description of Artificial Sequence: Synthetic coding sequence"
  source 1..3306: mol_type = other DNA
atgttccagctgcctgtaaacaatctgggaagtctccgcaaagctaggaagaccgtaaagaagatcctgagcgatataggccttgagtactgtaaggaacacattgaggatttcaagcagttcgaaccgaacgatttttacctgaaaaatacaacttgggaggacgtgggcctgtgggacccatcactcactaaaaatcaagattacaggaccaagcccttctgctgttccgcttgtccctttagcagtaaatttttctctgcatacaaaagccacttccgcaacgtgcattccgaggactttgaaaacaggatcctcctgaactgtccatactgcacgttcaacgctgacaaaaagactttggagacccacattaagatcttccatgcgccgaatgcttccgcgccctcctcctctttgtcaaccttcaaagataaaaacaagaacgacggattgaagccaaaacaggccgacagtgtggagcaagctgtgtattattgtaaaaagtgtacctatagagatccactgtacgaaatcgtaagaaagcacatttatagagagcactttcagcacgtagccgccccttacatagcaaaggcgggcgagaagtccctcaacggcgccgtgcctctgggatctaacgcccgcgaagaaagtagcatccactgcaagcgctgcttgttcatgccgaagtcttacgaggcactggtccagcatgtgatagaggatcacgagcgcatcggctatcaagtgacagcgatgatcggacatactaatgtcgtcgttcctcgctctaaaccgttgatgctgatcgcccctaagccacaggataaaaaatccatgggactgcccccgagaattggatctctcgcaagtggtaatgttcgctcactgccttcccagcagatggtcaacagactcagtattcccaagcctaacctcaatagtaccggtgtgaacatgatgagttccgtccatctgcagcagaataactatggcgttaaatccgtcggccagggctactctgttggtcaatctatgagactcggattgggtggaaatgcccctgtgtctatcccccagcaatctcaatcagtcaaacagttgctgcccagcggtaatggcagatcctacggtctgggttccgaacaacgctctcaggcgccggcgagatactccctccaaagcgctaacgccagcagcctgagcagtggccaattgaagtccccatccctgagtcagtcccaggcctctcgcgtgttgggccagtctagctccaagcccgccgcggccgctaccggacccccaccaggcaacaccagcagcactcaaaagtggaagatatgcaccatctgtaatgagctgttccctgagaacgtgtactccgtgcactttgaaaaagaacataaagctgagaaggtacctgccgtcgcaaactatatcatgaagatccacaatttcacatccaagtgcctgtactgcaatcgctacctgcctaccgacacgcttctgaaccacatgttgatccatggacttagttgcccttattgcaggagcacctttaacgacgtcgaaaagatggcggctcatatgcgcatggtgcacatagatgaggaaatgggcccgaagaccgattctaccttgtcattcgacctgaccttgcagcagggatcacacaccaacatacatctgctcgtcacaacctacaacctccgcgatgctcccgctgagtctgtggcataccacgctcagaacaatccccctgtaccccctaagccccagccaaaagtgcaggagaaagcggacattccagtcaagtcttcaccacaagcggctgtcccgtacaagaaggatgtgggtaagactctctgtcctctttgcttttctatcctgaaaggacctatttcagatgcccttgcacaccatctgcgcgaaaggcatcaggttattcagactgttcatcctgtggagaaaaagcttacatacaagtgtattcactgtctcggtgtgtacacctcaaatatgacggcttccaccataactcttcacctcgtgcattgccgcggcgtcggtaagacccagaacggtcaagacaaaactaatgcaccatctaggctcaaccaaagcccatcccttgccccagttaagaggacttacgaacagatggaattccccctgctcaagaaaagaaagctggacgatgatagtgattctccttcttttttcgaagagaagcctgaggaaccagtagtgctggccctcgacccaaagggtcacgaggatgacagttatgaagcccgcaagtctttcctcaccaagtactttaacaaacagccataccccactagaagggaaatcgagaagctggcagcctctctgtggctgtggaagtccgatattgctagtcattttagtaataagagaaagaagtgtgtcagagattgcgagaagtacaagcctggagtgctgctcggctttaatatgaaggaacttaataaggttaagcacgaaatggattttgacgccgagtggctcttcgagaaccacgacgaaaaagactcccgcgtgaacgcctccaagaccgccgataaaaagctgaatctcggtaaggaggatgattcttcctcagactctttcgaaaatttggaagaggaaagcaacgaatctggctctcctttcgatcctgttttcgaggtggaaccgaagatctctaacgacaaccctgaagagcatgttctgaaggtgatccccgaagatgcaagtgagtcagaggagaagcttgatcaaaaggaggacggctccaaatacgaaacgatccacttgacagaagagccaacgaagctcatgcacaacgcctccgacagcgaagtcgatcaggacgacgtcgtcgagtggaaagatggtgctagtccctccgaatcaggcccaggctctcagcaagtgtcagatttcgaggacaacacctgcgaaatgaagcctggaacgtggtctgacgagtcctcacagtctgaagacgccagatcttccaaacccgcggcgaaaaagaaggcaacgatgcaaggtgaccgcgagcaactgaaatggaaaaacagctcttatggaaaggtggagggcttctggtctaaggaccagagccagtggaagaatgcttccgagaacgacgagaggctcagcaacccccagatcgagtggcagaacagcactatcgattctgaggacggagagcagtttgacaacatgacagacggtgtggctgagcctatgcacggaagtcttgccggagtgaagctgtcaagtcagcaggct

SEQ ID NO: 5717 - DNA, 3306 bp, synthetic construct
  misc_feature 1..3306: note = source = /note="Description of Artificial Sequence: Synthetic coding sequence"
  source 1..3306: mol_type = other DNA
atgttccagctgcccgtaaataacctgggcagtctccgaaaagctagaaagacagtgaaaaagatcctctctgatataggattagagtactgtaaggagcacatagaagacttcaagcagtttgagcctaacgatttttatctgaaaaatacaacgtgggaagatgttgggctgtgggatccatctttgaccaaaaatcaggactataggaccaagccgttttgctgtagtgcgtgcccttttagttccaagtttttctccgcatacaagtcacacttcaggaatgttcactccgaggactttgaaaaccgaattctactaaactgtccttactgcaccttcaatgccgataagaagactctcgaaacccatatcaaaatattccatgctccaaatgcatccgcaccgtccagcagcctttcaacattcaaggacaagaacaagaatgatggcctgaagcccaaacaggcggactctgttgaacaggcagtgtattactgcaaaaagtgtacatatcgtgatcccctgtacgagatcgtcagaaagcatatatacagggagcattttcagcacgtggcagccccttatatagctaaggccggcgaaaagtcactgaatggagctgtgcccctgggcagcaacgcacgggaggaaagcagcatccactgtaagcgctgcctcttcatgccgaaatcttacgaggccctggtgcagcatgtgattgaagaccacgagaggataggataccaagttacagcaatgattggccataccaacgtggtagtacctagatccaagccattgatgctcatcgccccaaaaccccaggataaaaagtcaatggggctgcctccaaggatcggatctctggccagtgggaatgttcgttctctaccgtctcagcagatggtgaatcgtctaagcatacccaagccaaacttgaacagtaccggtgtcaacatgatgtccagcgtgcacttgcagcaaaacaactacggagttaaatccgtcggccagggctactctgtgggccagagcatgaggctcggcctaggtggcaacgctccagtgagtattccacaacaatcccagtctgtgaaacaactgctgcctagcggaaatgggagatcatatggtctgggctccgaacagagatcccaagcacctgcccgatactcacttcagtccgcaaacgcttccagccttagcagtgggcaactgaagtccccatcactgagccagtctcaagcatctagagtactggggcaaagctcatcaaaacccgcagccgccgctactggtcctcccccaggtaacacctcttccactcagaagtggaagatttgtaccatttgtaatgaacttttccccgagaacgtctattccgtgcactttgaaaaggagcacaaagctgagaaagttcccgctgtcgccaactacattatgaagatccacaatttcacgagcaaatgcctatattgcaatcggtatcttcccactgacacattgctcaaccacatgttaatccatggcctaagctgtccctactgtaggtctaccttcaatgacgtcgaaaagatggccgctcacatgaggatggtgcacattgacgaggaaatgggcccaaaaaccgatagcacactgtcctttgacctaacactccagcagggtagtcataccaacatacatctgttggtgaccacgtacaacctgcgggatgcaccagccgagtccgtcgcataccacgcgcagaataacccacccgtaccccccaaaccgcagccgaaagtccaagagaaggctgacattccggtcaaaagtagccctcaggccgcggtgccgtacaagaaggacgtcgggaagactctttgtccgttgtgtttctctattttgaaagggccgatctcagatgcgctggctcaccacctgcgggagcgtcaccaggtgatccaaacggtccatcccgtggagaagaagctgacctacaagtgtattcattgcctcggagtctacacctctaatatgacagcgtctactattaccctgcatctggtacattgccgcggagtgggcaagacccagaacggtcaggataaaaccaacgccccctcccggctaaatcagagtccatctctcgctcctgtcaagaggacatatgaacagatggagtttccactcctgaaaaagagaaaattagacgacgactccgatagcccatcttttttcgaggagaagccggaagaacctgtggtcttggcactggaccccaagggacacgaagatgacagctatgaggccaggaagtcctttttaacaaagtactttaacaagcaaccctatcccactcggagggaaatcgagaagctggcagcttcgctgtggctgtggaagtcagacattgcatcgcacttttctaacaagcggaaaaagtgtgtgcgagattgtgagaagtacaagcccggcgttttgttgggattcaacatgaaagagctaaataaagtaaagcatgagatggacttcgatgctgagtggcttttcgaaaatcatgacgaaaaggactctcgcgtcaacgcaagtaagactgcagacaaaaagctcaacctcggaaaagaagacgattcttcctcagactctttcgaaaatttggaggaggaaagcaatgaaagtgggagtccttttgaccccgtgtttgaagtagagcctaagatctccaatgacaacccagaagaacacgttctaaaagtcatccctgaagacgcatcagagagcgaagagaagctggatcagaaggaagacggttctaagtatgagactattcatttgaccgaagaacctacaaagttgatgcacaatgcatctgattccgaggtcgaccaggacgatgtcgtggagtggaaggatggggcctcaccttccgaaagtggcccagggtctcagcaggtatcagattttgaagacaacacctgcgagatgaagccgggcacgtggtccgacgagagtagtcaaagcgaggacgcccggtcctcaaaaccagctgcgaaaaagaaggctacaatgcaaggggatagagaacagctcaagtggaagaattcctcatacggaaaggtggagggattctggtccaaggaccagagtcaatggaagaacgcctcggaaaacgacgagagactctcaaatcctcagatagaatggcaaaatagcactattgactccgaggacggcgaacagttcgataacatgacagacggggtggcggaacccatgcacggaagcctggcaggtgtgaagctaagtagtcagcaggct

SEQ ID NO: 5718 - DNA, 3306 bp, synthetic construct
  misc_feature 1..3306: note = source = /note="Description of Artificial Sequence: Synthetic coding sequence"
  source 1..3306: mol_type = other DNA
atgttccaactgccggtgaacaatctgggatccctcaggaaggctagaaagactgtgaagaagattctgtccgacatcggtctggaatactgcaaggaacacatcgaagatttcaagcaattcgagcccaacgacttctatctgaaaaacacgacttgggaggacgtggggctgtgggatccgtcactcactaagaatcaagattaccgcaccaagcctttctgctgcagcgcctgcccgttttcgagcaagttcttcagcgcctacaaatcccatttcaggaacgtgcactcagaggactttgaaaaccgcatcctgctgaactgcccttactgcaccttcaacgctgacaaaaagaccttggaaacccacatcaaaatcttccatgctccaaacgccagcgcaccgtctagctctctttccacctttaaagacaaaaacaagaacgacgggcttaagccgaaacaagccgattccgtggaacaggctgtctactattgcaaaaagtgtacttaccgagatcctctgtacgagatcgtgcggaagcatatctaccgggagcactttcagcatgtggccgcgccgtacatcgcgaaggcgggcgaaaagagcttgaatggcgcagtgccgcttggatctaatgcccgcgaagagtcgtccattcactgtaagcggtgtctcttcatgccaaagtcgtacgaagctctggtgcaacacgtgatcgaagatcatgaaaggatcggttaccaggtcactgctatgatcggccacaccaacgtggtggtcccaagatccaagccgttgatgctgatcgccccgaagcctcaggataagaagtcaatggggctgcctccacgcatcggatcgttggcctccggaaacgtgcgctcactgccgtcgcaacagatggtcaatcgcttgtccatcccgaagcctaacctgaatagcaccggagtgaatatgatgtcctctgtccaccttcagcagaataactacggcgtcaagagcgtgggacagggatacagcgtgggccaatccatgaggctgggcctcgggggtaatgctcctgtgtccattcctcagcagagccagtcggtgaagcagcttctgccatcaggaaatggaaggagctacggactgggatccgagcaacggtcacaggcccctgcccgctactccctgcagtccgcgaacgcgtccagcctgtcatcgggacagctgaagagcccgtcactgtcgcaaagccaggcgagccgggtcctggggcaaagctcatcgaaaccggcagccgccgccaccggacctccgcctgggaacacctccagcactcagaagtggaaaatctgcaccatctgcaacgagctcttcccagagaacgtgtactcggtgcacttcgagaaagagcacaaggccgaaaaggtcccagctgtggccaactacatcatgaagatccacaatttcacctccaagtgcctctactgtaaccggtaccttccaactgacaccttgctgaaccacatgttgatccacgggctgtcgtgtccgtattgccggtccaccttcaatgacgtggagaagatggcagcccatatgcgcatggtccacatcgacgaagaaatgggccccaagactgactcaaccctgtcctttgatctgactctgcagcaaggatcgcatactaatatccacctgctggtgactacttacaatctgcgggacgcgccagccgaatcagtggcataccatgcacagaacaaccctccagtgccaccaaagccacagccgaaggtgcaggaaaaggcggatatcccggtcaagagctccccgcaggcagcggtcccttacaaaaaggacgtgggaaaaactctgtgcccactctgcttctccatcctcaaaggtcccatctcggatgctctcgcacatcatctgcgggaacggcaccaggtgatccaaaccgtgcatcctgtcgagaagaagttgacctacaagtgcatccactgcctgggcgtgtacacctccaatatgactgcatccactatcaccctgcatcttgtgcattgccgcggagtcggaaagactcagaacggacaggacaagactaacgctccctcacggctcaatcagtccccctcgctggcgcccgtgaagcggacttacgaacagatggagtttcctctcctgaagaaaagaaaactggacgacgatagcgactcgccttccttcttcgaggagaagccggaagagcctgtggtcctggccctggacccgaagggacacgaagatgactcgtacgaggcacgcaagtcgttcctgaccaagtacttcaacaagcaaccctacccgactcgccgcgaaatcgagaagctcgcggcgtccctgtggctgtggaagagcgatatcgcgagccacttcagtaacaagagaaagaagtgcgtgagagactgcgagaaatacaagcctggcgtcctgctcggcttcaatatgaaggaattgaacaaagtcaagcatgagatggatttcgatgctgaatggcttttcgaaaaccacgacgagaaggacagcagagtgaatgcgtcaaagaccgccgataagaaactgaacctcggaaaggaggacgactcatcgtcggattccttcgaaaacttggaggaggaaagcaatgagtccgggtcgcctttcgacccggtgttcgaagtggaaccgaagatctcgaacgacaacccggaagagcatgtcctcaaagtgatcccagaggacgcttccgaatcagaagagaagctggatcagaaagaggacggatcaaagtacgaaacgatccacctcactgaggagccgaccaagctgatgcacaatgcctcagacagcgaagtggaccaagacgatgtggtggaatggaaggacggagcctcgccgagcgaatcgggccccggatcccagcaggtttcagattttgaggacaacacgtgtgaaatgaagcctggcacctggagcgacgagtcgtcccaatctgaggacgcgagatcgtccaagccggctgccaaaaagaaggcgaccatgcagggggatagagagcagttgaagtggaagaactcaagctatggaaaggtggaaggcttctggtctaaagatcaaagccagtggaaaaacgcaagcgaaaacgatgagcggttgagcaacccgcaaatcgagtggcaaaattcgactatcgactccgaagatggagagcagtttgacaatatgaccgacggggtggcagagccgatgcacggatcccttgcaggggtgaaactgtcgagccaacaggct

SEQ ID NO: 5719 - DNA, 3306 bp, synthetic construct
  misc_feature 1..3306: note = source = /note="Description of Artificial Sequence: Synthetic coding sequence"
  source 1..3306: mol_type = other DNA
atgttccaattacccgtaaataacctcgggtccttgcgcaaggcccgcaagaccgttaagaaaattttgagcgacatcgggctggagtattgcaaggaacacattgaggatttcaagcaattcgaacctaacgacttttacctgaagaatacgacatgggaggacgtgggtctatgggacccaagtcttacgaaaaaccaggattatcgaacgaaacccttctgctgctctgcctgccctttctcgagcaagttcttctcagcttataagagccatttccgtaacgtccattccgaggatttcgagaaccggatactgttaaattgcccctactgcaccttcaatgctgacaagaaaactcttgagacgcatatcaagatcttccacgcgccaaatgcttcggccccgtcaagtagtcttagcactttcaaggacaagaataagaatgatggactgaagccgaagcaggccgactccgtggagcaagcagtttactattgtaagaaatgtacatatcgtgaccctttgtacgaaattgtgcggaagcatatttatcgcgagcactttcaacacgtcgccgcaccctacattgccaaagcgggcgaaaagtcccttaacggggccgtccctttaggatcaaatgcacgcgaggaatcgagcattcattgtaagcggtgcctgtttatgccgaagtcatacgaagcccttgtgcagcacgtcatcgaggatcatgaacggatcggttaccaagtcacggccatgatcggccatactaatgtcgtagttccacggtcgaagcccttaatgcttatcgccccgaagccccaggacaagaagtctatgggcctgcccccgcggataggaagccttgcgagtggaaatgttcgttcactcccaagccagcagatggtcaataggctgtccatccctaagccgaatctgaactcaactggagttaatatgatgagctccgttcaccttcagcagaataactatggggtcaagtcagtcgggcaagggtacagtgttggacagtcgatgcggctcggcctgggcggtaacgccccagtttccatccctcagcagagccaatcggtgaagcagctattgccgtccggaaatggtaggagttatggactaggcagcgaacaaagaagtcaggcacccgcgcgctactcattgcaatctgcgaacgcctctagcctctccagtggccagctgaagtctccatctctgtcccagagtcaggcgagccgcgttctcggacaaagttcatcgaaaccagcggcggcggctaccggtccaccacctggcaacacaagctccacacaaaagtggaagatctgtactatttgcaacgagctttttccagaaaatgtgtactccgtgcatttcgaaaaagagcacaaggcggagaaggtccctgctgtcgcgaactatattatgaagatccacaatttcacctcgaaatgcctatattgcaatcgctatcttcctactgacaccctcttgaaccatatgctcatacacggattatcttgcccttactgccgctcaacatttaatgatgtcgagaaaatggccgctcacatgcggatggttcacatagacgaggagatgggcccaaagacggactctaccctgagcttcgacctcaccctacaacagggatctcacacgaacatacacctgttggttactacgtataatctgcgtgatgccccagccgaaagtgtggcttatcacgcgcaaaataacccgcccgtcccccctaagccccaaccgaaagtgcaggaaaaggccgatattccagttaagagctccccccaggcagcggttccctataaaaaggacgttggaaagacgctttgtcctctttgcttctctatcctcaaggggccgatctccgatgctctcgcccaccacttacgtgaacgtcaccaggtgattcagaccgtccatcctgtagaaaagaaactgacgtacaaatgcatccattgcttgggtgtctacaccagcaacatgactgcctccacgattacactccacctggtccattgcagaggggtcggaaaaacccaaaacgggcaagataagactaacgcgccgtctcggttgaatcaatccccaagtcttgctccagttaaaagaacatatgagcaaatggagttcccacttctcaagaagaggaaacttgatgatgatagtgactcgccgtcattcttcgaggagaaaccagaagagccggttgttctggcgctcgatcctaaggggcacgaggatgattcgtatgaagcccgaaaatccttcctgacaaagtacttcaacaagcaaccctaccctacgaggagagagattgaaaagttggcagcctccctttggttgtggaagtcggacatcgcgagccatttctctaataaacgcaagaaatgtgtcagagattgtgagaagtataagcctggtgttttgctgggctttaatatgaaagaactgaacaaggtaaaacacgaaatggacttcgatgctgagtggcttttcgaaaatcacgacgagaaggactcacgcgtcaacgcaagtaaaacggcggacaagaagctcaacttaggtaaagaggatgatagttcctcggattccttcgaaaatttggaagaagagagtaatgaatctggcagcccatttgaccccgtcttcgaggtcgaaccgaaaatcagtaacgacaaccccgaggagcacgtgctgaaagtaattcctgaggacgcgtccgaaagcgaggagaagctggatcaaaaagaagatggcagtaaatacgaaacgatccatctcaccgaggaaccgaccaagctcatgcataatgcgagtgacagcgaggttgatcaggatgacgtcgtggaatggaaggacggcgcgagtccttccgaaagcggaccagggtctcaacaagtgtctgactttgaggataatacatgcgaaatgaagcctggcacatggagcgatgaatcttcacaatccgaagacgcgcgttcaagtaagcctgcggctaagaagaaagccaccatgcaaggtgaccgtgagcagttgaagtggaagaatagtagctacgggaaggtggagggcttctggagtaaggaccaaagccaatggaagaacgcgtcggaaaacgacgaaagattgtccaaccctcagattgagtggcaaaacagtacgatcgactctgaggacggagagcagttcgataacatgacagatggggtggccgagcctatgcatggctcgctcgcaggcgtcaaactgagtagccagcaagct

SEQ ID NO: 5720 - DNA, 3306 bp, synthetic construct
  misc_feature 1..3306: note = source = /note="Description of Artificial Sequence: Synthetic coding sequence"
  source 1..3306: mol_type = other DNA
atgttccaactaccggtgaacaatctcgggagcctgcgcaaagccagaaaaacggtgaagaagatactttctgacatcggacttgagtactgcaaagagcacatagaagacttcaagcagttcgaaccaaacgacttctacctcaaaaataccacatgggaagacgtcggcctctgggatccgagcctcaccaaaaaccaggattaccgtaccaaacctttttgctgtagtgcttgcccgttcagttcaaagttcttcagcgcatacaagagtcacttccgcaacgtacattccgaggatttcgagaatcgaatcctgctcaactgcccatattgcactttcaacgctgacaagaagaccctggagacccacatcaaaatatttcacgccccaaatgcaagcgctccttcttcatctctgtcaacgtttaaggataaaaacaagaacgatggcctgaagcccaaacaggctgactccgtggagcaggccgtgtactattgtaaaaaatgcacttaccgcgatcccctttacgagattgtgagaaagcatatttatagagagcatttccagcacgtggccgccccatacatcgccaaggccggagaaaaatctctgaatggcgctgtccccctgggttccaatgcccgcgaagagtcgtctatacattgtaagcgctgtttatttatgcccaagagctatgaagctctcgttcagcacgtcatcgaggatcacgagcgtatcggatatcaggtcaccgctatgattggacacacaaatgttgtcgtgccacggagcaagcccctaatgctgatcgccccaaagcctcaggacaaaaagagcatgggactgccaccacgcatagggtctctagcttcaggtaacgttagatctcttcccagtcagcagatggtgaacaggctgtccattcctaagcccaacttgaactccaccggcgttaatatgatgagtagcgtccatctgcaacagaacaattacggagtcaaatctgtgggccagggatattcggtgggacagagcatgagactgggcttgggaggcaacgcccctgtgtcgattccccagcagtcccagtcagtcaagcaactgctcccctcagggaacggtcgctcctacggactgggctccgagcaacgcagccaagccccggctcgttattcccttcagtcagcaaatgcgagttccctgtcgtccggacagctgaagagtcccagcctcagtcagtcacaggcgagcagagtcctgggacaaagcagctccaaaccagcagccgctgcaaccggacctccccctggcaacacatcttctacccagaaatggaaaatttgtactatttgcaatgagctgttccctgagaatgtgtattcggtgcatttcgagaaggagcataaggccgagaaggtgccagccgtagccaactacattatgaagatccacaacttcactagcaagtgtctctactgtaatcgttatctcccaacagatacattgttgaatcatatgctgatccacggactgtcatgcccatattgtagatccacttttaacgacgtcgaaaagatggctgcccacatgcgcatggtgcacatcgacgaggagatgggtccaaaaactgattcgaccttgtcatttgacttgacattgcaacaagggagtcacaccaacattcacttgctggtgactacttataatctcagagacgccccggccgaatcagtcgcatatcatgcacagaataaccccccggttccgcctaaaccgcagcctaaggtccaagagaaggccgacattcccgtcaaaagttctccccaagccgccgtgccatacaagaaagatgtgggcaagactctctgccccctctgtttctctattctgaaaggccctattagcgatgccctggcccaccacttgcgcgagcgtcaccaggttatccaaaccgtccatccagttgaaaagaagttaacctataagtgcattcactgcttgggggtgtacaccagtaatatgacagcctccactataactttacatctggtccattgccggggagttggcaagacccagaacgggcaggataaaactaatgccccctcgcgcctgaatcagtctccaagcttagcaccagtgaagcggacgtatgagcagatggagtttcccctgctcaaaaagaggaagctagacgacgacagcgatagtccctcatttttcgaagagaagcctgaggagcctgtcgtgctggctttggatccaaagggccatgaagatgattcttatgaagctaggaaaagcttcctcaccaagtattttaacaagcagccctacccaacgcgtagagaaatcgagaagctcgcagcgtctctttggttgtggaagtcggatatcgcctcacacttcagtaataagagaaaaaagtgtgtgagggactgcgagaagtacaagcctggcgtgttgctcggctttaatatgaaagagctcaataaggttaagcacgagatggattttgacgcggagtggctgttcgaaaatcacgatgaaaaggactcacgcgtcaacgcatccaaaacagcggacaagaagttaaacttaggcaaggaggatgacagttccagcgattccttcgaaaacctggaggaagaaagcaacgaatctggctcccctttcgaccctgtgtttgaggttgagcccaagatttctaacgataatcctgaggaacacgtgctgaaggtgatcccggaggatgcaagtgagtccgaagaaaaactggaccagaaagaagacggttccaagtacgagactattcatctgaccgaggagccaactaagctgatgcacaatgccagtgactctgaagtggaccaggacgacgtcgtggagtggaaggatggcgcttcacctagcgaatctggtccaggctcccagcaggtgagcgatttcgaagataatacatgcgagatgaagccagggacttggtcagatgaatcgtctcagagtgaagacgccagatcatctaaacctgctgcaaagaagaaggccacgatgcagggcgaccgagaacagctgaagtggaagaattctagctacggcaaggtggaggggttctggtccaaagaccaatcccagtggaaaaacgctagcgagaatgacgaaagactgagtaatccccaaatcgagtggcagaatagtactattgactccgaagacggagagcagtttgacaatatgaccgacggtgtcgccgagcctatgcatggcagcctcgcaggggtcaaactctcctcccaacaagct

SEQ ID NO: 5721 - DNA, 3306 bp, synthetic construct
  misc_feature 1..3306: note = source = /note="Description of Artificial Sequence: Synthetic coding sequence"
  source 1..3306: mol_type = other DNA
atgtttcaactgccagtaaataacctgggttcccttaggaaggcgaggaaaacagtgaaaaagatcctgagtgacattggcctggaatactgcaaagaacacatcgaggatttcaagcaattcgagcccaatgatttttacttaaagaacactacatgggaagatgtcgggctttgggacccctcgttgacgaagaatcaagattatcggacaaagcctttctgttgcagtgcctgtccattttctagtaaatttttttcagcatacaagagtcacttcaggaacgtacactccgaggactttgagaaccgtattctgctcaactgtccttattgcacctttaacgctgacaagaagactctggagacacacataaaaatcttccacgctccgaacgcttccgcccccagctcatctctgtcaacatttaaggacaagaataagaacgatggactcaagccgaaacaggccgattcggtggaacaggccgtttattactgcaaaaaatgtacatatcgtgatcctctttacgagatcgtcagaaagcatatctaccgcgagcattttcaacatgtggctgccccctacatagcaaaagccggcgaaaagtctttgaatggcgcggtcccactgggctctaacgctcgggaggaatcgtcaattcattgcaagaggtgtctctttatgcccaagagctacgaagcgctcgttcaacatgttattgaggaccacgagcggattggataccaggtcacagccatgatcggacacaccaacgtcgtggttcctcgatccaaacccctcatgttgattgccccaaagccacaggataagaagagcatgggacttccaccccgaatcggtagcctggcaagcgggaacgtgcgttccctgccctcccagcagatggtaaataggcttagtatccccaagccgaaccttaactctacgggcgtgaacatgatgagctctgtacacctgcagcagaataactatggggtcaagtctgtaggacaggggtatagcgtgggccagtccatgagattaggactgggaggaaatgcgcctgtgagcattccccaacagagccaaagcgtcaagcagctgttgccgagcggtaatggccggtcatacgggttgggaagcgagcagcgtagtcaagcccccgcacgctactccctgcagtcagcaaatgccagtagcttgtctagtggccaactcaaatccccatccctgagtcagtctcaggcgagtcgggtactggggcagagctcctctaaaccggctgcagcagctaccggacctcctcctggtaacacttcaagtacgcaaaaatggaaaatttgcacaatttgtaatgagttattccctgagaatgtctattcagtccacttcgagaaggaacacaaggcggaaaaagtgcctgccgtggccaattacattatgaaaatccataatttcacttccaagtgtctctactgcaaccgttacctgccaactgacactctgctaaaccacatgctcatacacgggctgtcatgcccatactgtcgcagcaccttcaatgacgtcgagaaaatggctgcccatatgagaatggtgcatatcgacgaagagatgggacctaagaccgattcaactctgagcttcgacctgacactccagcagggaagccacacaaacattcaccttctggtgacaacgtataatctgcgcgacgcgccggcagagagcgtcgcctaccacgcccaaaataatccacctgtcccccctaagcctcaacccaaggtgcaagaaaaggcagatatccccgtaaaaagtagccctcaggccgctgtcccatataagaaggatgtgggaaagacactgtgtccactgtgctttagcattctgaaggggcccatctcagatgcattagcccaccatctgagggaacgacatcaggtgatacagaccgtgcatcccgtcgagaagaaactcacttataagtgcatacattgtcttggagtctacaccagcaacatgacagctagtaccattactctccatctcgttcattgtcgcggggtgggtaaaactcagaacggtcaggacaaaaccaacgcaccttcgcggttgaatcagtcaccttcactggccccagtcaagcgcacgtatgagcaaatggaattcccattgctcaagaaacgtaaactggacgatgatagcgattctccctccttttttgaggagaaacctgaggagccagtggtgttggcactggaccccaagggccacgaggacgattcctacgaggcgaggaagtcatttctgacaaagtatttcaacaagcaaccatatcctactcggcgggaaattgaaaaacttgcggcatcactgtggctctggaaatctgacattgccagccacttttcgaacaagcgaaagaaatgtgtgcgcgattgtgagaaatacaagccgggagtgctgttaggttttaatatgaaggaattgaacaaagtgaaacacgagatggattttgacgctgagtggctctttgagaaccatgatgagaaggactctcgagtcaatgcttctaaaacagccgataagaaactgaacctcgggaaggaggacgacagctcgagcgactctttcgagaatctcgaggaggagtctaacgaaagtggtagcccttttgaccctgtcttcgaggtagagcctaagatctcaaacgacaaccccgaggaacatgtcctaaaggtcatccctgaagacgcttcagagtctgaggaaaaactagaccagaaggaggatggaagtaaatacgagactattcatcttaccgaggagccgactaagcttatgcataatgcgagtgactccgaggtggatcaggacgatgtagtggaatggaaagatggcgcatctcctagcgaatccggacctggatcccagcaagtgtcggacttcgaggataacacatgtgagatgaagcctgggacgtggtccgacgagagctcccaaagcgaagatgctcgctcctctaagccagcagccaagaagaaggccacaatgcagggcgatagggagcagctaaagtggaaaaactctagctacggcaaagtagagggcttttggtccaaagaccaatctcagtggaaaaacgcttctgagaatgacgaaagacttagcaacccccagatcgagtggcagaactccacaattgatagcgaggacggtgagcagttcgataatatgacagacggcgttgcagagccgatgcatggtagccttgctggcgtgaagctgagtagtcagcaggct

SEQ ID NO: 5722 - DNA, 3306 bp, synthetic construct
  misc_feature 1..3306: note = source = /note="Description of Artificial Sequence: Synthetic coding sequence"
  source 1..3306: mol_type = other DNA
atgtttcagcttccggtgaacaacctgggttcactgagaaaggctcggaaaaccgtgaagaagattctgtcagacattggtctggaatactgtaaggaacacattgaggactttaagcagtttgaacctaacgacttttatctcaagaacacgacgtgggaagatgtcggtctttgggatcctagcttgaccaaaaaccaggactacagaacgaagcccttttgttgcagcgcatgtcccttttcaagcaagtttttctccgcatacaaatcacattttaggaatgtgcactcggaggactttgaaaaccgcatcctcctcaattgtccttactgtacgtttaatgcagacaagaaaactctcgagactcacattaagatctttcacgcgcctaacgcatcggccccgagctcatcattgtcaactttcaaagacaagaataagaacgatggccttaagcccaaacaggcagactcggtggagcaagccgtgtactactgtaagaagtgcacctaccgcgatcctctgtacgaaattgtgagaaagcacatttaccgagaacatttccagcatgtggccgcaccctacatcgcaaaagcgggtgaaaagtcccttaacggcgcggtgcctctgggaagcaatgcgcgtgaggaatcatcgatccattgcaagcgttgtctgttcatgcctaagtcgtacgaggcgcttgtccaacatgtgatcgaggatcatgaaagaatcggttaccaggtgactgctatgattggccacaccaacgttgtggtgcccagatcaaaaccccttatgctgatagcgccgaagcctcaagacaagaagtcaatgggcctgccccctcgaatcggttctctggccagcggtaatgtgcgctcgctgccctctcaacaaatggtgaaccgcctgtcgatcccaaagcctaaccttaactcgactggagtgaatatgatgtcgtcggtccatctccaacagaataactatggagtgaagagcgtgggtcaaggatattcggtcggtcagagtatgcggctggggctgggcggaaatgccccggtgagcattccccaacagtcacaatcggtgaaacaattgctgccatcagggaacggaagatcatacggactgggctccgagcaaagatcgcaggcacctgctaggtactcgttgcaaagcgcaaacgcctcgtccctttcctctggtcagctcaagtctcctagcctttcccagtcgcaagcaagccgcgtgctcggacagtcctcttcaaaaccggcggcagcagcgactggacccccacccggaaacacgtcgtcaacccaaaagtggaagatttgtaccatttgtaacgagctgtttccagaaaacgtgtactccgtccattttgaaaaggaacataaggcggagaaggtgccagcagtggcgaactacattatgaaaatccacaatttcacctcaaaatgtctctattgcaacagatatttgcctactgataccctgctgaatcatatgctcatccatggcctctcctgtccatactgtagatcgacttttaacgatgtggagaagatggccgcacacatgcgcatggtgcatattgatgaagaaatgggcccgaaaaccgattcaaccctttcgtttgatttgactctgcaacaaggatcccataccaacattcacctgctcgtgacgacctacaacctgagggatgcaccggccgaatcggttgcataccatgcccagaacaacccacctgtccctcccaagcctcaaccaaaggtgcaagaaaaggccgatatccccgtgaaaagctctcctcaggcagccgtcccctacaagaaagatgtgggaaagacgctttgtccactttgtttcagcatcctgaaggggccaatatcggacgccctggcccatcaccttagagagcgccatcaagtgattcagactgtgcatcctgtcgagaaaaaactgacttacaagtgtattcattgtctgggagtgtacacgtccaacatgaccgcctcgactatcaccctgcatctcgtgcactgtaggggggttggtaaaactcagaacggccaggataagactaacgctccttctcgacttaatcaaagcccatcgctggcacctgtgaaaaggacctacgaacaaatggaattcccacttttgaagaagaggaagctggatgatgattcggattcgcctagcttttttgaggaaaaaccagaagaacccgtggtgcttgctctggacccaaagggtcatgaggatgactcctacgaagcacgaaagtccttcctgactaagtactttaacaagcagccgtaccctactagaagagaaattgaaaagttggccgcaagcctctggctttggaagtccgacattgcctcgcatttcagcaacaagaggaaaaagtgcgtgcgcgattgtgagaaatacaagccaggtgtgcttctgggatttaacatgaaggaactgaacaaagtcaagcatgaaatggattttgatgcggaatggctgttcgaaaaccatgatgaaaaggactcacgggtgaatgcaagcaagaccgcagataagaagctcaacctcggaaaggaagatgatagctcatcagattcatttgagaacctggaagaagaatccaatgaatccggaagcccgtttgatccagtttttgaggtcgagccaaagatctccaacgataacccagaagagcacgtgcttaaggtcatccctgaggacgcctcggagtcggaggagaaacttgatcaaaaggaagatggttccaagtacgaaactattcatctgactgaggagccgaccaagttgatgcataacgccagcgattcagaagtggatcaagacgatgtcgtggaatggaaggacggagccagcccatccgaatccggacctggctcgcaacaagtttcggacttcgaagataacacttgcgaaatgaagcctgggacctggtcggatgaatcgtcacagagcgaggacgccagatcctcgaagcccgcagcaaagaaaaaggccaccatgcaaggtgatcgagagcaacttaagtggaaaaacagctcttacggaaaggtggaaggtttttggagcaaagaccagagccaatggaaaaatgcatcagaaaacgacgagcggctcagcaacccccaaatcgagtggcaaaacagcaccattgacagcgaagatggagaacagttcgataacatgaccgatggagtggcagagccaatgcacgggtccttggcaggtgtgaaacttagcagccagcaagcc

SEQ ID NO: 5723 - DNA, 3306 bp, synthetic construct
  misc_feature 1..3306: note = source = /note="Description of Artificial Sequence: Synthetic coding sequence"
  source 1..3306: mol_type = other DNA
atgttccagctccctgtgaacaatcttgggtcgcttagaaaggcacgaaagactgtgaagaagatcctgtcagacattgggctcgagtattgcaaggaacacattgaagattttaagcagttcgaacccaacgacttctatctgaagaacacaacatgggaggatgtgggcttgtgggacccttctctgacaaagaaccaagactaccggaccaagccattctgctgttcagcgtgtccatttagctccaaatttttcagcgcttacaaaagtcatttccggaacgtccatagtgaagacttcgagaatcgtatcctgctgaactgcccctattgcacctttaacgctgacaagaaaaccctggagacccacatcaagatctttcatgcacctaacgcctccgcccccagcagctctttgtccacatttaaggacaagaacaagaacgacgggttgaaacctaagcaggcggactccgtggaacaggctgtgtattactgcaaaaagtgtacctatcgagaccctctgtacgagatcgttcgcaaacacatctatagggagcatttccagcacgtggccgccccatatatcgcaaaagcgggagagaagtcgctgaatggggccgtccccctcggatctaacgcccgagaggaaagttctattcactgcaaacgatgccttttcatgcctaagtcctacgaggccctcgtccagcacgtgattgaagaccacgaacgcatcgggtatcaagtgaccgccatgatcggtcatactaacgtggtagtcccacggtctaagccgctgatgttaatcgcacccaagcctcaagacaaaaagagtatgggcctaccgcccagaataggaagcttagcatccggcaatgtgagaagcctgccctcacagcaaatggtcaataggcttagcattcccaaaccaaatcttaatagtactggagtgaacatgatgagctcggtgcacttgcagcagaataactacggggtgaaatccgtcggtcagggctatagtgtgggtcagagcatgagactggggttgggagggaatgctccagtgagtattccccagcagtctcagagcgtgaaacaattgctaccttcgggcaatggacggagttacggcctggggtctgaacagcgctctcaggctcctgctcgatactccctgcaatcagcaaacgctagctctctgtcgagtgggcagctcaagtcaccttcactgagccagagccaggcctccagggtgctcggccagagtagctctaagccagcggccgcagctacgggccccccaccaggcaataccagctcaacccagaagtggaaaatttgcacaatctgtaatgaactgttcccggaaaatgtgtacagtgttcacttcgagaaggagcataaagcagaaaaagttcctgctgtggccaactacatcatgaaaattcataatttcacgtcgaagtgtctgtactgtaaccggtatctgccgactgacaccttgcttaaccatatgttgattcacggcctgagctgcccctattgtcggtccacgttcaatgacgtcgagaaaatggccgcccatatgagaatggtgcacatcgacgaagagatgggtcccaaaaccgatagcacgctatcattcgaccttaccctccagcaaggctcacatacgaacatccacctccttgtaactacctacaatctccgcgacgccccagcagaatccgtggcttaccacgcccagaataacccgcctgtgccgcccaagccccagccaaaagttcaagagaaggccgatatcccggtcaagtcctctccgcaggcagctgtcccttataaaaaggatgtgggcaagaccctctgtccactgtgtttttcgattttgaagggccccatcagcgacgctcttgcccaccacctcagggagcgccatcaagtaattcagaccgttcatcctgtggaaaagaagttgacctacaagtgtattcactgtcttggggtgtatacctccaacatgactgcgagcactattacgctgcacctggtccattgcagaggcgtgggtaagacacagaacggccaggacaaaacgaacgctccctccagattaaatcagtccccaagtctagcccctgtgaaacggacttatgagcagatggagttcccactgttgaaaaagaggaagctcgatgacgactctgatagcccgtcctttttcgaggaaaagcctgaagagccagtcgtgctcgctttggatcctaagggccacgaagatgacagctacgaagcccgtaaatcatttctgacgaaatactttaacaagcaaccgtatcctacccgccgggaaatcgagaagctcgccgcttccttatggttatggaagtcagatattgctagccacttctccaacaagcggaagaagtgcgtccgagactgtgagaagtataaaccgggtgtacttctggggtttaatatgaaggaactgaataaggttaagcacgagatggacttcgatgctgagtggcttttcgaaaatcacgacgaaaaggattccagagtcaatgcttctaagaccgcagacaaaaaactgaacctgggcaaagaagatgattcctcaagcgacagtttcgaaaatctggaggaagagtctaacgagtccggctcaccttttgatcctgtattcgaggtggagcctaaaatctcaaacgataaccctgaggagcacgtcttgaaggtgatccccgaagacgccagcgagagtgaggagaaacttgaccagaaggaagacgggtcaaagtacgaaactatacatcttaccgaagagcctacgaaactcatgcataatgccagcgacagtgaggtggatcaggacgatgtggtggagtggaaggacggggcaagtccttcggagtccggacccgggagccagcaagtgtcagatttcgaggataatacctgcgagatgaagcccggcacatggagcgatgagagctcccagtctgaggacgccagatcgagtaagcccgctgctaagaagaaagccacgatgcagggagatagagagcagctgaagtggaaaaatagtagctacggcaaggtggagggtttctggagcaaggaccagagccagtggaagaacgctagcgaaaacgatgagcgacttagtaacccacagatcgagtggcagaactctaccattgactcagaggacggagagcagttcgacaatatgacggatggcgtcgctgagccaatgcacggtagtctggcgggcgtcaaactgtcctcccagcaagca

SEQ ID NO: 5724 - DNA, 3306 bp, synthetic construct
  misc_feature 1..3306: note = source = /note="Description of Artificial Sequence: Synthetic coding sequence"
  source 1..3306: mol_type = other DNA
atgttccaactgccggtcaacaaccttggcagcctgcgcaaggcgcgcaaaactgtcaaaaaaatcctctcagacattggcttggagtattgcaaagaacatatagaagatttcaaacagtttgaacctaacgatttttatttgaaaaacactacatgggaggatgtcggtttgtgggatccgtcactaacaaaaaatcaagattacagaacgaagccattttgctgctcagcatgtcctttctctagcaagttttttagcgcctataaatcccacttcaggaacgttcatagtgaggattttgaaaatcgcattcttctcaattgtccgtactgtacgttcaacgcggacaaaaaaactctcgagactcatataaaaattttccatgccccaaatgcgtctgctccatcttctagcctgtccacatttaaggacaaaaataaaaatgacggccttaagccgaaacaggcagattctgtagaacaagcagtatattactgcaaaaaatgcacgtaccgggacccgttgtatgaaatcgtacgcaaacacatttacagagaacattttcaacatgtggcagcgccgtatattgcaaaagccggcgaaaaaagcctaaatggagcagttccgttgggaagtaatgctcgggaggaatcaagcattcattgtaaacgctgcctttttatgccgaaaagttatgaagctctagtacagcatgtgatcgaagatcatgaacgtattggttatcaggtcacagcaatgattggacatacaaacgtcgtagtaccgagatctaagcctttgatgctcattgccccaaagccccaggataagaaatccatgggtctccctcctagaattggtagccttgcttcaggaaatgtgcgctctcttcctagtcagcaaatggtaaatcgactcagcattccgaaacccaatcttaattcaacaggcgtaaacatgatgagtagcgtccacttacagcagaataattatggagtgaaatctgtcgggcaaggctacagtgtaggacagtctatgagactgggtttagggggcaatgctcctgtaagtattccacaacagtcccagagcgtcaaacagttactgccttcaggcaatggccgatcctatggcctgggttctgagcagagatcacaggctcctgctcgctattctctacagtcagccaatgctagctcattgtccagtggtcagttgaagtccccttctttatctcagtcacaggcttctagagtgcttgggcaaagcagctctaaaccggcagccgcagccaccggtccgcccccggggaatacgagttcaacgcagaaatggaagatttgtacaatctgtaatgaactgtttcctgaaaacgtgtattcagtgcattttgaaaaggaacataaggctgaaaaagtgccggcagtagcgaactatattatgaaaatccacaattttacatctaaatgtttatactgcaataggtatttaccgacagatacacttctcaatcacatgttaattcacgggctgtcatgcccgtactgccgctccacctttaatgatgtagagaaaatggcagcgcatatgcggatggttcatattgatgaagaaatgggaccgaaaacagacagcactttgtcttttgacttaactttgcagcagggctctcatacaaatatccacctgctggtgacaacgtataatctgagagatgcaccggcagagtccgtggcttatcatgcacagaacaatcctccagttccaccaaagccgcagccgaaagttcaagaaaaagctgatatcccggtcaagtcaagcccacaagctgccgttccatacaagaaggatgttgggaaaacgctgtgtccattatgcttttctattcttaagggaccgatcagtgacgctcttgcgcaccatctgcgggaacgccatcaagtcattcaaacagtacatcctgtcgagaagaagcttacttataagtgtatccactgcctcggagtttatacttcaaacatgacagctagcactataacgcttcacttagtacactgccgaggagtggggaaaactcaaaatgggcaggacaaaacaaacgctcctagccggcttaatcagagcccttcactcgcgcctgttaaaaggacgtatgaacagatggaatttcccctgcttaagaaaagaaaattagatgacgattctgactctccaagtttttttgaagaaaaaccggaagaaccggtggttcttgctttggatcccaagggacatgaagatgactcttatgaagccagaaaatcttttcttacaaaatatttcaacaaacagccttaccctactcgtcgtgaaattgagaaactggcagcaagcctctggttgtggaaatcggatatcgcctcgcatttttcgaataaacgtaaaaaatgtgtgcgggactgtgaaaaatataagccgggtgtgttgcttggcttcaatatgaaagagttaaataaggtcaaacatgaaatggattttgatgcagaatggttatttgagaatcatgacgaaaaggactcacgggttaacgcctcaaaaacagcggataaaaaactaaatctcggcaaagaagacgactcctctagcgatagcttcgaaaacctagaggaagaatcgaacgaatcaggatcaccttttgatccggtgtttgaagtcgaaccgaagatatcaaatgataaccctgaagagcacgtgttgaaagttattcccgaggatgctagcgaatcagaggaaaaattggatcagaaagaagacggctctaaatacgagactattcatcttaccgaagaaccgacgaagctgatgcataacgcgtcggacagcgaagtagatcaagatgacgtcgtcgaatggaaagatggggctagtccgtctgaatcgggcccgggatctcaacaagtgagcgatttcgaagacaatacctgtgaaatgaaaccgggtacgtggagcgatgaatcttcccaaagtgaggatgctcggagttcaaaaccggctgccaaaaagaaagcgactatgcagggagaccgcgagcaactgaaatggaaaaattcatcctacggaaaagtagaaggattttggagtaaagaccagtctcagtggaagaacgcttcagagaacgatgaaagattgtcaaatccacagatcgaatggcaaaattcaaccatagatagtgaagacggtgaacaatttgataacatgacagacggtgtcgcggaacctatgcatggcagtcttgcgggcgtaaagttatcttcacaacaggct

SEQ ID NO: 5725 - DNA, 3306 bp, synthetic construct
  misc_feature 1..3306: note = source = /note="Description of Artificial Sequence: Synthetic coding sequence"
  source 1..3306: mol_type = other DNA
atgttccagctccccgtgaataacctggggtcactgcgcaaggctcggaaaaccgtgaagaagattctgtcggacatcgggctcgaatactgcaaggaacacattgaggactttaaacagttcgagccaaacgacttctaccttaagaacaccacttgggaagatgtgggactctgggatccgtcgctgaccaagaaccaggattaccggaccaagcccttttgctgctcggcttgtccgttctcgagcaaattcttctcagcatacaagtcgcacttccggaacgtccactccgaggacttcgagaaccggatcctgttgaactgcccatattgcaccttcaacgccgacaaaaagaccctggaaacccacatcaaaatctttcatgctccaaacgcgtcagccccttcctcctcactgtcgacgttcaaagataagaacaaaaacgacggactgaagcctaaacaagccgactccgtcgagcaggccgtgtactactgcaagaagtgtacgtatcgtgatccgctctacgaaatcgtgcggaagcatatctaccgggagcacttccagcatgtggccgccccttacatcgctaaggcgggcgagaaatcccttaatggagcagtcccactggggtcgaacgcacgggaagagtccagcatccattgcaagcgttgcctcttcatgcccaaatcctacgaagcgctggtccaacatgtgattgaggaccatgaaagaatcggataccaagtgactgccatgattggacacactaacgtggtggtgcctagatccaaaccactcatgcttatcgcccctaagccccaggataagaagtcaatgggcctgcctccgcgcatcggctcactcgcgtccgggaacgtcaggtccctcccatcacaacaaatggtcaatcggctgtccatcccgaaaccgaacctcaactcgactggtgtgaacatgatgagctctgtgcacttgcagcaaaacaactacggagtgaagtctgtggggcagggttactcggtgggccagtcgatgagattgggtctgggcggaaacgcgccagtgtcgataccgcaacagtcccaatccgtgaaacaactgctgccatcaggaaatggacgcagctatggtctgggaagcgaacagcgctcgcaggcgccagcccgctactcgctgcagtcggctaacgcatcgtcgctgtcgtccgggcaactgaagtcaccaagcctgtcccagtcacaggcctcaagagtgctgggacagtcatcctcgaagccagccgccgccgccactggtcctccgccaggaaacaccagctcaactcagaaatggaaaatctgcactatttgtaatgaactttttcctgagaatgtctattccgtgcacttcgaaaaggaacacaaggccgaaaaggtgccggcggtggccaactacattatgaagatccacaatttcacttccaagtgcttgtactgcaacagatacttgcctactgatactctcctcaaccatatgttgatccatggcctgtcttgtccgtactgtcgctcaactttcaatgatgtggagaaaatggcggctcacatgaggatggtgcatatcgatgaggagatgggcccgaaaacggatagcaccctcagtttcgatctgacgctccaacagggatcgcacaccaacatccatttgctcgtgactacttacaacctccgcgatgccccggccgagtcggttgcctaccatgcacagaacaaccccccggtgccgcccaagccgcagccaaaagtccaagaaaaggcagacatcccagtgaagtcgtcaccccaggctgcagtgccatacaagaaggacgtcggaaagaccctctgccctctgtgtttctccatcctgaagggtccgatctcggatgctctggcccatcatctccgggagcgccatcaagtgatccaaactgtccatcctgtggagaagaagctgacttacaaatgtatccattgtctcggggtgtacacgtcgaacatgactgcctccactatcaccctgcatctggtgcattgccgcggcgtcggcaaaacccaaaatggccaggacaaaaccaacgcgccgagcagactgaatcagtcaccgagccttgccccggtgaagcgcacctacgaacagatggaatttccactgttgaaaaagcgaaaactcgatgacgactccgattccccgtcgttttttgaggaaaagccagaagagccggttgtgttggccctggacccgaagggacacgaggatgactcgtatgaggctcgcaaatccttcctgaccaagtacttcaataagcagccatacccgaccagacgcgagatcgaaaaactggcggcgagcctgtggctctggaagtccgacatcgcttcccacttcagcaacaaaagaaaaaagtgcgtacgagactgcgagaaatacaagcccggtgtgctgttggggtttaacatgaaggagctcaacaaagtcaagcacgagatggactttgacgcggaatggctctttgagaatcacgacgagaaggactcccgggtgaatgcgtccaagacggctgataagaaactgaacctcgggaaggaggatgatagctcttcggacagcttcgagaacctggaggaggaatcgaacgagtcgggatccccgttcgacccggtgtttgaagtggagccgaaaatcagcaatgacaacccggaggaacatgtgctcaaggttatcccggaggacgcgagcgaatcggaggagaagctggatcagaaagaagatggcagcaagtacgagactatccatctgaccgaagagcctactaagttgatgcacaacgcttccgattccgaagtcgatcaggacgacgtggtcgaatggaaggatggagcctcaccttccgagtccggtcctggttcccagcaggtgtcagactttgaggacaacacgtgcgagatgaaaccaggaacctggtccgatgaaagctcgcagtctgaagatgcccggtcaagcaaaccggccgcgaagaagaaagcaactatgcagggagatagggaacagctgaaatggaagaactcatcttatggcaaggtggagggattctggtccaaagaccagtcccagtggaagaatgcctcggagaacgatgagcggctgtccaatccacagattgagtggcagaactcaactatcgactcagaggatggagagcagttcgacaacatgaccgatggggtggctgagcctatgcatggctcgctcgccggggtcaaactgtcgtcacaacaagcg

SEQ ID NO: 5726 - DNA, 3306 bp, synthetic construct
  misc_feature 1..3306: note = source = /note="Description of Artificial Sequence: Synthetic coding sequence"
  source 1..3306: mol_type = other DNA
atgttccagttgcccgtgaacaatctcggctcccttagaaaggctagaaaaacggttaagaaaatcctgtcggatatcggcctggaatactgcaaggagcatattgaggactttaaacagtttgaaccaaacgatttctaccttaagaacactacttgggaagatgttggtctgtgggatccgtcgctgacgaagaatcaggactaccggaccaaacccttctgttgctcggcatgcccattctcgtcgaagttcttctccgcttacaaatcgcacttccggaatgtgcactcggaagattttgagaacaggattctgctcaattgcccgtactgtaccttcaacgctgataagaaaaccttggaaactcacattaagatcttccacgcgccaaatgcctccgcgccgtccagctcgctcagcaccttcaaagacaagaataagaacgatggattgaaaccgaagcaagcagactcagtcgaacaggccgtgtattactgcaagaaatgcacctaccgggacccattgtacgaaattgtgcggaaacacatctatcgggagcatttccaacacgtggcggccccatacatcgctaaggcgggagaaaaaagcctgaatggagccgtgcctttgggaagcaatgctagggaagaatcctcgatacattgtaagcggtgcctgtttatgccaaaatcctacgaggccctcgtgcagcatgtcatcgaggaccacgaacgcatcggataccaggtgactgccatgatcggacataccaacgttgtggtcccacgcagcaaaccgctcatgttgatcgcccctaagccgcaggacaagaagagcatgggcctgcctccgcgcatcggcagcctcgcatcaggaaatgttagaagcctgcccagccaacagatggtcaaccgcctgtcgatcccaaagccgaaccttaactcgaccggcgtgaatatgatgtcgagcgtccaccttcagcagaataactacggagtcaagtcggtcggccaggggtactcggtcggacaatcaatgagactgggtctgggaggcaatgctccggtgtccattccgcagcagtcacaaagcgtgaagcaactgctcccgtcaggaaatggcaggtcgtatgggctggggagcgaacagaggtcccaagcccctgctaggtactcacttcagtccgctaacgcctcgtcgctgtcgtcgggacaactgaagtcaccgtcgctctcccaatcgcaagcgtcaagagtcctggggcagtcatccagcaaaccagcggcggctgcaactggaccgccgcctggtaacacctcgtctacccagaagtggaagatctgcactatctgcaacgaattgtttccagagaacgtgtacagcgtgcattttgagaaggagcataaggcggaaaaagtcccggcagtggccaactacatcatgaagatccataactttacttcgaagtgtctgtactgcaacaggtacctgccgactgataccctgcttaaccatatgctgatccacggcctcagctgcccgtactgcagaagcaccttcaacgacgtggaaaagatggcagcacacatgcgcatggtgcacatcgacgaagaaatgggccccaagaccgactccaccctgtcgttcgacctcactctgcagcaaggatcccacactaacatccatctgttggtcacgacctacaacctgcgtgatgctccggcagagtccgtcgcttaccacgctcaaaacaacccacccgtcccgccgaaacctcaaccaaaggtgcaagaaaaggcagatatccctgtcaagtcatccccgcaagccgccgtgccttacaaaaaggacgtgggcaaaactctgtgcccgctctgcttttcgatcttgaaggggccaatctcggacgctctggcccatcatctgcgggagcggcaccaagtgatccagacggtgcacccggtggagaaaaagctcacctacaagtgcatccactgtctgggggtgtacacttcgaacatgactgcctccaccattactctgcatctcgtgcattgtcggggcgtcggaaagactcagaacgggcaagacaaaaccaatgccccatcgaggctgaatcaatccccctcactggctccggttaagcgcacctacgaacagatggagttcccccttctgaagaaacggaagctcgacgacgactccgattcgcccagctttttcgaggaaaaacccgaagagccagtggtgctcgcccttgacccgaagggacacgaggacgattcgtacgaggctagaaagtcctttttgactaaatacttcaataagcagccataccctacgcgacgagaaattgaaaagttggcggcatccctctggctctggaaatccgacattgcgtcacacttctcgaacaagaggaagaaatgcgtgcgagactgcgaaaagtacaagccaggtgtcctgctgggatttaacatgaaggaactgaataaggtgaagcacgagatggacttcgatgctgaatggctcttcgaaaaccacgatgaaaaggactcccgcgttaatgcatcaaagactgctgataagaagctcaacctcgggaaggaagatgacagcagctccgactccttcgagaatcttgaagaagaatctaacgaatctggctcgccatttgacccagtttttgaagtcgagccaaagatctcaaatgacaacccggaagaacacgtgctgaaggtgatcccggaggacgcttccgagtccgaggagaagctggatcagaaagaagatggatcgaaatatgaaaccatccacttgaccgaagagcccaccaagctcatgcataacgcatccgattcagaggtggaccaggacgacgtggtggaatggaaagacggtgcctccccttctgagtccggcccgggatcccagcaagtgtcagacttcgaagataatacttgtgagatgaagccgggcacttggagcgatgaatcgagccagagcgaagatgctcggtcaagcaagcctgccgctaagaaaaaagcaacgatgcagggagacagagagcagctcaaatggaagaactcctcatatggaaaggtggagggtttttggtcaaaggatcagtcccagtggaagaacgcctcagagaacgacgagcgtctgagcaatccgcaaatcgagtggcagaactccactatcgatagcgaggacggtgaacagttcgataacatgaccgatggagtcgccgagccaatgcacggaagcctcgccggggtgaaactgtcctcacagcaggcc

SEQ ID NO: 5727 - DNA, 3306 bp, synthetic construct
  misc_feature 1..3306: note = source = /note="Description of Artificial Sequence: Synthetic coding sequence"
  source 1..3306: mol_type = other DNA
atgttccagttacccgtgaacaacctgggctctttgaggaaggcccgaaaaaccgtgaagaaaattctgtccgacattgggttggaatactgcaaggaacatattgaggatttcaagcagttcgaaccaaatgatttctacctaaagaataccacctgggaggatgtcggcctgtgggatccgagcttgacaaaaaatcaggactatcgtaccaagccgttttgttgctcggcatgccctttcagctctaagtttttttctgcttacaaatcccatttcagaaatgtgcattccgaggacttcgaaaatcgcatcttactcaattgcccttactgtacctttaacgcagataaaaagacgctcgagacacatatcaagatattccatgcaccaaacgcttccgccccctctagcagcctgagcacattcaaagataagaacaagaatgatggtctcaaaccaaaacaagccgactcagtagagcaggctgtgtattattgcaaaaaatgtacctacagagaccccttatacgagatcgtaaggaagcacatctaccgcgagcacttccagcacgttgccgccccctacatagcaaaggccggcgagaaaagcttgaatggagcagtgccgctgggcagcaatgcaagagaggaatccagcattcattgcaagaggtgcctgtttatgccaaagtcttatgaggctctcgttcagcatgtgatcgaggatcacgaaaggattggataccaggtaactgccatgataggccacactaatgtagtcgtgcccaggagcaagcccctgatgctgatcgcacctaaacctcaggataaaaagagcatgggtctccccccccgcatcgggtctctcgcatccgggaacgtgcgctcattgccgtcacagcagatggtgaacaggttgagtatcccaaagccaaatctaaactcaaccggtgtaaatatgatgagtagcgtgcatttgcagcaaaataactacggtgttaagagcgtgggtcaaggttattcagtagggcaatcaatgagactgggactgggtggtaatgctccagtctctattccccagcagagccagtccgtcaaacagctgttgcctagtgggaacggacggtcatacgggctggggagcgagcagcggtcccaggcccctgcccgctacagtctgcagtccgcaaacgcatccagcctgtcctcgggtcagctgaagtccccttcacttagccagtcgcaggccagccgcgtgctcggccagagcagctcgaaacctgctgcggcagcgactggaccgccgccaggaaacacaagctccacacagaagtggaagatttgtactatttgcaacgagctcttcccggagaacgtgtatagcgtgcactttgaaaaggagcataaagctgagaaggttcctgcggtagctaattatataatgaagattcacaatttcacctcgaaatgtttatattgtaacagatacctgcctaccgacacgttacttaaccatatgttgatccacggattgagctgcccctactgtagatcgacttttaatgatgtggagaagatggcggcacacatgagaatggtgcatattgacgaggaaatggggccaaaaacagacagtacccttagtttcgaccttacactgcagcagggctcccataccaatatccacctgctagtgacaacatacaacttacgcgatgctcccgccgaaagcgtggcttaccatgctcagaacaacccaccagtgcctcctaagccccagcccaaggtccaggaaaaggcagatatcccggtgaagtctagcccgcaggcagctgtgccgtataagaaagatgtgggaaagacactttgtcctctgtgctttagtattctgaaaggcccaatttctgatgctctagcacaccaccttagggagcgccaccaagtgattcagacggtgcatcccgtcgaaaaaaagctcacgtacaaatgtatccattgcttgggcgtgtacacgagcaatatgaccgcttccactataactctccacctggtgcactgtcggggcgtgggtaagactcaaaatgggcaggataagaccaacgcaccaagccgcctgaatcaaagtccttcactggcccccgtgaagaggacctatgagcagatggaatttccactcctgaaaaaaaggaaattggacgacgattcagattctccttcctttttcgaagaaaagccagaagagcctgtggtcctggcccttgaccctaagggccatgaggatgacagttatgaggcccgtaagtcgtttctgacaaaatacttcaataagcagccctatcctacccgtcgcgaaattgaaaaactggccgcctcactctggctgtggaagtcagatatagcatcacattttagcaataaaaggaaaaagtgcgttcgcgattgcgagaagtataaacccggggtgctgctcggcttcaacatgaaggaactgaacaaagtgaagcatgaaatggatttcgacgctgaatggctattcgaaaaccacgatgagaaggactcccgcgtaaacgcctcgaagaccgccgacaaaaagctgaatctcgggaaggaagacgacagttcttcagactcctttgagaatcttgaagaagaatcaaacgagtccggttcaccattcgatccagtgttcgaggtagagccaaaaatttccaatgataacccagaggagcatgtgctgaaagtgatccctgaagacgcctcagagtctgaggagaaattggaccaaaaagaggatggatccaaatatgagactattcatctaactgaggaacctacaaaactgatgcacaacgcatcagactccgaggtagatcaggacgacgtcgtggaatggaaagacggcgcctccccgtccgaatctggcccagggtctcaacaggtgagtgactttgaggacaacacttgtgaaatgaagccaggtacatggtcagatgagtcatcccagtccgaagacgcccggagttccaagcctgcggccaagaaaaaggctacaatgcagggagaccgcgagcaactaaaatggaagaactccagctatggcaaagtggagggtttctggtccaaagaccaaagtcaatggaaaaatgccagtgaaaatgatgagcgcctttccaaccctcagatcgagtggcagaattctacaattgactccgaggacggcgagcagttcgacaacatgacagacggggttgccgagccgatgcacggcagccttgccggcgttaagctctcttcacagcaggca

SEQ ID NO: 5728 - DNA, 3306 bp, synthetic construct
  misc_feature 1..3306: note = source = /note="Description of Artificial Sequence: Synthetic coding sequence"
  source 1..3306: mol_type = other DNA
atgttccaactcccagtgaataacctaggctccctaaggaaagctaggaagacggtgaagaaaattctcagcgacatcggtctcgaatactgcaaggaacacatcgaagacttcaaacaattcgagcctaacgacttttacctgaagaacaccacgtgggaggacgtaggactgtgggatccatctctcacgaagaaccaggactatcgcactaagccattctgttgctccgcgtgccctttcagcagtaaattttttagtgcgtataagtcccacttccgcaatgtgcactcggaggatttcgagaaccgtatcctgctgaactgtccctactgtacgtttaacgccgacaagaaaacactggaaacgcacataaaaatctttcacgctcctaatgcaagcgcgccctcgtcatctctcagcacttttaaagataaaaataagaatgatggcctgaaacctaaacaggctgatagtgttgagcaggccgtatattactgcaagaagtgtacgtaccgtgacccattatacgagattgttcgtaaacacatatatcgagagcacttccagcatgtggccgccccgtatattgccaaggctggcgaaaaatcgttaaacggagccgtcccactggggtccaatgctcgagaagaaagctctattcactgcaagcgctgcctgtttatgcccaagagctatgaagctttggttcagcacgtgatagaagatcacgagcgtattgggtaccaggtcaccgcgatgatcggccataccaacgtggtggtgccccgatcgaaacccctgatgctgattgcacctaaaccccaggataagaaatctatgggactgccgccgagaattggctccctggcatctggaaacgtgcgttctcttccatctcaacagatggtcaaccgcctctctatccctaagccaaatctaaactcaaccggcgtaaacatgatgtcatcagttcatctccagcagaataactacggcgtgaaaagtgtcggtcagggctactcagtagggcagagcatgagactgggcctaggcggtaatgcacctgtatcaatcccacaacagtcacagtctgtgaagcagttgcttccttccgggaatggccgttcatacggtctgggaagtgagcagcggtctcaggccccagcgcgctactctctgcaatccgcaaacgcctctagtttgagctccggccagttgaagtcgccaagcctttcccagtcccaggcatcacgcgtgctcggacaaagctcgagcaagcccgccgctgctgcaacaggaccgccgcctgggaacacctcttctacccagaagtggaaaatatgcactatctgcaatgagctgtttccggagaacgtatattccgtccattttgaaaaggagcacaaggccgagaaagtgcctgctgttgctaattatatcatgaagatccacaatttcacaagcaaatgcctgtattgtaataggtatctacccacggataccctgctgaaccatatgttgatacacgggctcagctgtccatactgccggtccaccttcaacgatgtggaaaagatggccgcgcacatgcgcatggtacacattgacgaggagatgggaccgaagactgactcaaccctgagcttcgacctaactttacagcaggggagccatactaatatacacctcctcgtcaccacctacaacctgagggatgccccggccgaatccgttgcatatcacgcccagaataaccccccagtgcctcccaaaccacagccgaaagtccaggagaaagccgacattccggtgaagtcttctcctcaggccgctgtcccctacaaaaaggatgttggcaagaccctgtgtccattgtgtttctcaatccttaagggtccaatcagtgacgcactggcacaccacttaagagagaggcatcaggtgatacaaacagtccaccccgtggagaaaaaacttacatacaagtgcatccattgtctgggcgtgtacacttccaacatgacggcgagcaccataaccctccacctcgtccattgccgaggcgtgggcaaaacgcagaatgggcaggacaagacaaacgcaccttccaggctgaaccagagccctagcctggcccctgttaaacggacctatgagcaaatggagtttccgctgcttaagaaaaggaaactggacgatgatagcgactctcctagtttctttgaagaaaaaccagaggagccagtggtcctggccctagacccgaaggggcacgaagacgacagctacgaggcaaggaaatcctttcttacaaagtattttaacaaacagccttatccaactcggcgagagattgagaagctcgcggcgagcctttggctatggaaatcagacattgccagccacttttctaacaaacgaaaaaagtgtgtgagggactgtgagaagtacaaaccaggagtcttgctgggcttcaatatgaaagaactaaataaagttaagcatgagatggatttcgatgcggagtggctgttcgagaatcatgacgagaaggactcacgtgtcaatgctagtaaaacagccgacaagaagctaaatctcggaaaagaagacgacagcagctccgatagtttcgaaaacctcgaagaggagtcgaacgaatctggctctcctttcgatccagtgttcgaggtggagccaaagatatcaaacgacaacccagaagaacacgtgctcaaggttatccctgaagatgctagtgagagcgaggagaagcttgatcagaaagaggatgggtcaaagtacgagacgatccatctgaccgaagaacccacaaaactgatgcataatgcttctgattccgaagttgaccaggacgacgtggtggaatggaaggatggggcctctccctccgagtccggacctggaagtcagcaggtgtctgacttcgaagacaacacctgtgagatgaagcctggaacatggtctgatgaatccagtcagagcgaagacgcacggtccagcaaacctgccgcgaaaaaaaaagcaacaatgcagggggatcgcgaacagctgaaatggaagaatagctcctatgggaaggttgaaggcttttggagcaaggatcagagtcaatggaagaatgcttcagaaaacgacgagagactgtctaacccacaaatcgagtggcagaattcgactatagattctgaggatggagaacaatttgacaacatgaccgatggcgtggcagagccaatgcatggcagcttagcaggcgtgaagctgtcgtcccagcaagcc

SEQ ID NO: 5729 - DNA, 3306 bp, synthetic construct
  misc_feature 1..3306: note = source = /note="Description of Artificial Sequence: Synthetic coding sequence"
  source 1..3306: mol_type = other DNA
atgtttcagctgcctgtaaataacttaggcagcttgcgcaaggccagaaagactgtcaagaagatcctctccgacatcggactggagtactgcaaggaacatatagaagatttcaagcagttcgagccgaacgacttctatctaaagaacaccacctgggaagacgtgggactgtgggacccttccctgactaaaaatcaggactataggaccaaaccattctgctgctcagcatgtccattttcttccaagttcttttccgcgtataagagccacttcaggaatgtgcactccgaagacttcgagaataggattctgctcaactgcccctattgcactttcaatgccgataaaaaaactctggaaacccacatcaagatctttcacgcaccaaatgcctctgcccccagctcttccttgtcaacctttaaagacaaaaacaagaacgatgggttgaagccaaagcaggccgatagtgtggaacaggccgtttattattgtaagaaatgtacgtatcgggaccctctctatgagattgtccgcaaacacatttaccgcgaacattttcaacacgtggcggctccctatatagctaaagccggggaaaaaagtttaaatggtgctgtgccactcgggtctaatgccagggaggagtctagcatccattgtaagcggtgtctgtttatgccaaaatcctacgaagctttagtgcaacacgtcattgaagatcacgagagaattggatatcaggtgactgccatgatcggtcatacaaacgtagttgtcccccggtctaagccgctcatgctgattgctcccaaacctcaggacaagaagagcatggggctcccaccccgtatcgggagcctggcaagtggaaacgtcaggtctctgccaagccagcaaatggtgaatcgcctaagcataccgaaacccaatttaaacagtaccggcgtgaatatgatgagcagcgttcacttgcagcaaaataactacggcgtcaaatcagtgggccagggatatagcgttggccagtcgatgcgactcggtcttgggggaaacgctccagtgtccataccccagcaatctcagagtgtgaaacaacttctgccaagcggaaacggcagaagttacggactgggctctgagcagcgctcgcaagctccagcgcgctattccctgcagtctgctaacgcaagtagtctttcgagtggacaactgaagtctccaagtttgagccaatctcaggccagccgggtgttgggacagtcctcatctaagccagccgctgctgccaccgggccgccgcccggcaatacatccagcactcaaaagtggaagatttgcactatctgcaacgaactgttccccgagaatgtttactccgtgcactttgagaaggaacataaagccgagaaagtgcctgctgtggccaactacatcatgaagattcataatttcaccagtaaatgtctttactgcaaccgatacctgcctactgatacccttctgaaccatatgctgatccatggtctgagctgcccttattgcagatcaacttttaacgatgtcgagaaaatggccgcgcacatgcggatggtccacatagatgaggagatgggtccgaagactgactcaaccttaagcttcgacttaaccctgcagcaagggtcccataccaacattcacctcctggttactacttataacctgcgggacgcaccagcagagtcagtggcataccacgctcagaacaacccccctgttcctccaaagcctcagcctaaggttcaggagaaagctgatatacctgtgaaaagtagccctcaggccgctgtgccttataaaaaggacgtgggaaaaacactgtgccccctgtgtttctcaatcctcaagggacccatttctgacgcactcgctcatcatctgcgtgaacgtcatcaggtgattcagacagtgcaccccgtggagaagaaactcacttacaagtgtatccattgcctgggggtgtacactagtaatatgacggcctccacaataacgctgcatctcgtacattgtagaggagtggggaaaacacagaatggtcaggataagacgaatgccccttcacggctcaaccagtccccctctttggcccctgtaaaaagaacctatgaacagatggaatttcctttgctgaagaagagaaagctggacgacgactccgacagcccttctttcttcgaggagaaaccagaggagccagtcgtgctggccctggaccctaaagggcacgaggacgactcctacgaggcccgcaagtcctttctcacgaaatactttaacaagcagccctatccgacaagacgggagatcgaaaaacttgccgccagcctttggctgtggaagagtgatattgcttcccactttagcaacaagagaaaaaagtgtgtgcgggactgtgagaagtacaagcccggcgtactgcttggattcaacatgaaggaactgaacaaagtgaaacatgaaatggatttcgacgcagagtggctgttcgaaaaccacgacgagaaagattcaagagtgaatgccagcaagaccgcagataagaaacttaatttgggcaaagaagatgactcttcctccgattctttcgagaatttggaggaagagtcaaacgagtcaggtagtccatttgatcctgtgtttgaggtggagcctaagatcagcaacgacaatcccgaagagcacgtgttgaaagtgattcctgaggatgcaagtgagagcgaggagaagttggatcagaaagaggatggtagtaaatatgaaacgattcacctgaccgaggagcctaccaaactgatgcataatgcatccgatagtgaggtggaccaggacgatgtcgtcgagtggaaagacggtgctagtccgagtgaatccggccctggctcccagcaggtgtccgatttcgaggacaacacttgcgagatgaagccaggaacctggtcagacgagtcatcccaaagtgaggacgccaggtcctctaagcccgccgctaagaaaaaggcaaccatgcagggggacagagaacagctgaagtggaagaattctagctacggcaaagtcgaaggcttctggagcaaggaccagagccagtggaagaatgcgtccgagaacgatgagagattaagcaatccacagatcgaatggcagaatagcacaattgactctgaagacggcgagcaatttgataacatgaccgatggagtcgcggagcctatgcacggctcactggcgggagttaagctgtcgtctcagcaggcg

SEQ ID NO: 5730 - DNA, 3306 bp, synthetic construct
  misc_feature 1..3306: note = source = /note="Description of Artificial Sequence: Synthetic coding sequence"
  source 1..3306: mol_type = other DNA
atgtttcagcttccagtgaataatctgggcagcctgcgtaaggcaagaaaaactgtgaagaagattctgtcagatataggacttgaatactgtaaagaacatatcgaggactttaagcaattcgagccgaacgatttctacctcaagaacactacctgggaggacgtcggtctgtgggacccatccttgaccaaaaatcaagactatcggactaagccattttgttgctccgcatgtccattctcatcgaaattctttagcgcttacaagtcgcattttagaaacgtgcacagcgaagatttcgaaaacagaatcctgctcaattgtccctactgcacctttaacgcagacaaaaagaccctcgagactcatatcaagatctttcatgctccaaacgcatcggcaccatcctcttccctttccaccttcaaagacaaaaacaaaaatgacggccttaagcctaagcaagcagactcagtggaacaggccgtgtactactgcaagaagtgtacgtacagggaccctctttatgagattgtgcggaagcatatctatcgcgagcatttccagcatgtcgcggcgccctacattgcaaaggcaggtgagaaatcgcttaacggtgcggtgccccttggaagtaacgcaagagaggaatcatccatccattgtaagaggtgtcttttcatgccaaagagctacgaagcactggtgcagcacgtgatagaagatcacgagaggataggttatcaagtgactgccatgatcgggcataccaacgtggtggtcccaaggtcaaaacctttgatgctgatcgcacctaagcctcaggacaagaagagcatggggcttcctccaagaatcggtagcctggcaagcggtaacgtcagatccctcccaagccagcagatggtgaacagactgtccatccctaaacctaacctgaattccaccggagtgaatatgatgtcatcagtccatcttcagcaaaacaactacggagtgaagtcagtcggtcaaggttactcggtcggtcaatcaatgcgcctggggctgggaggaaatgcacctgtgtccattcctcaacaatcgcaatcggtgaaacaactgctcccatccggaaacgggagaagctacggtctgggatcagagcagagaagccaggcacctgcacgttacagcctgcagtccgcaaacgcatcgagcctttcgtcgggtcagctcaagtcaccctcactcagccagagccaagcctcccgagtgttgggtcagtcatcgtccaagcctgcagccgcagccaccggtccgccaccaggaaacaccagctcgactcaaaagtggaagatatgtactatctgtaatgagctgtttcctgagaacgtgtactcggtgcattttgaaaaggaacataaggccgaaaaggtgcccgctgtggcaaactacatcatgaagatccataactttacctccaagtgcctgtactgtaaccgctaccttccgaccgatacccttttgaatcatatgcttattcacggtctttcctgtccgtattgtcgctccactttcaatgacgtggaaaagatggccgcccatatgcgcatggtccatatagatgaggaaatgggacctaagaccgactcgaccctgagcttcgatctgaccttgcaacagggtagccataccaatattcaccttctggtgacgacctacaacctgcgagatgcacctgctgagtccgtcgcataccatgcacaaaacaatcctcccgtgccaccaaaaccacagcctaaggtccaagaaaaggcggatattccggtgaagtcctcacctcaggcagccgtgccatacaagaaggatgtcgggaaaacgctctgtcccctgtgttttagcattctgaagggacctatctccgacgcccttgcacatcatcttcgggaaagacaccaagtcatccagactgtgcatcctgtcgagaagaagctcacctacaaatgtattcactgtcttggcgtctatacctcgaacatgactgcctcgacgatcaccttgcaccttgtccattgtagaggagtcggaaagacccagaatggccaagataagaccaacgcaccctcgagattgaatcaaagtccttcgctggcaccagttaagcggacctacgaacaaatggaattcccactccttaagaaaaggaagctggacgacgattctgattcccctagcttctttgaagaaaaaccagaggaacctgtcgtcctggccctggacccaaagggccatgaagatgattcctacgaggcccggaagtccttcctgactaagtacttcaataaacaaccttaccctactcgccgtgaaattgaaaagctcgctgcctccctttggctgtggaagtccgacatcgcctcgcacttttcaaataagaggaaaaagtgtgtccgggactgtgaaaagtataaaccaggagtccttcttggctttaacatgaaggaacttaacaaggtcaagcacgagatggactttgatgcagaatggctttttgaaaaccacgacgagaaggattccagggtgaacgcaagcaaaaccgccgataagaagttgaatctgggtaaggaggacgattccagctccgacagctttgagaacctcgaagaagaatccaacgaatctgggtcaccctttgatcctgtgtttgaagtcgagcctaagatttcaaacgataacccagaagagcacgtgctgaaggtgattcctgaggatgcatcggaatctgaagagaaacttgatcagaaggaggatggatcgaaatacgagacgatccatcttactgaagaacctaccaagctgatgcacaacgcatccgattcggaagtggatcaggatgatgtcgtggaatggaaggatggggcatcaccatctgagtcgggacctggatcgcaacaagtctccgatttcgaagataacacctgcgaaatgaagcctggtacttggtcggatgagtcgtcgcaaagcgaagatgctaggtccagcaaacctgctgcgaagaaaaaggccaccatgcaaggagatagggagcaactgaagtggaagaattcgtcatacgggaaagtcgaagggttttggtccaaggatcagtctcagtggaaaaatgcgtccgaaaacgacgagcgtctgtcaaacccacaaatcgagtggcaaaattcgacgattgattctgaagatggagaacagttcgataacatgaccgacggagtggcagaacccatgcacggctcactggcaggtgtgaaactttcgtcgcagcaggca

SEQ ID NO: 5731 - DNA, 3306 bp, synthetic construct
  misc_feature 1..3306: note = source = /note="Description of Artificial Sequence: Synthetic coding sequence"
  source 1..3306: mol_type = other DNA
atgttccagctgccagtcaataatctgggtagcctccgcaaggcccggaaaaccgtgaagaaaatcttgtcagatatcggactcgagtactgtaaagaacatatcgaggacttcaagcagttcgaacccaacgatttttaccttaagaacacgacttgggaggacgtggggctgtgggatccgtccctgaccaagaatcaagactaccggactaagccgttttgttgctccgcatgcccgtttagctcgaagttcttttccgcgtacaagtcccacttcaggaacgtgcactctgaggacttcgagaaccggatcctcctcaactgcccgtactgtacttttaacgctgataagaagacccttgagactcacatcaagatcttccacgcaccgaacgcctctgccccgagctcgtccctgtcaacttttaaggacaaaaacaaaaacgatggcttgaagcctaaacaggccgactcggtggaacaggcagtgtactactgcaagaaatgcacctacagagatccgctctacgagatcgtgcgaaagcatatctaccgggagcactttcagcatgtggcagcaccctacatcgccaaggccggagagaagtccctcaatggagctgtgcctctgggatccaacgctcgcgaggaatcctccatccactgcaagagatgtctgtttatgccaaagtcctacgaagcgctggtgcaacacgtgatcgaagaccacgagcggatcgggtaccaggtgacggccatgatcggacacacgaatgtggtggtcccgcgcagcaagcccctgatgctcattgcgccaaagccgcaggataagaagtccatggggctcccgccacgcatcgggagcctggcttccggcaacgtgagatccctcccctcgcagcagatggtcaaccgcctttccatccccaagcccaacctcaactcaaccggtgtgaacatgatgtccagcgtgcatctgcagcagaacaattacggagtcaagtcagtgggtcagggctactcagtgggacagtccatgaggctgggactgggaggaaacgcaccggttagcatccctcagcagtcgcagtcggtgaagcaactgttgccgagcggaaatggaaggtcctacggactgggatcggaacaacggtcacaagcacctgcgcggtactcgctgcaatcggcgaacgcgtcctctctcagcagcggccaactgaagtccccgtcgctctcgcaatcgcaggcctcgcgcgtgctcggacagagctcgtccaagccagcagcggccgccaccggacctccgcctggaaacacgagtagcactcagaaatggaagatctgcactatttgcaatgagttgttcccagaaaacgtgtactccgtacacttcgaaaaagagcacaaggcggaaaaagtccctgcagtcgcaaactacatcatgaagatccacaactttacctcaaagtgcctgtactgtaaccgctacctgcccaccgacaccctgctcaatcatatgttgatccacggcctgtcttgtccgtactgcaggtccaccttcaacgacgtggaaaagatggccgcccacatgcgcatggtccatatcgacgaagaaatgggccccaagacggatagcaccttgagcttcgacttgacccttcagcagggttcacataccaatattcatctgttggtgaccacttacaacctgagagacgccccggcggagtccgtggcctaccatgctcagaacaatcctcctgtgccaccgaagcctcaacctaaggtccaagaaaaggcggatatcccagtcaaaagctcccctcaagctgcggtcccatacaagaaggacgtcgggaaaaccctttgtccgctctgtttctccatccttaaggggccaatctcggacgcccttgcccatcatttgcgggaacggcaccaagtgattcaaaccgtgcaccctgtggagaagaaattgacttacaaatgcatccattgcctcggggtctacacctcgaatatgacggccagcactatcaccctccacctggtgcactgtcggggagtcggaaagactcagaacgggcaggataagaccaacgccccctcccggctgaaccagagcccaagcctggccccagtcaaacgcacttacgagcaaatggaattccccctgctgaagaagcggaagctcgacgatgactctgactcgccatcattctttgaagagaagccggaggaaccggtggtgctcgcgctcgaccctaagggccacgaggacgactcatacgaagccaggaagtcgttccttactaaatacttcaataaacagccttacccgactcggcgcgagatcgagaagctggccgcctccctgtggctgtggaaatcggacatcgcctcacacttctccaataagcggaagaagtgcgtccgggactgcgaaaagtacaagccgggggtcctcttgggcttcaacatgaaagaactcaacaaggtgaagcatgaaatggattttgacgccgagtggctgttcgagaatcatgacgaaaaggactcccgcgtcaatgcgtccaagaccgccgacaaaaagctgaacctcgggaaagaagatgactcctcgtctgactcattcgaaaacctggaagaagaatccaatgaaagcggtagtccgttcgatcccgtgttcgaggtcgaacccaagatcagcaatgacaacccggaggaacatgtgctgaaggtgatcccagaagacgcatccgaatcagaagaaaagctggaccaaaaggaagacggaagcaaatacgaaacgatccatctcaccgaagaacctaccaagctgatgcataacgcaagcgactcggaagtcgaccaggacgacgtcgtggagtggaaggacggggcctccccatcggagtccggacctggatcacaacaggttagcgatttcgaggataacacttgtgaaatgaagccgggaacctggtccgacgagagctcgcaatccgaggatgcgcgctcgtcgaaaccggcagcgaagaagaaggccactatgcagggggacagagaacaactcaagtggaagaattcctcatacggaaaagtggaaggcttctggtcaaaggatcagtcgcagtggaagaacgcctcggaaaatgatgaacgactgagcaatccgcaaatcgaatggcagaactcaaccatcgattccgaagatggtgagcagttcgataacatgactgacggtgtcgcggaaccgatgcacgggtccctggccggagtcaagctctcaagccaacaagct

SEQ ID NO: 5732 - DNA, 3306 bp, synthetic construct
  misc_feature 1..3306: note = source = /note="Description of Artificial Sequence: Synthetic coding sequence"
  source 1..3306: mol_type = other DNA
atgttccagttgcctgtgaataacctggggagcctgcgcaaggctaggaagactgtgaaaaagatcctcagcgatatcggcctggagtactgcaaggagcatattgaagattttaaacagtttgagccaaacgatttctacctcaaaaacaccacctgggaagatgtgggcctctgggatcccagcctaacaaaaaaccaggattatcggaccaagcctttttgctgctctgcttgtcctttcagctctaaatttttctccgcatacaagtcccattttaggaatgtacactcggaggacttcgagaaccgcattctcctgaattgcccttactgcacatttaatgctgataagaaaaccctggagacccatataaagatttttcacgcccctaacgcctccgctcctagcagctcactcagcacttttaaggacaaaaataaaaatgatggactcaaacccaagcaggctgactcagtcgagcaggcggtgtactactgcaaaaagtgcacatatcgcgaccctttgtacgaaatcgttagaaagcatatttatagagagcattttcaacatgtggctgccccatacatagccaaggcgggagagaagtctctgaatggcgcggtccccctcggatcaaatgctcgcgaggagtctagcatacactgtaagagatgtctgttcatgcccaaatcttatgaagcattggttcagcacgtaatagaggaccatgagcgcatcggatatcaagtgacagcaatgatcgggcataccaatgtggtagtgcccaggtccaagccactcatgctgatcgcgccaaagccccaggataaaaagtctatgggactgccccccaggattggcagcctcgcaagcggaaacgtgcggagccttcccagccaacaaatggtcaaccgcctgagtatccctaaaccaaacctgaatagcacgggcgtgaatatgatgagcagcgtccacttacagcagaacaactatggagttaaatctgtaggtcaaggttacagtgttggccagagtatgcgtctggggttaggtggcaacgccccagtttccattccgcagcaatcgcagtctgtgaagcagctccttccttccggcaatggccgttcatacggcctgggaagcgagcaacggagccaggcaccagcccgctacagtctgcaaagcgcaaacgcttcttctctaagtagcggccagctgaaaagtccatctctatcacagtcccaagcttcacgggttcttgggcagtccagctctaaacctgctgcggccgccaccggaccacctcctggcaatactagctccacacagaagtggaagatttgcaccatttgcaacgagctgttcccagaaaacgtttactcggtccatttcgagaaggaacataaggcggaaaaggtgcccgccgtcgcaaactacatcatgaagatccacaactttaccagtaagtgcctctattgcaacagataccttccaacagacaccctgctcaatcatatgctcattcacggactatcctgtccatactgtagaagcactttcaacgatgtcgaaaaaatggccgcccacatgcggatggtgcacatagacgaggaaatgggccccaaaacagacagcactctcagtttcgatttgactctgcaacaaggatctcacactaacatacacctgcttgtgaccacttacaacttgagagatgccccagctgagtcagtggcctatcacgcccagaacaaccctcccgttcccccaaaacctcagccaaaggttcaggaaaaagctgatattcctgtcaagtcttcccctcaggctgccgttccatataaaaaggacgtcggaaaaacactttgtcccctctgtttctcaatcttgaaggggccaattagtgacgctctcgcacaccacctgagggaaagacaccaggtaattcagacggtgcacccagtggaaaaaaagctgacctataaatgcattcattgtctgggagtctataccagcaatatgaccgcaagcaccattacgctccaccttgtgcattgcaggggcgtcggaaaaactcagaacggacaggataaaacgaatgctcccagccggctcaatcaatcaccatctttggctcctgtcaagcggacctacgaacaaatggaattccctctgcttaagaaaagaaaactggatgatgactccgactcaccttcttttttcgaggaaaaaccagaagaaccagtggtgctcgccttggatcctaaagggcacgaggacgatagctatgaggctcggaagtccttcctgaccaagtacttcaataagcaaccctacccgacgcgccgggaaatcgaaaaactggctgccagcctgtggctgtggaaatctgatatcgctagccattttagcaacaagcgcaagaaatgcgtcagagattgcgaaaaatacaagccaggcgtcctccttggcttcaacatgaaggaacttaacaaagtgaagcacgaaatggattttgacgctgaatggctgttcgagaaccatgatgagaaggactcccgagttaacgcatccaagacggcagataagaaactcaacttgggaaaggaggatgacagcagctcggacagtttcgaaaacctggaggaagaatccaacgagagcggtagccccttcgatcctgtgttcgaggtcgaacctaaaatttcaaacgataacccagaggagcatgtgctgaaggtgattccagaagatgcaagcgaatccgaggagaagttggatcagaaagaggatggcagtaaatacgagacaattcatctgacagaagaacctacaaagcttatgcataacgccagcgacagcgaggtcgatcaagacgacgtagtggaatggaaggatggcgcaagtcctagtgagtccggacccggatcccaacaggtcagcgacttcgaagacaatacctgcgagatgaagcctggaacctggagcgatgaaagttctcaaagtgaagatgcacgctcctccaagcctgccgcaaaaaagaaagctaccatgcaaggagaccgggaacagctgaaatggaaaaattcgtcttacggaaaggtggagggtttctggtcaaaggaccagtcacaatggaagaacgcatcagagaatgacgagagactgagcaaccctcagatcgaatggcaaaactctacaatcgacagcgaggacggtgaacagttcgacaatatgactgatggagtggccgagcctatgcacggatctttggctggcgtcaagctctccagccagcaggca

SEQ ID NO: 5733 - DNA, 3306 bp, synthetic construct
  misc_feature 1..3306: note = source = /note="Description of Artificial Sequence: Synthetic coding sequence"
  source 1..3306: mol_type = other DNA
atgttccaactcccagtcaacaatctcggatcgctgcggaaggcgcgcaagactgtcaagaagatcctttccgatatcggtctggaatactgtaaagaacatattgaagatttcaagcaattcgaaccaaacgacttttatctgaaaaacactacttgggaagatgtcggactgtgggatccatctcttaccaagaatcaagattaccgtaccaagcccttttgctgttcggcctgcccattctcctcgaagtttttctccgcatacaagtcacatttcagaaatgtccacagcgaggatttcgaaaatagaatcctcctcaactgtccatactgtacgtttaacgcagataagaaaactcttgagactcacataaagatattccatgcaccaaacgcatctgcaccgtcgagctcgctgtcgaccttcaaggataagaacaagaatgatggtctgaagcctaaacaggcagattccgtcgaacaagctgtgtactactgtaagaagtgtacgtatcgcgacccgctctacgagattgtcagaaagcacatttaccgggaacacttccaacatgttgcagcgccatacattgcgaaggcaggtgaaaagtcgcttaacggagccgtgccactgggttccaatgcaagagaagagtcatcgattcactgcaagcgctgccttttcatgccgaaatcctacgaggcgctcgtccaacatgtgattgaagatcatgagaggatcggataccaggtgacggccatgatcggacatactaacgtcgtggtgccacggtcgaaacctcttatgctgattgctcctaaaccccaagataagaaaagcatggggctgcctcctcgtattgggagcctcgcctcaggcaatgtgcgttcgttgccttcccagcagatggtgaataggttgtccatacccaagcccaacctgaactccacgggcgtgaatatgatgtcgtccgtgcatcttcagcagaacaattacggtgtcaagagcgtcgggcagggttacagcgtgggccaatcaatgcgcttgggtctgggtggtaatgcaccagtgtccataccgcagcagtcacagtctgtgaaacagcttcttccatccggaaacggccgatcctacggactgggctcggaacagcgctcgcaagcgcctgcgcgatacagccttcaatcggcgaacgcttcgtcacttagcagcggacagctcaagtcccccagcctctcacagtcgcaggcctcgagagtgctgggccagtcgtcctccaagcctgcggcagccgcaacgggtcccccgcctggcaatacctcctcgacccagaagtggaagatttgtactatttgtaacgaactctttccggagaatgtttactcggtgcattttgaaaaggaacataaggctgaaaaagtgcctgcagtggccaactacatcatgaagattcacaatttcacttcgaaatgcctctactgcaaccggtacctccctactgacaccctccttaatcacatgcttattcatggactgtcatgtccgtactgccgctcgacctttaacgatgtcgagaagatggcagcgcatatgcgaatggtccatatagacgaagaaatggggccaaagaccgactcaactctgagcttcgatctcaccctgcaacaaggatcgcataccaatatacatctccttgtcaccacttacaacttgcgcgacgcccccgcagaatctgtggcgtatcatgcgcaaaacaatccaccagtgcctcctaaaccacagccaaaggtgcaggaaaaggcggacattcctgtcaaaagctcgccccaggcagccgttccttacaagaaggacgtcggaaagaccctgtgcccactctgtttttccatcttgaagggaccgatttcggatgcgcttgcccatcacttgcgggaaaggcatcaggtgattcagactgtgcatccagtggaaaagaaactcacttacaagtgcattcactgtctcggcgtgtacacctccaatatgacggccagcactatcacccttcatctggtgcattgtcgaggtgtgggcaaaactcaaaacggacaagataaaaccaatgcaccgagcaggcttaatcaatccccttcgcttgcaccagtgaaacggacttatgaacaaatggagtttccccttctgaaaaagagaaagctcgatgatgatagcgactcccctagcttttttgaagaaaagccggaggagcccgtggtgcttgcactggatcccaagggtcatgaggatgatagctacgaggcacgcaagtctttcctgactaagtacttcaacaaacaaccctacccaacccggcgtgaaattgaaaaactggcggcatcgctctggctctggaagtctgatattgcttcacacttttcaaacaagcggaagaaatgtgtgagagattgtgaaaagtacaagccgggtgtgctcctgggttttaacatgaaggaactcaataaggtcaaacacgagatggattttgacgcagagtggctttttgaaaaccacgacgagaaagacagcagagtgaatgcatccaaaaccgccgacaaaaaactgaatctggggaaggaagatgatagctcctcagattcctttgaaaatctggaagaggaatcgaacgaatccggatcaccttttgaccctgtctttgaggtcgagcctaaaatcagcaatgataaccccgaggaacacgtgctgaaggtgatcccagaagatgcatcagaatcggaggaaaaactggaccaaaaggaggatggctccaaatacgagactatacaccttactgaagaaccaaccaaactcatgcataacgcatcagactccgaggtggaccaagatgacgtggtggaatggaaggatggggcaagcccctcggagtcagggcctggttcgcaacaagtctcagactttgaagataatacttgtgagatgaaacccggtacctggagcgacgagtcctcccaatcggaggatgcgcgctcttcgaaacctgcagcaaagaagaaggcaactatgcaaggagatcgagagcagcttaaatggaagaactcgtcatacggaaaggtcgagggcttttggtcgaaagaccagagccaatggaagaacgcaagcgaaaacgatgaacgcctctcaaaccctcaaattgaatggcaaaactccactatcgactcggaagatggagaacaattcgataacatgactgacggagtggctgaaccaatgcacggcagcttggcgggcgtgaagctgtcatcccagcaggca

SEQ ID NO: 5734 - DNA, 3306 bp, synthetic construct
  misc_feature 1..3306: note = source = /note="Description of Artificial Sequence: Synthetic coding sequence"
  source 1..3306: mol_type = other DNA
atgttccaactgcctgtgaacaatctcgggtcccttcgcaaagctaggaaaactgtgaagaagatcctgtcagacatcggccttgagtactgcaaggagcatatcgaagatttcaagcaattcgaacctaatgatttctatttgaaaaacacgacttgggaggacgtgggtctgtgggacccttcgttgactaaaaaccaggattacagaactaaacctttttgttgcagcgcctgccccttttcgtccaagttcttctcggcctacaagagccacttcagaaacgtgcactccgaagatttcgagaaccgcatcctgctgaattgcccatattgcactttcaacgcggacaaaaagacgctggaaactcacatcaaaatctttcacgcaccgaatgccagcgccccgtcctcgtccctttccactttcaaggacaagaacaagaatgacggtcttaagccaaagcaagccgacagcgtggagcaggcagtctactactgcaagaaatgcacctaccgcgaccctctctacgaaatagtccgcaagcacatctaccgcgagcatttccaacatgtcgccgcgccgtacatcgccaaagccggagaaaaatcactcaacggagctgtgccgctcggctcgaatgctagagaagaatcctccatccactgcaagcggtgcttgttcatgccgaagtcgtacgaagccttggttcagcatgtcattgaggaccatgagcgcatcggttaccaagtgactgctatgatcggtcatactaatgtcgtggtgccaagatcgaagccgttgatgctgatcgcccccaagccgcaagataagaagtcaatgggcctgccgccgcggatcggatcgctggcgtccggcaacgtgaggtcgctgccgagccaacagatggtcaatcgcctttcaatcccgaagccgaacttgaactcgactggagtgaacatgatgtcctccgtgcacctccagcagaacaactatggagtgaagtctgtgggacagggatacagcgtgggacagtctatgcgcctgggcttgggaggaaatgcaccagtttccatcccccagcaaagccagtcggtgaagcagcttctcccgagcggcaacggtcggtcgtacgggctcggatcggagcaacggtcacaggcgccagctcggtattcgttgcagtccgcaaacgcttcttccctgtccagcggacagctgaaatccccatcactgtcacagagccaggcttctcgcgtcctcggacaaagctcatctaagcctgctgcggctgccactgggccaccgccaggcaacaccagcagcacccaaaagtggaagatctgtaccatctgcaacgaactctttccagaaaacgtgtactcggtccactttgagaaggaacacaaagccgaaaaggtccctgccgtggcgaactacatcatgaagatccacaacttcacctccaaatgcctgtactgcaaccgttaccttccaactgacaccctcctgaaccacatgctcattcacggactgagctgcccgtactgtcgctcgactttcaatgatgtggaaaagatggccgctcatatgagaatggtgcatatcgacgaggagatgggaccgaaaacggacagcaccctctcttttgacctgaccctgcaacaaggctctcataccaacattcacttgctcgtcaccacctacaatctgagagatgcccctgccgaatcggtggcttaccacgcccagaataatccgcctgtgccgcctaaaccacagccaaaagtgcaggagaaggccgacatccccgtgaagtcctcgcctcaggcagccgtcccatacaagaaagacgtgggaaagaccctgtgccctctgtgcttcagcatcctgaaggggcctatttcggatgcacttgcacaccacctgcgcgagagacaccaggtgatccagaccgtgcacccagttgagaaaaagctcacgtacaagtgcatccattgtctgggtgtgtatacgtcaaacatgaccgcctcgactatcaccttgcacttggtgcactgcagaggagtgggaaaaacccaaaacggacaggataaaactaacgccccgtcgcggttgaaccagagcccatccctggctccggtgaaacggacctacgaacagatggagtttcccctcctgaagaaacggaagctcgatgacgacagcgattcgccgtccttcttcgaagagaagcctgaagaaccggtggtgctggccttggacccgaagggccacgaagatgacagctacgaggccagaaaatccttccttaccaagtacttcaacaagcagccgtaccccactcggcgagaaatcgagaagctcgccgcgtcactgtggttgtggaagtcggatatcgcgtcgcacttcagcaacaagcgcaagaagtgtgtgcgggattgcgaaaagtacaagccgggagtcttgctcggcttcaacatgaaggaacttaacaaggtcaagcatgaaatggacttcgacgcggagtggttgtttgagaaccatgacgagaaagactcgagagtgaatgcttcgaaaacggcagataagaagctgaatctgggaaaggaggacgattcgtcatccgattccttcgagaacctcgaagaagaatcaaacgaatcaggttcgccgttcgacccggtctttgaagtggagcccaagatttcaaacgataacccggaagagcacgttctgaaggtcatcccggaagatgccagcgagtccgaggagaagctcgaccagaaggaagatggttccaagtacgaaacgatccatctgaccgaggaaccgactaagttgatgcacaacgcctcagactctgaagtggaccaagatgatgtggtggaatggaaggacggagccagcccctcagaatccgggccggggtcacaacaagtttcggatttcgaggataacacctgtgagatgaagccaggcacctggtccgacgagtcctcgcagagcgaggacgccagatcctccaagccagccgcaaagaagaaagccaccatgcagggagacagggaacagctcaaatggaaaaacagctcgtacggcaaggtcgaaggcttctggtcgaaagatcaatcccaatggaagaacgcaagcgaaaatgacgaacgcctctcgaatcctcagatcgagtggcagaactccaccatcgactccgaagatggggagcagtttgacaacatgaccgacggtgtggcagaacccatgcacggttcgctggcaggagtcaagctcagctcgcagcaggcc

SEQ ID NO: 5735 - DNA, 3306 bp, synthetic construct
  misc_feature 1..3306: note = source = /note="Description of Artificial Sequence: Synthetic coding sequence"
  source 1..3306: mol_type = other DNA
atgttccagttgccggtgaataacctcgggtcattgaggaaggcccgaaagactgtcaagaagattctttcagatattggtctggagtactgcaaagagcatatcgaggatttcaagcagtttgagccaaacgacttttaccttaagaatactacttgggaagatgtgggtctgtgggacccatcactcacgaagaaccaggactacagaactaaacctttctgctgttcagcatgtcccttctccagcaaattctttagcgcgtacaagtcccattttcggaatgtccactcagaagattttgagaatcgaatcctgctcaattgtccttactgtacctttaatgccgacaaaaagactctggaaacccacatcaagatctttcacgctcctaacgcttcagcaccctcatccagcctgagcaccttcaaggataagaataagaacgatggactgaagcctaagcaagccgattccgtcgaacaagcagtgtactactgtaagaagtgcacttacagggaccctctttacgaaatcgtgcgtaagcatatctatcgggaacattttcagcacgtggcggctccatacatagccaaggcaggtgaaaagtcactgaacggagcagtgcccctcgggtcaaacgccagagaagaatcctccattcattgcaagagatgcctctttatgccaaaaagctacgaagcactggtgcagcatgtgattgaagatcacgaaaggattggttaccaagtgaccgcaatgattggtcataccaatgtggttgtcccaagatccaagcctctgatgcttattgctccgaaacctcaagataagaagtccatgggtttgccccctcgaatcggctcgcttgcctccggaaacgtgagatcccttccatcgcaacagatggtcaataggctgtccattccgaaaccaaatctgaatagcactggagtgaacatgatgtctagcgtccacctgcaacaaaacaattacggagtgaagtcagtgggccagggctactccgttggacaatcgatgcgtcttgggctgggcggtaatgcaccagtctcgattccccaacagtcccaatcggtgaagcagcttctcccttccggtaatgggcgctcctacgggttggggtccgagcagaggtcgcaagcaccagctcggtactctcttcaaagcgcgaatgcctcctcccttagctcagggcagcttaagtctccttcgctgagccaatcacaggcttcgcgcgtcctggggcaatcgtcatcaaaacctgcggcagccgcaactggccctccccctggcaatacctcgtcgacccagaagtggaagatttgtactatttgtaatgaacttttcccagagaacgtctactccgtccattttgaaaaggagcacaaggcagagaaagtgccggccgtggccaactacattatgaagattcacaactttaccagcaagtgcctgtactgtaatagataccttcctaccgacaccctgctgaaccatatgctcatccacggacttagctgcccatactgtagatccactttcaacgacgtcgagaaaatggcagcacatatgagaatggtgcatatcgatgaagagatgggtcccaagacggatagcacgctgtcctttgatctgacccttcaacaaggatcgcataccaacattcatctgcttgtcactacttacaacctgcgagatgccccggctgaatccgtggcctaccatgcacaaaacaacccgcctgtccctccaaagcctcaaccaaaggtgcaggaaaaagcagatatccccgtcaagagctcaccacaagcagcagtcccttacaagaaggatgtgggaaagaccctttgcccgctgtgtttctcgatattgaaaggtcctatttcagatgcgctggcgcaccatcttagagagagacatcaagtgattcaaaccgtgcatcctgtcgaaaagaagctgacttacaagtgcatccactgtcttggagtgtacacgtcgaacatgacggcatctactatcacccttcaccttgtgcattgcaggggagtgggaaaaacccagaatggtcaagacaagactaatgcaccctcacggctgaatcaatcgccatcactcgcgccagtgaaacgcacctacgaacaaatggagttccccctcctcaagaagaggaaattggatgacgactccgatagcccttctttctttgaagaaaagccagaagaaccagtcgtcctggcactggatccaaagggtcatgaagatgactcgtacgaggcccgcaagtccttcctcacgaagtacttcaacaaacaaccttacccaacccgcagagaaattgagaagctcgcagcatccctgtggctttggaagtctgacattgcgtcccatttttcgaacaagagaaaaaagtgcgtgagagactgtgaaaagtacaagcctggggtgctgctcggtttcaatatgaaggagttgaataaagtgaagcacgagatggattttgacgcagaatggctttttgaaaaccacgatgagaaggacagccgggtcaacgcgagcaagaccgccgacaagaaattgaatcttggaaaggaagatgacagcagctcggacagcttcgaaaatctcgaagaggagtccaacgagagcggcagccccttcgaccctgtgttcgaagtcgagccaaagatatccaacgacaatccagaggaacacgtcttgaaggtgattcccgaggatgcgagcgaatccgaagaaaaacttgaccagaaggaggacggatcgaaatacgaaaccattcacctcaccgaggaaccaactaaacttatgcataacgcttccgactcagaagtggatcaggacgacgtggtggagtggaaggatggggcctccccgtcagaatcaggaccgggttcacaacaagtgtcggattttgaagataatacgtgtgagatgaaacctggtacgtggtcggatgaatcgagtcagtccgaggacgccagatcaagtaagccagcagctaaaaagaaggccaccatgcagggggacagagaacaactgaaatggaagaactcatcctacggcaaggtggaaggattctggtcgaaggatcaaagccagtggaaaaatgcatctgagaacgatgagaggctttccaatccacagatcgaatggcaaaattcgacgattgactcggaggacggggaacagttcgataacatgactgatggtgtggcagaacccatgcacggtagcctggcaggtgtcaagctcagctcgcagcaagca

SEQ ID NO: 5736 - DNA, 3306 bp, synthetic construct
  misc_feature 1..3306: note = source = /note="Description of Artificial Sequence: Synthetic coding sequence"
  source 1..3306: mol_type = other DNA
atgtttcagcttccggtcaataatcttggcagccttcgaaaggcacgtaagaccgtcaagaagatcctttcggacatagggctcgagtactgtaaggaacatatcgaggatttcaaacagtttgaacctaatgacttctaccttaagaatactacctgggaagatgtgggtttgtgggatccctccctcaccaagaatcaggattaccgtaccaaaccattctgctgctcggcttgcccattttcttcgaaattcttttccgcatacaaatcacactttagaaacgtgcatagcgaagatttcgaaaaccgcattctcttgaactgcccttattgtacctttaacgccgataagaaaactttggagacgcacatcaagatctttcacgcccccaacgcatccgccccatcctccagcctgtcgaccttcaaggacaagaataagaacgacggactcaaacccaaacaagcagattccgtcgaacaggcagtgtattactgtaagaagtgtacgtaccgtgatcctctttacgaaattgtgagaaagcatatctacagggagcattttcaacatgtggcagcaccatacattgccaaggcaggagaaaagtcgctgaatggggctgtgcccctgggctcgaacgcgcgagaggaatcctcaatccattgtaaacgatgccttttcatgcctaagtcctacgaggcgctggtgcagcatgtcatcgaggatcatgaacgcattggataccaggtgactgcgatgatcggccacactaacgtggtggtacctcgttcaaagccactgatgcttattgcacctaagccacaagataagaagtcaatgggtctgccccctcgcattgggtcgctcgcatccggaaacgttaggtcgctgccctcccagcaaatggtgaatagactgtcaatccctaaaccgaatctcaacagcactggagtgaatatgatgtcgagcgtgcacctgcaacaaaacaattatggggtgaagtcggtcggacagggttactcggtgggccagtccatgcgtctcgggttggggggaaatgcgcctgtgtcgatcccacaacagtcgcagtccgtgaagcaacttcttccttcaggaaatggccgttcatacggacttggtagcgaacagaggtcgcaagcgccagcgcggtacagcctccaatcagctaacgcctcatccctgtcgtcaggtcaactcaagtcgccttccctgtcgcaaagccaggcctccagggtcctggggcagtcgtcgtccaaaccagccgcagccgccaccggtccaccccctggaaatactagctcaactcaaaagtggaaaatctgtaccatttgtaatgaactgtttcctgaaaacgtgtactccgtgcatttcgagaaggaacataaggcagagaaggtcccagcagtcgcaaactacattatgaagattcacaactttacttcgaaatgtctttactgtaatcggtatctcccaaccgacaccctgcttaaccatatgctcattcacggcttgagctgtccatattgtcggtcaacctttaatgatgtggaaaagatggcagcacacatgcggatggtgcatattgatgaagaaatgggacctaaaaccgattcaaccctttcctttgacctgactcttcaacaaggtagccatacgaacatacaccttctggtgactacttacaaccttagagacgcgcccgctgaatctgtggcataccacgcacaaaacaaccctccagtcccgcctaagcctcaacccaaagtccaagaaaaggcggatataccagtgaaatcctccccacaagccgctgtgccttacaagaaggatgtgggaaagactctctgtccactgtgttttagtattttgaaggggcccatttcggatgcattggcacatcacctccgggagaggcatcaggtgattcagactgtccatccggtggagaagaagctgacttataagtgcattcactgcctgggtgtgtacaccagcaacatgaccgcatccactatcaccctgcatcttgtccattgtagaggcgtcggcaaaactcaaaacggtcaggataagactaatgcaccctcccgcctgaatcagtccccatcactggcaccggtcaaacgaacttacgaacagatggaatttccactgctgaagaaaagaaaacttgatgatgacagcgattcgccgtcattcttcgaggaaaaacccgaggaaccagtggtcctggcactggatcctaagggacatgaagatgactcgtacgaggcacgtaagtcatttcttaccaagtactttaacaagcaaccataccctactagacgagagatcgaaaagctggcagcgtccctgtggctttggaagagcgatattgcgtcccattttagcaataagcgtaagaaatgtgtgagagattgcgaaaagtacaaacccggagtgttgctgggcttcaatatgaaagagttgaataaagtgaagcacgaaatggatttcgatgcagagtggttgtttgaaaaccatgacgaaaaggatagccgagtcaacgcatccaagaccgcagacaaaaaactgaaccttggaaaggaagatgattcttcgtccgactccttcgagaacctggaagaagaaagcaacgagtcgggctcaccatttgatcctgtgtttgaggtggagccaaaaatcagcaacgataatccagaggaacacgtacttaaggtgatacctgaggatgcatcagaaagcgaagagaaattggaccagaaagaggacggatccaagtacgaaactatccatctgaccgaagagccaactaaactgatgcacaacgcctccgactccgaggtggaccaagacgacgtggtggaatggaaagatggggcatcaccatccgaatcgggtcctggatcacaacaagtctccgatttcgaggacaacacctgtgaaatgaaaccggggacgtggtcggatgaatcttcccagtctgaggatgcaagatcctctaagcctgcagccaagaaaaaggccaccatgcaaggagatcgggaacaactgaagtggaaaaactccagctacggtaaagtggaaggcttttggtcaaaagatcagtcccaatggaagaacgcaagtgaaaacgatgaaagactgtccaacccgcaaatcgaatggcaaaattcaaccatagattccgaagatggcgaacaatttgacaatatgactgatggcgtggcagagccaatgcatggttcccttgctggggtgaagctgagctctcaacaggca

SEQ ID NO: 5737 - DNA, 3306 bp, synthetic construct
  misc_feature 1..3306: note = source = /note="Description of Artificial Sequence: Synthetic coding sequence"
  source 1..3306: mol_type = other DNA
atgttccagctccctgtgaataacttaggatctctgcgaaaggcacggaaaacagtcaagaaaattctgtctgatatagggctcgaatactgcaaggagcatatcgaagactttaaacagttcgagccaaacgatttctaccttaagaatacaacatgggaagatgtgggactgtgggacccatccctgaccaagaatcaggactataggactaaacccttttgttgcagcgcctgcccgttctcatccaaatttttcagtgcatacaagtcacacttccgaaatgtgcatagcgaagactttgagaatcgtattctgctcaattgtccctactgcacattcaacgcggacaagaagaccctggagacacatatcaagatctttcacgccccaaatgcctcagccccctcatcgagcctgagcacatttaaggacaagaacaaaaatgatggtttgaagcctaaacaggcagattccgtggagcaggccgtgtattactgtaagaagtgcacgtatagagatccgttatatgagatcgttagaaagcatatctaccgggagcactttcaacatgtggcagccccatacattgcaaaggccggagagaaatccctcaacggtgccgtgccactaggtagcaacgcccgggaagagtcctctatacattgtaagcgctgtctattcatgcctaagtcctacgaggcgctggtgcagcacgtgatcgaggaccacgagcgtattggctatcaagtgacagccatgatcggccatacaaatgtggtcgtcccccgcagtaagccactcatgctgattgctccaaaaccacaggataaaaaatcaatgggcctccctccgcggatcggatctctcgccagcggcaatgtcaggtcactaccgtcacagcagatggtaaacagactgtcaataccaaagcctaatctgaactcaaccggtgtgaacatgatgtctagtgtgcatttgcagcagaacaactacggtgttaaaagcgtgggccaggggtattccgtgggccagtctatgagattgggcctcgggggcaacgcgcctgtttcgatcccacagcagagccagtccgttaaacagttgctgccatccgggaacggtcgcagctacggccttgggtctgagcaaagatctcaggctcctgcccgatactccctgcaatcagctaacgcatcctcccttagcagcgggcaacttaaaagccccagcttaagccagtctcaagcatctcgtgtgctggggcaaagcagttctaaaccagctgccgccgctacaggcccacctcccggcaacacatcttcaactcaaaagtggaaaatttgtacaatttgtaatgagctgttcccggaaaatgtatatagcgtgcatttcgaaaaggaacacaaagcagagaaggtgcctgccgttgcaaactatataatgaaaattcataacttcacctcgaaatgtctgtattgcaataggtacttgcctacagatactctgctgaaccatatgctgatccatggactgtcgtgtccttattgccgatctacatttaatgatgtggagaaaatggccgcacacatgaggatggtccatattgacgaagagatgggtcctaagactgacagcactttgagttttgacctgaccctgcagcaaggctcacatactaacatccatctgttggtaaccacatataaccttcgcgatgcacctgcggaatccgtcgcataccatgcccagaacaatcctccagtcccccctaagccgcaaccaaaggtccaggagaaagccgacatcccagtcaagtcttcaccccaagctgcagtgccctataagaaggacgtgggtaaaacactgtgccctctctgcttcagcatcctaaagggccctatttcagacgccttggcccatcatctacgggaacgacatcaggttatacagaccgtgcaccccgtggaaaagaaattgacctataaatgcatccactgcctgggcgtgtacacttcgaacatgaccgccagcacaataacactccacctcgtgcactgccgcggcgtgggtaagactcagaatggtcaggacaagacgaatgctccgtcacgcctgaatcagagcccctccctggccccagtaaagaggacctatgaacagatggagttcccactcctgaagaagaggaaacttgacgacgattctgacagcccatcatttttcgaagagaagcctgaggagccagttgtgctggctttggatcctaagggccacgaggacgacagttatgaagcaagaaagagctttctgacgaagtacttcaacaaacagccctacccaacaaggagggagatcgagaagctcgctgctagcctgtggctgtggaaatctgacattgcatcccacttcagcaataaacgcaagaagtgtgtccgagactgtgagaagtataagccgggtgtacttctcggttttaacatgaaggagctgaataaagttaagcacgaaatggactttgatgctgaatggttgttcgagaaccacgatgaaaaagattcaagagtgaacgcgagtaagactgccgacaagaaattgaatttaggcaaggaggatgattcatccagtgactcttttgagaatctcgaagaggaatccaacgagagtggatctcctttcgacccggtgttcgaagtggaacctaagatctctaacgacaatcctgaggagcacgttctaaaagtgatcccagaggatgcttcagaaagcgaagaaaagctcgatcagaaagaagatggttctaaatacgaaacaatccatctgacagaagaacctaccaaacttatgcataacgctagcgattcggaggtggatcaagatgacgtagtcgagtggaaggacggagccagcccatctgaaagcggccctggctctcagcaggtcagcgattttgaggataatacatgcgaaatgaagccagggacgtggtccgatgaatcctcccagtctgaggatgcgcgatcatcaaagcctgccgctaagaaaaaagccactatgcagggagatcgtgagcaattgaaatggaaaaacagctcctacgggaaggtggaaggcttttggagtaaggaccagtcacagtggaagaacgcatctgagaatgacgagcgcctcagtaacccacagatcgaatggcaaaattccacaatcgattctgaggatggagagcagttcgataacatgactgacggcgtggcagagcccatgcatggcagtctcgctggagtgaagctcagtagccaacaggct

SEQ ID NO: 5738 - DNA, 3306 bp, synthetic construct; identical to SEQ ID NO: 5728
  misc_feature 1..3306: note = source = /note="Description of Artificial Sequence: Synthetic coding sequence"
  source 1..3306: mol_type = other DNA

SEQ ID NO: 5739 - DNA, 3306 bp, synthetic construct
  misc_feature 1..3306: note = source = /note="Description of Artificial Sequence: Synthetic coding sequence"
  source 1..3306: mol_type = other DNA
atgttccagctgccagtgaataacttggggtcgctgcgcaaggcaagaaagaccgtgaaaaagatcctgagcgacatcggactggaatactgcaaggaacacattgaagatttcaaacaatttgagccaaacgacttctacctgaagaacacgacttgggaggacgtgggactgtgggatcccagcctgacgaagaaccaggattaccgcacgaaaccattttgttgctcagcctgtccgtttagttctaaattcttcagcgcctacaaatcccactttcggaacgtgcactcagaggacttcgaaaaccgcattcttcttaactgtccgtactgtactttcaatgcggacaagaaaactctcgaaacccacatcaagatcttccacgctccaaacgccagcgccccttcctcatcgctcagcacgtttaaggacaagaacaagaatgacggcctcaagccgaagcaggcggactcagtggagcaggccgtctactattgtaagaaatgcacctaccgagatccactgtacgagatcgtgcggaagcatatctacagagagcatttccaacacgtggcagcgccttacatcgcgaaggccggcgagaaatcactgaacggcgctgtgccgctgggtagcaacgcccgcgaggaatccagcattcactgcaagcgctgcctgttcatgcctaagtcgtacgaagcgctcgtgcagcacgtgatcgaggatcacgagaggatcggatatcaggtcactgccatgatcgggcacaccaacgtcgtcgtgcctaggtcgaagccgctgatgctgatcgccccgaagccacaagataagaagagcatgggactcccgcccagaatcggatccttggcctccggcaacgtgcggtcgcttccatcccagcagatggtgaaccgcctctccattcccaaaccgaacctcaactcgaccggagtgaacatgatgtcctcagtccatctgcaacaaaacaattacggtgtcaaatcggttggccaaggatatagcgtgggccagagtatgcgcctgggactcggaggcaacgcaccggtgtccattcctcaacagtcacagtcggtgaagcagctgctgccgtccgggaatggacgcagctacggactgggctccgagcagcgatcgcaggctccagcacgatactcactccaatccgcgaatgcatcgtccctctcatcggggcagcttaagtcgccgagcctgtcgcaaagccaggcttcccgcgtcctgggacagtcctcatctaaaccggccgctgcagccactggaccgccaccagggaatacgtcgtcgacccagaagtggaagatctgcacgatttgtaatgagctgtttcccgagaacgtgtactcggtgcacttcgagaaggagcataaagccgaaaaggtgccggctgtggcaaactacatcatgaagatccacaatttcaccagcaagtgcttgtactgcaacagatacctcccgactgatactctgctgaatcacatgctcatccatggcctctcttgcccgtactgcagatcgaccttcaatgacgtggaaaagatggccgcccatatgaggatggtccatatcgatgaggagatgggccctaagactgactcgaccctctcatttgatttgactctccagcaggggagtcacactaacatccatctgctggtaaccacttacaatctccgagacgcgcccgcggagtccgtggcttaccatgcgcagaacaatccccctgtccctccgaagccgcagccgaaggtccaggaaaaggccgacatccctgtgaagagcagcccgcaggccgctgtgccgtacaagaaggacgtgggtaagaccttgtgtcccctctgtttctccatccttaagggaccgatctcagacgcactggctcaccacctgcgggagagacatcaggtgatccagactgtccacccggtggaaaagaaactgacttacaaatgcatccactgcctcggtgtgtacacctcgaacatgactgcttcgactatcactctccatttggtgcactgccggggtgtgggaaaaacccaaaatggacaagacaaaaccaacgcaccgtcccgcctgaaccagtcgccgtcccttgcgccggtgaaacgtacgtacgagcagatggaattcccactgttgaaaaagagaaaattggacgacgactcagactccccttccttctttgaagagaaaccagaagagcctgtggtgcttgccctcgacccgaagggacacgaggacgacagctacgaggctagaaagtccttcctgaccaagtacttcaataagcagccttatcccacccggcgggagattgaaaagctggctgcgtcgttgtggctgtggaagtcggatatcgcctcccacttcagcaataaacggaagaagtgtgtgcgcgattgcgaaaagtacaagcccggcgtgctgctcggcttcaatatgaaggaactcaacaaggtgaagcacgaaatggatttcgacgccgagtggctgtttgagaatcatgacgaaaaggactcgcgcgtcaatgccagcaaaacggccgacaagaagctcaacctggggaaggaagatgactcgtcatcagatagcttcgaaaacctggaagaggaatcgaatgaatcgggttccccgtttgatcctgtgttcgaagttgaaccaaaaatctcaaatgacaaccctgaagagcacgttctgaaggtgatcccggaggacgcttctgaatccgaagagaaattggaccaaaaggaggatggttcgaaatacgaaaccatccaccttactgaagagccgacgaaactgatgcacaacgccagcgattcagaagtggaccaagatgatgtggtggagtggaaggatggggcatcaccgtccgaatccgggccgggttcacagcaagtctcggatttcgaagataacacctgtgaaatgaagccaggcacttggtcggatgagtcctcgcagtcggaggatgcaaggtccagcaagccagctgcgaagaaaaaagccaccatgcagggagatcgggagcagctgaagtggaaaaactcatcgtacggtaaagtggaaggattctggtcaaaagaccagtcacagtggaagaatgcctccgagaacgacgagagactgtccaatccgcagatcgaatggcaaaactccactatcgattccgaagatggcgagcaattcgacaacatgactgatggcgtggctgagccgatgcatggatcgctcgccggagtcaaactgtcatcgcagcaggcg

SEQ ID NO: 5740 - DNA, 3306 bp, synthetic construct
  misc_feature 1..3306: note = source = /note="Description of Artificial Sequence: Synthetic coding sequence"
  source 1..3306: mol_type = other DNA
atgtttcagctgccagtgaataatctgggtagcctgcgcaaggcacgaaagaccgtgaaaaaaattttgtctgatatcggattggagtactgcaaagagcatattgaggatttcaagcaatttgagcccaatgatttttatctcaaaaacactacatgggaagatgtggggctgtgggacccaagcctgactaagaatcaggactaccgaaccaaacctttctgctgctctgcttgcccattctctagcaaatttttttctgcatataagtcacactttcggaacgttcactccgaggactttgaaaatagaattctcttgaattgcccttattgcactttcaacgccgataaaaagactctggagacacacattaaaattttccatgcacctaatgcatcagctccaagttccagcctgagcaccttcaaagacaagaataaaaatgatggtctgaaaccaaaacaggctgacagcgtggagcaggcagtgtactattgcaaaaagtgtacctaccgcgaccccctttatgaaatcgtgcgcaaacacatctatcgggaacatttccagcacgttgccgccccatatatcgccaaagcaggggaaaaatctttgaacggggctgtcccgctgggatccaacgcacgcgaggagtcctctattcattgcaaaagatgtctcttcatgccgaagtcatatgaggcgctggttcagcacgtgattgaagaccatgagaggatcggctatcaggtgaccgcaatgatcggtcacaccaacgtggtcgttccgaggtccaaacccctgatgcttatcgctcccaagcctcaggataagaagtccatgggccttccacctcggattggtagcctcgcaagtggcaatgttcggagtctccccagtcagcaaatggtcaatcgcctctctattcctaaaccaaatttgaattctacaggggttaacatgatgagctctgtgcacctgcagcagaataactacggggtgaaaagcgtgggccagggctattcagtggggcagtccatgcggctgggcctggggggaaatgctcccgttagcatacctcaacagtctcagtcagtcaagcaactgctgccctcagggaatggtaggtcctatggcttgggatctgaacaacgctctcaggcacctgcaagatattctttgcagtccgcaaacgcgagcagtctctcaagcggccaactgaaaagcccttccctgtcccagagtcaggcctctcgcgtcctgggtcaaagttctagcaaacccgccgccgcagccacaggccccccccctggaaacacaagcagtacccagaagtggaaaatctgcacgatttgtaatgagctgttcccggagaacgtctactcagtgcactttgagaaagagcacaaagctgagaaggttccagccgtggccaattacataatgaagatacataatttcacttccaagtgtctctactgcaatagatacctccccacggacaccctgctgaatcacatgctgatccacggcctcagctgtccttattgccgatctacattcaatgatgtggagaaaatggccgcgcatatgcgcatggtgcatatcgatgaagagatggggcctaagaccgactccactctcagctttgatctgacactgcagcaaggtagccatactaacattcatctgctcgttacaacttacaacctgcgagacgcgccggcggaatctgttgcataccatgcccagaataatccacccgtgcctcccaagccgcaacccaaggtgcaggaaaaggccgacattcccgtgaagagtagtccacaggctgctgtgccatacaagaaggacgttggcaaaacgctgtgccctctgtgtttcagtatcctgaaaggtcccatcagcgacgcccttgcgcaccacctgcgggagcggcaccaggttattcaaaccgtgcatccagtcgagaaaaagctcacttacaagtgcatccactgtctcggcgtctatacctccaatatgacggccagcaccatcacactgcatctggttcactgtcgaggagtgggaaagacccaaaacggtcaggacaaaacaaacgctccatcccgcctgaaccaatcccccagcctggcacctgtgaagcgcacatacgaacagatggaatttcccctgctcaagaagaggaaactggacgacgacagtgatagcccaagtttttttgaggagaagcccgaggaacctgtagtcttggccctggacccgaaagggcacgaggatgacagctatgaggcacgcaagtcattcctcaccaagtactttaataaacaaccgtatcccactagacgagaaattgagaaactggctgcctcactgtggctgtggaaaagcgacatcgcctctcacttcagcaacaagaggaaaaaatgcgtccgcgactgtgaaaaatataaacccggagtgctgcttggcttcaacatgaaggaactcaacaaagtcaagcatgaaatggattttgacgcggaatggctcttcgagaatcacgacgaaaaggacagccgcgtcaacgccagtaagacagcggacaaaaagctcaacctgggaaaagaggatgactcttcctcagacagctttgaaaacctggaggaggagtccaatgagtctggcagtccattcgatcctgtcttcgaagttgagccaaaaatcagcaatgacaaccctgaagagcacgtgctcaaggttattcccgaagacgcttccgagagtgaggagaagctggaccaaaaggaggatgggagtaagtatgagactatccacctcacggaagagccaactaagctgatgcacaacgcttctgattccgaagtcgaccaggacgatgtcgtcgagtggaaagacggtgcttccccgtccgagtcaggtcccggatcccagcaagttagcgacttcgaagataatacgtgcgagatgaagccaggcacttggtctgacgagagctcacaatccgaggacgcacgcagctccaaaccagcagctaagaagaaagccacgatgcagggcgaccgagaacagctgaaatggaaaaatagctcatacggtaaagttgagggtttctggagcaaggatcagagccagtggaaaaacgcttcagagaatgatgaacgcctgagcaatccccagattgagtggcagaacagtaccatcgacagcgaggacggtgagcagtttgacaatatgaccgatggtgtggcagaaccaatgcacggctcccttgccggggtcaaactcagctctcaacaggcc

SEQ ID NO: 5741 - DNA, 3306 bp, synthetic construct
  misc_feature 1..3306: note = source = /note="Description of Artificial Sequence: Synthetic coding sequence"
  source 1..3306: mol_type = other DNA
atgtttcagcttcccgttaataatctgggctccctccggaaagctcggaagacggtcaagaagatcctgtccgatatcggcctggagtactgcaaggaacacatcgaggattttaaacagtttgagcctaatgacttctacttgaaaaacactacctgggaggatgtggggctgtgggatccctctcttactaaaaatcaggattaccggactaagccattctgctgttctgcttgtccatttagttcgaagtttttttctgcctataaatctcattttcgaaatgtgcattctgaggatttcgagaaccgcatactactgaactgtccttactgcacattcaatgcagataagaaaaccctggaaactcacattaaaatctttcatgcgcctaatgcctcggcccctagctcctcactatccacatttaaagataaaaacaagaatgacggactaaagcccaaacaagcagattctgttgagcaggcagtctactactgtaaaaaatgtacctacagagatcccctgtacgagatcgtgcggaagcacatctatagggagcatttccagcacgtggcggccccttacattgccaaggccggagaaaagagcttgaatggggccgtgccattggggtcaaacgccagggaagaatctagcatacactgcaaacgatgcttatttatgccgaagtcttacgaggccctggtgcagcacgttattgaagaccatgaaaggatcggctaccaggtcaccgccatgatagggcacactaatgttgtggtgccacgaagcaagcccctcatgctcattgctcccaaacctcaggacaagaaatccatgggtctgccacctaggatcgggtcgctggccagcggtaacgtgagatccctgccatcacaacaaatggttaacagactgagtatcccaaaacctaatctgaacagcactggcgtgaacatgatgagcagcgtgcatctacagcaaaacaattacggtgtgaagagtgtcggtcaagggtattccgtaggacagtccatgcgactgggccttggaggtaatgctcccgtgagcatccctcaacagtcacagagcgtgaagcagctgttgccatctgggaacggtcgctcttatgggctcggtagcgaacagaggtcgcaggccccagcacgctactccctccagagcgccaatgcctcttcactgtccagcggccagctgaagagtccatcactgtcccagtcacaagcgagccgcgtgcttggccaaagttccagtaagccggcggcagccgcgaccggaccgccaccggggaatacctcatctacacagaagtggaagatctgcacaatttgtaatgaactttttcccgagaatgtgtattctgttcacttcgaaaaggagcacaaagcagaaaaagtgcccgctgtcgccaattacattatgaagattcacaacttcacatccaagtgtctgtactgcaatcgatacctcccgactgatacattgctaaaccatatgctaatacatgggctgtcatgtccatactgtaggtccacatttaacgacgtggaaaagatggccgcacacatgaggatggtacatattgacgaggaaatgggtccaaaaactgacagcacactgagctttgacctaaccctgcagcaggggagccatacaaatatccacctgctggtcacaacctacaacctgcgcgacgctcccgccgaaagtgtggcttatcacgcacagaacaatccaccagtgccccccaaaccacagcctaaagtgcaggaaaaagctgatatcccagtgaaatcctcgccccaggctgcagtcccttataagaaggatgtcgggaagactctctgccccttatgctttagtattctgaaaggaccaattagtgacgccctggctcaccatttgcgggaacgccaccaagtgatccagaccgtgcaccccgtcgagaagaagttgacatacaaatgcatacactgtctcggcgtgtatactagcaacatgactgcctcaacaattacattgcatctggtacactgtcgcggcgtgggaaaaacccagaatggtcaggacaagaccaacgctccctcacggctcaaccagtcgccttctttagctcccgttaaaaggacctacgagcagatggaatttccactcctgaaaaagcgaaagttggatgacgatagcgactccccttctttttttgaagaaaagcctgaggagcctgtcgtactcgcccttgatcctaaaggccacgaggacgactcttacgaagcccgaaaatcttttttgaccaagtacttcaacaaacagccttatcctaccaggcgcgagatcgagaagctcgctgcaagcctgtggctgtggaagagtgatatcgcttctcatttcagcaataaaaggaaaaaatgtgtaagggattgtgagaagtacaaacctggggttctgctgggatttaacatgaaagagttgaacaaggtcaaacacgagatggattttgacgccgaatggttgttcgaaaaccatgatgaaaaagactcacgcgttaacgcctccaagaccgctgacaaaaagctgaatttggggaaagaggacgattccagcagtgattccttcgagaatctggaggaagagagcaacgagtctggatctccatttgacccagtcttcgaagtggagcccaagatttccaacgacaaccccgaagagcacgttctgaaagtcatcccagaggatgcttcggaatcagaagagaagcttgaccagaaggaagatggctctaaatacgagacgattcacctcacagaggagcctacaaagctaatgcataacgccagcgattccgaggtcgaccaagatgacgtggtggagtggaaagatggcgcaagcccttctgaatccggccccggctcacagcaggtgagcgatttcgaggacaatacctgcgaaatgaaaccaggcacgtggagtgacgaaagctcccagagcgaggacgcacgctctagtaagcccgcagcaaaaaaaaaggcaaccatgcagggggacagggaacagctgaaatggaaaaatagcagctacgggaaagttgaaggattctggagtaaggatcagagccagtggaagaacgctagtgagaacgatgagcgactttccaacccacagattgagtggcagaattccacaattgatagcgaagatggcgaacagttcgacaatatgacagacggggtagccgaacccatgcacggaagcctggctggagtgaaactctcaagtcagcaagct

SEQ ID NO: 5742 - DNA, 3306 bp, synthetic construct
  misc_feature 1..3306: note = source = /note="Description of Artificial Sequence: Synthetic coding sequence"
  source 1..3306: mol_type = other DNA
atgttccagttgcccgtaaacaacctagggtcacttcgcaaagccaggaaaactgtgaaaaaaattttatcagacataggactggaatattgcaaagaacatatcgaggatttcaagcagtttgaacctaatgatttttacctcaaaaacactacttgggaagacgtggggctgtgggatccttctctaacgaaaaatcaggactataggacaaaacctttctgttgtagtgcctgccccttttcttccaagttcttttcagcttataaatcccattttcggaatgtgcattctgaggatttcgaaaaccgaattctgctgaactgtccttattgcacattcaatgctgataaaaaaactctggaaacacatataaaaattttccacgccccaaacgcctcagccccatctagttccctttcaacttttaaggacaaaaacaaaaacgatgggctcaaaccaaaacaggccgattctgtcgaacaagctgtttattactgcaaaaaatgtacttatagagatcctctttatgaaattgtgagaaagcacatttatcgagaacatttccagcatgtagcagctccatatatcgcaaaagctggagaaaaatccctcaacggagcagtgccacttggaagtaatgcacgggaagagtcttctatacactgtaaaaggtgtctttttatgcccaaaagttatgaagcgctagtgcagcatgtcatcgaagatcacgaacggatcggatatcaggtgactgcaatgattggacatactaacgtggttgtcccgcgatcaaagcccctaatgcttatcgcacccaaaccccaggataaaaaatccatgggactgcctccccggataggatccctcgcctccgggaatgtacgctcattaccctctcagcagatggtgaacaggctcagtatccctaaaccaaatctaaactctacaggggtgaatatgatgagttctgtgcacctgcagcagaataattatggggtgaagtccgtgggacagggatattctgtggggcagtctatgaggctgggacttgggggaaacgctccagtaagtattccccagcaatctcagagtgtgaagcagcttctcccttctgggaatggaaggagttacgggcttggatccgaacaaaggtctcaggctccagcccgatattccctccagtcagcaaatgcttcttcactgtcttctgggcagctcaaatccccctcactctcacagagtcaggcttcacgggttttggggcagtcgagttctaaacccgctgcagccgcaacaggacccccacctgggaatactagttcaactcagaaatggaaaatctgtactatatgcaacgaactttttcccgaaaacgtgtattctgtacattttgaaaaagaacacaaagcagaaaaagtgcccgctgtcgctaattatattatgaaaatccacaactttacttctaaatgcctgtattgcaacaggtatctgcctacagatactctcctgaaccacatgctgatccacggactcagttgcccttattgtaggtcaacatttaatgatgtggagaaaatggctgcacacatgaggatggtgcatatcgatgaggagatggggcctaaaactgattctacactgtcgtttgacttaacgcttcagcaagggtctcatactaacatacatctgctggtcacaacatataatctaagggatgctcccgctgaaagtgtggcttatcacgcccagaataaccctccagtgccaccaaagccccagcccaaagtgcaggagaaagccgatattcccgtcaaatctagtcctcaagcggctgtgccctataaaaaggatgtcgggaaaacactttgcccattgtgcttctctatactgaaaggacctatcagtgatgccctagcacaccatctgcgagaaaggcaccaggtgatccagactgtgcatcctgtggaaaaaaaactgacatataaatgcatccactgcctgggggtgtatactagtaatatgacagcaagtacaataactttgcatctcgtccattgccggggggtggggaaaactcagaatgggcaggataaaactaatgcccctagtaggctgaatcagtcccctagtctcgctccagtgaaacgcacgtatgaacagatggaattccctttattgaaaaaacgaaagcttgatgacgattcggatagtccctcttttttcgaagaaaaacccgaagagcccgtggttctagctcttgatcctaaaggacatgaagatgattcgtatgaagcacgcaaatcttttctgacaaaatacttcaataagcaaccctaccctacaagacgagaaatcgaaaaattagcagcttctctgtggctttggaaatctgatatagctagtcacttttccaataaaaggaaaaaatgcgtgcgggattgcgaaaaatataaaccaggagtactcttggggtttaacatgaaagaactaaacaaagtaaaacacgagatggacttcgatgccgaatggctctttgagaaccacgatgaaaaagatagtcgcgtcaacgcttctaaaactgcggataagaaacttaatctaggaaaagaagacgattcatcctccgattcttttgaaaatctggaagaagaatcaaacgagtcgggatcacccttcgatccagtgtttgaagtggagcccaaaatttccaacgataatccagaagaacatgtccttaaagtgatacccgaagatgcttcagagtcggaagaaaaactggatcagaaagaagatgggtctaaatatgaaacgatccatctgacagaagagcccactaaactgatgcataacgccagtgattctgaagtcgatcaggatgatgtggtagaatggaaagatggggccagtcctagtgaatctgggcctggatcacagcaggtatctgatttcgaggataacacatgtgagatgaaacctggaacttggtcggatgaaagtagtcagagtgaagatgccagatccagtaaacctgcagccaaaaaaaaagcaacaatgcagggagatagggagcaattaaagtggaagaattcatcatacggaaaagtggaaggattctggagtaaagatcagtcccagtggaaaaacgcaagtgaaaatgatgaacgactgtcaaacccacagatagaatggcagaactctacaatcgattcagaagacggagaacagttcgacaatatgacagacggagtcgcagaacctatgcatgggtctctagctggagtgaaactgtcttcacagcaggcc

SEQ ID NO: 5743 - DNA, 3306 bp, synthetic construct
  misc_feature 1..3306: note = source = /note="Description of Artificial Sequence: Synthetic coding sequence"
  source 1..3306: mol_type = other DNA
atgtttcaattgccagttaacaacctggggagccttaggaaggctcgcaagaccgtcaaaaagattctttcggatatcggcctggagtactgtaaggagcatatagaggactttaaacagttcgaacctaacgatttctacctcaagaataccacgtgggaagatgtcggtctgtgggaccctagcctgactaagaatcaagactacagaaccaagccgttctgttgttcagcatgtccattttcctccaagttcttttccgcatacaaaagccattttcggaatgtgcacagcgaggacttcgaaaaccgaattcttcttaactgcccttattgtacctttaatgccgacaagaaaacgctggaaacccacatcaagatttttcatgcccccaacgcctcagctccttcctcctcactgagcaccttcaaagataagaacaagaacgacggacttaagcctaaacaagcggactccgtggaacaggcagtgtactactgcaagaagtgtacttaccgcgatcccctctacgaaatcgtgcgtaagcatatctacagggagcactttcaacatgtggcagcaccatacatcgcaaaggcaggcgagaagagcctcaatggagcagtgcctctgggctccaatgcccgtgaagaatccagcattcactgtaagcgctgcctgttcatgccaaagagctatgaagcactggtccaacacgtcattgaggatcacgagcgtattggataccaagtgactgccatgattggtcacacgaatgtggtggtcccacgctccaaaccacttatgctgatcgcccccaagcctcaggataagaagtccatgggactcccccctcgcataggctcgcttgcatccggcaatgtgcgatccctgccttcgcaacaaatggtcaacagactcagcattcctaagccgaatcttaattcgaccggtgtgaatatgatgtcgtccgtgcacctgcaacagaacaactacggagtgaagtcagtgggacaggggtactcggtgggacaatcgatgcggctgggcctcggaggaaacgcccccgtctcgatcccacaacaatcacaaagcgtcaagcaacttctgcctagcgggaacggacgcagctacggcctcggttccgaacagcggtcccaggctcccgcacgatactcactgcaaagcgctaatgcatctagcttgagctcgggacaactgaaaagcccctctctgtcgcagtcgcaagccagcagagtcctgggccaatcatcgagcaagcccgcagcggcggcaactggtccaccgccaggtaacacttcgtcgactcaaaagtggaagatctgtactatttgtaatgaactgttccctgaaaacgtgtactcagtccattttgaaaaggagcacaaggctgaaaaggtgcctgcagtggccaattacattatgaaaattcataactttacgagcaaatgtctttactgtaatcgataccttcctaccgatactctcctcaaccatatgcttatacacggtctttcgtgtccttattgcagaagcacttttaacgatgtggagaaaatggcggctcacatgcggatggtgcatattgatgaagaaatgggacccaagaccgattcgactctgtcgttcgacctgaccctgcagcagggctcgcatactaacatccatcttttggtgactacttacaacctcagggacgcccctgctgaatccgtggcctaccatgctcagaacaatcctcctgtgcctccaaagccacaaccaaaggttcaagaaaaggctgatattcctgtcaagtcctcaccccaggcagcagtcccctacaagaaagatgtgggcaagaccctctgtcctctgtgtttttcaatactcaagggacctatttcggatgcactggcacatcatctgcgcgaaagacatcaagtgatccaaacggtgcatccagtggaaaagaagctcacttacaaatgtattcattgccttggagtgtacaccagcaacatgactgccagtaccattactcttcaccttgtccattgtaggggagtgggcaaaacccagaatggacaagataagactaacgcgccatcacggctgaaccaaagcccttccctggcaccggtcaaacgaacttacgaacaaatggaattcccgctgcttaagaagcgtaagctggacgatgactccgatagcccttccttttttgaagaaaaaccggaggaaccagtggtcctggcacttgacccgaaagggcatgaggacgatagctatgaagcgagaaagtcgttcctcactaagtatttcaacaagcaaccctacccaactcggcgggaaatcgagaagttggctgcctctctctggttgtggaagtcagacattgcatcccatttttcgaacaagagaaagaaatgtgtgagagactgtgaaaagtataagccaggcgtcctgttgggtttcaatatgaaggaattgaacaaggtgaagcatgaaatggactttgatgcagaatggctgtttgagaaccacgatgaaaaggattcacgggtgaatgcatctaagaccgcagacaagaaacttaacttgggaaaagaggacgactcttcgtccgactcgtttgagaacctggaagaggagtcgaacgagagcggaagcccgtttgaccccgtgtttgaagtcgagccaaaaatctccaacgacaacccagaagagcacgtccttaaggtgatcccagaggatgcatcagagagcgaagaaaaacttgatcaaaaggaggatggaagcaaatacgagactatacatcttactgaggagccgaccaagctcatgcataatgctagcgacagcgaagtggatcaggatgacgtcgtggaatggaaggacggtgcaagcccttctgaatccggaccaggcagccagcaggtgtcggatttcgaggataatacttgcgaaatgaagcctggaacgtggtccgacgaatccagccaatccgaagatgcacgtagctcgaagcccgccgcaaagaaaaaggcgaccatgcaaggcgatcgagagcagctgaagtggaagaactccagctacggaaaggtcgagggtttctggtcaaaggatcagtcccagtggaagaacgcctcagaaaatgacgaacggctctctaaccctcaaatagaatggcagaattcaactattgactcggaggacggagagcaatttgataacatgaccgatggagtggcagaacccatgcatggatccctcgcaggagtgaagctctcgtcacaacaggcc

SEQ ID NO: 5744 - DNA, 3306 bp, synthetic construct
  misc_feature 1..3306: note = source = /note="Description of Artificial Sequence: Synthetic coding sequence"
  source 1..3306: mol_type = other DNA
atgtttcagctgcccgtgaataacctcggaagcctccgcaaggcaagaaagaccgttaagaagatcctctccgatatcggcctggaatattgcaaagagcacatagaggactttaaacaatttgagcccaatgacttctacttaaagaacactacttgggaggatgtggggctgtgggatccaagtctgacaaagaaccaggactaccggacaaaaccgttctgttgctctgcatgcccgttctcctctaaatttttcagcgcgtacaagagccacttcagaaacgtccactccgaggattttgaaaaccgaatcttgctgaattgtccatactgcacttttaacgccgataaaaagacccttgagacgcacatcaaaatttttcacgcacctaatgcctcagcaccctcatcttctctgtcaacgttcaaagacaaaaacaaaaatgatggcctgaaacctaaacaggccgactctgtggaacaggctgtttactactgcaaaaaatgtacctacagggatcccttatacgagatcgtgcggaagcacatttatcgcgagcactttcagcatgtggcagcgccttatattgctaaggcaggggaaaaaagcctaaacggcgctgtgcctttaggaagcaatgccagagaagaatccagcattcattgtaagagatgtctgttcatgccaaaatcctacgaggccctcgtgcagcacgtcatcgaagaccatgagagaatagggtaccaggtcactgctatgatcggtcacacgaacgtggtggtcccgcgcagcaaacccttgatgcttattgctcccaaaccccaagacaagaaatctatgggactgccaccaaggataggttccttggcttccggaaacgtgcgttccctgccatcccagcagatggtcaatcggttgagtatccccaaacccaacctaaattccacaggagtgaatatgatgtctagcgtacacctacaacaaaacaattatggagtcaaaagtgtggggcagggctacagcgtcggccaatctatgcgactgggtttgggcggaaacgctccggtaagtatacctcagcagtctcagagcgtgaagcagttattaccttctgggaatggcaggtcgtatgggttaggttccgagcagaggagtcaggccccggcccggtatagtctgcagagcgcgaacgcttcctctctgtcctccggacagctgaagtcccctagcctgtctcagtctcaagcttccagggttttgggacagtcctcaagtaaacctgctgcagcagcgacagggcccccccccggtaacacatcctctactcagaagtggaagatttgtacaatatgcaatgagctctttccagagaatgtttactccgttcattttgagaaggaacataaagccgagaaggtgcctgccgtagcaaactacataatgaagattcacaacttcacatctaaatgtctttattgcaaccgctatctccccactgatacgcttctgaatcatatgttgatacatgggctgtcctgcccctattgtagatctacatttaacgacgtcgaaaaaatggccgcccatatgcggatggtccacatagacgaggaaatgggcccaaaaactgatagtaccctgagttttgatttgactcttcagcaaggttctcacacgaacattcacctgctcgtgaccacttataacttgagggatgctcctgctgagtccgtagcctaccacgcccaaaacaaccctcctgtgccgcctaagccccagccaaaagtgcaggagaaggccgacattccagtgaaatcttcacctcaggctgccgttccatataagaaagatgtgggcaagacactgtgcccactctgcttctccatcctgaaaggtccaatcagcgacgctttggcccaccatctgcgggagaggcatcaggttatccaaactgtacaccctgttgaaaaaaaactgacgtataaatgtatccactgtctgggagtgtacaccagtaatatgaccgcgagcacaatcaccctgcatctcgtccactgtagaggcgttgggaaaacacaaaacggacaggacaaaactaacgccccaagtagattaaaccaaagcccttctttggctcctgtcaagagaacctacgaacagatggaatttcctctgctgaagaagaggaagctcgatgatgactcagattcaccaagctttttcgaggagaaaccagaagaaccagtggtgttggctttagatcccaagggtcatgaggacgatagctacgaggcacggaaatctttcttaacaaaatactttaataaacagccctacccaacacggcgagaaattgagaaattggccgcctcactttggctgtggaaaagcgacatagccagccacttctctaacaaaaggaagaaatgtgtgcgcgattgtgagaaatataaacccggcgtactgctcggtttcaatatgaaggagctgaataaggtcaagcatgagatggactttgatgccgagtggctctttgaaaaccacgatgagaaggactcccgcgtgaatgccagtaagaccgctgataaaaaactgaaccttgggaaggaggacgacagcagctccgacagttttgaaaatctggaggaggaaagcaacgagagcggctcaccattcgacccagtctttgaggtagagcctaagattagcaatgataaccccgaagaacacgtgttaaaggtgataccggaggatgcatccgaatctgaggagaaactggaccagaaagaggacggaagcaagtacgagaccatccacctgaccgaggaaccaaccaagctcatgcacaatgcgagcgactctgaagtcgatcaagacgatgtcgtcgagtggaaggatggcgctagccccagcgagtccggtcccggcagtcagcaggtgtcagacttcgaagacaacacatgtgaaatgaaaccgggcacgtggtctgacgaatcttcacagtcagaagacgcacggtcttctaaaccggccgccaagaagaaggcaaccatgcagggtgatcgggaacaactgaagtggaagaacagctcttatggcaaggtagaggggttttggtccaaagaccaaagccagtggaaaaacgccagtgaaaatgatgagcgattgagcaacccccaaatcgagtggcagaactcaaccatcgactctgaggacggcgagcagttcgacaacatgactgatggcgttgcagagcccatgcacggcagcttagccggggtcaagttgtcttctcagcaggct

SEQ ID NO: 5745 - DNA, 3306 bp, synthetic construct
  misc_feature 1..3306: note = source = /note="Description of Artificial Sequence: Synthetic coding sequence"
  source 1..3306: mol_type = other DNA
atgtttcaattaccagttaataacttgggaagcttaagaaaagcaagaaagacagttaaaaaaatattaagtgatattggattagaatattgtaaagagcatattgaagatttcaaacagtttgaaccaaacgacttctatttaaagaatactacttgggaagatgtaggtctttgggatccatcactaacaaaaaatcaagattacagaacaaaaccattttgttgtagtgcttgtccattttcatcaaagttttttagtgcatataagagtcatttcaggaatgttcatagtgaagattttgaaaacagaattttacttaattgtccatattgtactttcaatgcagataaaaaaacccttgaaactcatattaagatatttcatgcacctaatgcatcagcaccatctagttctttatcaacatttaaagacaagaataaaaatgatggattaaaacctaaacaagcagatagtgttgaacaagcagtttattattgtaagaaatgcacttatagagatccattatacgaaatcgttagaaaacatatttatagagagcattttcaacatgtagctgcaccttatattgctaaagctggtgaaaagtctttaaatggagcagtacctcttggttctaatgctagggaagagagtagtattcattgtaaaagatgtctttttatgccaaagagttatgaagctttggttcaacatgttatcgaagaccatgaaagaattggatatcaagttacagctatgataggacatacaaatgttgttgttcctagatcaaaaccattaatgcttattgcacctaaaccacaagataaaaagtctatgggattaccacctagaattggaagtcttgctagtggaaatgttagaagtcttccatcacaacagatggttaatagattatctattcctaaaccaaaccttaactctactggtgttaatatgatgtcatcagttcatcttcaacaaaataattatggagttaaatcagttggacaaggatatagtgtaggacaatcaatgagattaggattaggaggaaatgcaccagtttcaattccacaacaatcacaatctgttaaacaattgcttccatcaggaaatggaagaagttatggattgggatcagaacaaagaagtcaagcaccagcaagatattctttacaaagtgctaatgcttcttctcttagtagtggacaattaaaatcaccaagtttatcacaatcacaagcttctagagttttaggacaatcatcttcaaaaccagctgcagcagctacgggaccaccaccaggaaatacatcatcaacacagaaatggaaaatttgtactatttgtaatgaactttttccagaaaatgtttattcagttcatttcgagaaggagcacaaagcagaaaaagttccagctgttgctaattatataatgaagatacataattttacctcaaaatgtttatattgtaatagatatttaccaactgacactttacttaatcacatgcttattcatggactttcatgtccttattgtagaagtacttttaatgacgttgaaaaaatggcagctcatatgagaatggttcatatagatgaagaaatgggaccaaagacagatagtacattatccttcgatttaacattacaacaaggatcacatactaatattcacttattagttactacttataacttaagagacgcaccagcagagagtgttgcatatcatgctcaaaataatcctcctgttcctcctaaaccacaaccaaaagtacaagaaaaagcagatattccagttaaatcttccccacaagcagctgttccatacaaaaaagatgttggaaaaactttatgcccattatgtttcagtattttaaaaggaccaataagtgatgccttggcccatcacttgagagaaagacatcaagtaattcaaacagttcatcctgtagagaaaaaacttacgtataaatgtattcattgtttaggagtatatacaagtaatatgacggcctcaacaatcactttacatttagttcattgtagaggtgttggaaaaacacaaaacggacaagataaaactaatgctccaagtagacttaatcaatcaccatcattagctccagttaagagaacatatgaacaaatggaatttccattattaaaaaagagaaaattagatgatgattctgatagtccatctttttttgaagaaaaaccagaagaaccagttgtcttagcacttgatccaaaaggacatgaagatgattcttacgaagctagaaaatcatttttaacaaaatatttcaataagcagccatatccaactcgtagagaaattgaaaaattagctgcttctttatggttatggaaatctgatatagcatctcatttcagtaataagcgtaaaaagtgtgttagagactgtgaaaaatataagccaggtgttttattaggtttcaatatgaaagaacttaataaggttaagcatgaaatggatttcgacgcagaatggttattcgaaaatcatgatgaaaaagattctagagttaatgcatctaaaactgcagataaaaaacttaatcttggaaaagaagatgattcatcatcagattcattcgagaatttagaagaagaaagtaacgaaagtggatctccttttgatcctgtatttgaagttgaaccaaaaatttctaatgacaatccagaagaacacgtattaaaggttataccagaagatgcatcagaatcagaagaaaaacttgatcaaaaagaagacggttcaaaatatgaaacgatacacttaacagaagaaccaacaaaacttatgcacaatgctagtgattcagaagttgatcaagacgatgttgtggaatggaaagatggagctagtccatctgaatctggaccaggatctcaacaggtttctgatttcgaagacaatacttgtgaaatgaaaccaggtacttggtcagatgagtcatcacaatcagaagatgctagatcatctaaacctgcagctaagaaaaaagctacaatgcaaggagatagagaacaattaaagtggaaaaattcttcatatggaaaagttgaaggattttggagtaaagaccaatcacaatggaaaaatgcttctgaaaacgatgaaagattaagtaatccacaaattgaatggcaaaattctactattgatagtgaagatggagaacaatttgataatatgacagatggagtcgctgaaccaatgcatggatctcttgcaggagttaaattatctagtcaacaagca

SEQ ID NO: 5746 - DNA, 3306 bp, synthetic construct
  misc_feature 1..3306: note = source = /note="Description of Artificial Sequence: Synthetic coding sequence"
  source 1..3306: mol_type = other DNA
atgttccagctgcctgtgaataacctggggtcgctcagaaaggcccgcaagactgtgaagaagatcttgtccgatattggactggagtactgcaaggaacatatcgaggactttaaacaattcgaacctaatgatttctacctgaagaatacgacttgggaggacgtcgggctctgggacccatccctgaccaagaaccaggattaccgcactaagcccttttgctgctccgcatgcccctttagctcgaagttcttctcagcgtacaagtcgcacttccgcaatgtccactcggaggactttgaaaatcgcatcctgctgaactgtccctactgcacttttaacgcggacaagaaaactcttgaaactcatatcaaaatcttccacgcgccaaacgcttcagccccgtcctcgtcactctccaccttcaaggacaagaacaagaatgacggcctgaagccgaagcaggctgattccgtcgaacaagctgtgtactattgcaagaagtgcacttatcgcgacccgctgtacgaaatcgtgcgaaagcacatttatcgcgaacatttccaacatgtggccgctccatatatcgcaaaggccggcgaaaagtcactgaacggagctgtgccgctgggatcgaacgcccgggaggagagcagcatccactgcaagagatgcctcttcatgccgaagtcctacgaggccctggtgcagcatgtcattgaagatcacgaaaggatcggataccaagtgaccgcgatgatcggacacactaatgtggtggtgcctcgctcgaaaccactgatgctcatcgcaccgaagccgcaggacaagaagtcgatgggtctgccgcccaggatcggaagcctggcttctggcaacgtgagatcactgccttcccagcagatggtgaaccggctcagcatccctaaaccgaatctgaactccactggcgtcaacatgatgtcctccgtgcatcttcagcagaacaactacggagtgaaatcggttggtcaagggtactccgtcgggcaatcgatgcgcctgggcctcggaggcaacgcccctgtgtcgattccgcaacagtcgcaatcagtcaagcagctgctgccgtccggaaacggacggtcatacggactgggaagcgagcaaagatcacaggcgcctgcacgatactcattgcagagcgcgaatgcgtcatcactgtcgtcaggacagctcaaatccccgtcactgtcccagtcgcaggcctcccgcgtgctcgggcaatcgtcgagcaagccagcagctgcggccaccggtccaccgccgggaaatactagctcgactcagaagtggaagatctgcacgatctgcaacgaattgttcccggagaacgtctactccgtccactttgagaaggaacataaggccgaaaaggtgcccgccgttgccaattacatcatgaagattcacaactttacctcgaaatgtctgtactgcaacaggtacctccccaccgacactttgctcaaccatatgctgattcatggcctgtcctgcccatactgccggtccaccttcaacgatgtggagaagatggccgcacacatgcggatggtgcacatcgatgaagagatggggccaaagaccgactcgaccctgagcttcgacctcactctgcaacaagggagccacactaacatccacctgctcgtgacgacctacaatctgcgagatgccccagcggagagcgtggcgtaccacgcccagaataaccccccagtaccgccgaaaccacagcctaaggtccaggaaaaagcagatatccctgtgaagtcgtccccgcaggcagcggtgccgtacaagaaagatgtcggcaagaccttgtgtccgctgtgtttctccatcctgaaggggccaattagcgatgcgctcgcccaccatctgagagagaggcaccaggtgatccagaccgtccaccctgtggaaaagaagctgacctacaagtgcatccattgccttggagtgtacacctcgaacatgaccgcatcgacgatcactctgcaccttgtccattgcagaggagtgggtaaaacccagaacgggcaagacaaaaccaacgcgccaagcaggctgaatcagagcccgtcgcttgctcctgtgaagcggacgtacgaacagatggaatttccgcttctgaagaagcggaaactggatgatgattcagatagcccgtcattctttgaagagaagccggaggaaccagtcgtgctggcactggatccgaagggacatgaagatgattcatacgaagcaagaaaatcctttctgactaagtactttaacaagcagccgtacccgactcgccgtgagatcgaaaaactcgccgcttctctgtggctgtggaagtccgatattgcttcccacttctcaaataagaggaagaagtgtgtgcgcgattgtgaaaagtacaagccaggagtcctcctgggcttcaacatgaaggaactcaacaaggtcaaacacgagatggattttgacgctgaatggctcttcgaaaatcatgatgagaaggattcgcgggtcaacgcctcgaaaacggctgacaagaagttgaatctgggaaaggaggatgattcctccagcgattcgttcgaaaacctcgaagaggagtcgaacgaatcaggatcccctttcgatccggtttttgaggtggaacctaagatcagcaacgataacccagaagaacatgtgctcaaagttatcccagaagatgcttccgagtcagaggaaaaactggaccagaaggaggacggatcgaagtacgaaactatccaccttactgaggagcctactaaactcatgcataacgccagcgactccgaagtcgaccaggacgacgtcgtggagtggaaggacggagcatcaccttccgagtccggaccgggcagccagcaagtgtccgacttcgaagataatacctgcgagatgaaacctgggacttggtcagatgagtcaagccagagcgaagatgcccgatcgagtaagcctgcggcgaaaaagaaggcgactatgcagggcgaccgggagcagctgaagtggaagaattcgtcgtacggaaaggtggagggattttggtcgaaagatcagtcacaatggaagaacgcgtcggaaaatgacgaacggctgtccaacccacagatcgaatggcagaacagcaccatcgattccgaagatggcgagcaattcgacaatatgaccgatggagtcgcggagccgatgcacggctcgctggcgggcgtcaaactgtcctcgcagcaggcc

SEQ ID NO: 5747 - DNA, 3306 bp, synthetic construct
  misc_feature 1..3306: note = source = /note="Description of Artificial Sequence: Synthetic coding sequence"
  source 1..3306: mol_type = other DNA
atgtttcaattaccggttaataatttaggttcgctacgtaaagcgcgaaaaacggttaaaaaaatattatcggatataggtctagaatattgtaaagaacatatagaagattttaaacaatttgaaccgaatgatttttatctaaaaaatacgacgtgggaagatgtaggtttatgggatccgtcgctaacgaaaaatcaagattatcgaacgaaaccgttttgttgttcggcgtgtccgttttcgtcgaaatttttttcggcgtataaatcgcattttcgtaatgttcattcggaagattttgaaaatcgaatactactaaattgtccgtattgtacgtttaatgcggataaaaaaacgctagaaacgcatataaaaatatttcatgcgccgaatgcgtcggcgccgtcgtcgtcgttatcgacgtttaaagataaaaataaaaatgatggtctaaaaccgaaacaagcggattcggtagaacaagcggtatattattgtaaaaaatgtacgtatcgtgatccgttatatgaaatagttcgtaaacatatatatcgtgaacattttcaacatgttgcggcgccgtatatagcgaaagcgggtgaaaaatcgctaaatggtgcggttccgctaggttcgaatgcgcgagaagaatcgtcgatacattgtaaacgttgtctatttatgccgaaatcgtatgaagcgttagttcaacatgtaatagaagatcatgaacgaataggttatcaagtaacggcgatgataggtcatacgaatgtagttgtaccgcgttcgaaaccgttaatgttaatagcgccgaaaccgcaagataaaaaatcgatgggtttaccgccgcgtataggttcgttagcgtcgggtaatgttcgttcgttaccgtcgcaacaaatggtaaatcgtttatcgataccgaaaccgaatctaaattcgacgggtgttaatatgatgtcgtcggtacatttacaacaaaataattatggtgttaaatcggtaggtcaaggttattcggtaggtcaatcgatgcgattaggtctaggtggtaatgcgccggtatcgataccgcaacaatcgcaatcggtaaaacaattactaccgtcgggtaatggtcgatcgtatggtttaggttcggaacaacgttcgcaagcgccggcgcgttattcgttacaatcggcgaatgcgtcgtcgttatcgtcgggtcaattaaaatcgccgtcgttatcgcaatcgcaagcgtcgcgtgttctaggtcaatcgtcgtcgaaaccggcggcggcggcgacgggtccgccgccgggtaatacgtcgtcgacgcaaaaatggaaaatatgtacgatatgtaatgaattatttccggaaaatgtttattcggttcattttgaaaaagaacataaagcggaaaaagttccggcggtagcgaattatataatgaaaatacataattttacgtcgaaatgtctatattgtaatcgttatctaccgacggatacgttactaaatcatatgctaatacatggtttatcgtgtccgtattgtcgttcgacgtttaatgatgtagaaaaaatggcggcgcatatgcgtatggtacatatagatgaagaaatgggtccgaaaacggattcgacgttatcgtttgatctaacgttacaacaaggttcgcatacgaatatacatctattagttacgacgtataatctacgtgatgcgccggcggaatcggtagcgtatcatgcgcaaaataatccgccggtaccgccgaaaccgcaaccgaaagtacaagaaaaagcggatataccggtaaaatcgtcgccgcaagcggcggttccgtataaaaaagatgttggtaaaacgctatgtccgttatgtttttcgatattaaaaggtccgatatcggatgcgctagcgcatcatctacgagaacgtcatcaagttatacaaacggtacatccggttgaaaaaaaattaacgtataaatgtatacattgtctaggtgtatatacgtcgaatatgacggcgtcgacgataacgctacatttagttcattgtcgaggtgttggtaaaacgcaaaatggtcaagataaaacgaatgcgccgtcgcgtctaaatcaatcgccgtcgctagcgccggtaaaacgaacgtatgaacaaatggaatttccgttattaaaaaaacgtaaattagatgatgattcggattcgccgtcgttttttgaagaaaaaccggaagaaccggttgtactagcgttagatccgaaaggtcatgaagatgattcgtatgaagcgcgaaaatcgtttctaacgaaatattttaataaacaaccgtatccgacgcgacgtgaaatagaaaaactagcggcgtcgttatggctatggaaatcggatatagcgtcgcatttttcgaataaacgaaaaaaatgtgtacgagattgtgaaaaatataaaccgggtgtattactaggttttaatatgaaagaattaaataaagtaaaacatgaaatggattttgatgcggaatggttatttgaaaatcatgatgaaaaagattcgcgagtaaatgcgtcgaaaacggcggataaaaaattaaatctaggtaaagaagatgattcgtcgtcggattcgtttgaaaatctagaagaagaatcgaatgaatcgggttcgccgtttgatccggtttttgaagtagaaccgaaaatatcgaatgataatccggaagaacatgttttaaaagtaataccggaagatgcgtcggaatcggaagaaaaactagatcaaaaagaagatggttcgaaatatgaaacgatacatttaacggaagaaccgacgaaattaatgcataatgcgtcggattcggaagtagatcaagatgatgtagttgaatggaaagatggtgcgtcgccgtcggaatcgggtccgggttcgcaacaagtttcggattttgaagataatacgtgtgaaatgaaaccgggtacgtggtcggatgaatcgtcgcaatcggaagatgcgcgatcgtcgaaaccggcggcgaaaaaaaaagcgacgatgcaaggtgatcgagaacaactaaaatggaaaaattcgtcgtatggtaaagtagaaggtttttggtcgaaagatcaatcgcaatggaaaaatgcgtcggaaaatgatgaacgtctatcgaatccgcaaatagaatggcaaaattcgacgatagattcggaagatggtgaacaatttgataatatgacggatggtgttgcggaaccgatgcatggttcgctagcgggtgttaaactatcgtcgcaacaagcg

SEQ ID NO: 5748 - DNA, 3306 bp, synthetic construct
  misc_feature 1..3306: note = source = /note="Description of Artificial Sequence: Synthetic coding sequence"
  source 1..3306: mol_type = other DNA
atgttccaacttcctgtgaacaatctcggctcgttgcgcaaagcgcgaaagaccgtgaagaaaatcttgtccgatattggactggaatactgcaaagaacacatcgaggatttcaaacaattcgaaccgaacgatttctacctcaagaataccacctgggaggacgtcgggctgtgggatccgagcctgaccaagaatcaggattacagaacgaagccgttttgctgttcagcatgcccgttctcgtcgaaattcttctcggcatataagtcgcacttccgcaacgtgcattcagaagatttcgagaacaggattcttctgaactgcccctactgcactttcaatgcagacaagaaaactcttgaaactcacataaagatattccatgcgccaaacgcctcggccccaagcagcagtctgtcgaccttcaaggacaaaaacaagaacgacggactgaaaccaaaacaagccgattcagtggaacaagcggtgtactactgcaagaaatgcacttaccgcgatcctctttacgagatcgttagaaagcatatctaccgagaacatttccagcacgtcgccgctccttacatcgcaaaggccggcgagaagtccctcaatggcgcagtgccactggggtcgaacgccagagaagaatcgtcaatccactgcaagcgctgcctcttcatgcccaaatcgtacgaggctctggtccagcatgtgatcgaggatcacgaacggatcggttatcaggtgaccgctatgattggacacacgaacgtggtggtcccgcgttccaagccactcatgttgatcgcgcccaagccacaggacaagaagtcgatgggtctgccgccaagaattggatctcttgcctcgggaaacgtacgctccttgcctagccagcagatggttaatcggctttccatcccgaaacctaatctgaattcaactggtgtcaatatgatgtccagcgtccacctgcaacagaacaactacggagtgaaatccgtcggacagggatactcggtcggacagagcatgcgcctcgggctcggtggcaatgctccggtgtcaatccctcagcaatcgcaatccgtcaaacagctgctgcccagcggcaacgggagatcgtacgggctcggcagcgagcaacgttcccaggcaccggcaaggtacagtctgcaatctgccaacgcaagtagcctgagctccggacaactcaaatccccgtcactctcacagagccaggcctccagggtcctgggacagtcgtcgagcaagcccgctgccgctgccactggaccaccaccgggaaacacgagctctactcaaaagtggaaaatctgtaccatctgcaacgaactctttcctgaaaatgtgtattccgtgcatttcgaaaaggagcacaaggccgaaaaggtcccagctgtggcaaactacattatgaagatccataacttcaccagcaagtgcctctactgtaacaggtatttgccgactgatacccttctgaaccatatgctgatccatgggctgtcatgcccgtactgccgctcaacctttaatgacgtggagaagatggccgcacacatgcggatggtgcatattgacgaagaaatgggcccaaagactgacagcactctttcatttgatctcacgctccaacagggatcgcacactaacattcacctcctggtgaccacctataatctccgagacgctccggccgaatccgtggcataccacgcccaaaacaacccaccagtgcctccgaagcctcagccgaaggttcaagagaaggccgacattccggttaagtcctcacctcaggccgcggtcccctacaagaaggacgtgggcaagactctttgccctctgtgcttctctatcctgaaaggaccgatctctgatgctttggcgcaccatctgcgggagcgccaccaggtcatccaaaccgtgcaccctgtggaaaagaaactcacgtacaagtgcattcactgtcttggggtgtacacttcaaatatgactgcctcgaccatcaccctgcatctcgtccattgtcgcggagtgggtaaaacccagaacgggcaggataagactaacgctcctagccggttgaatcagtccccttccctggccccggtaaaacggacttacgagcagatggagttcccgctgctgaagaagcggaagctggatgatgatagtgactcgcccagcttctttgaggagaaaccggaagaaccggtggtgctcgctctggacccgaagggccacgaggacgattcgtacgaggccagaaagtccttcttgaccaaatactttaacaagcagccctacccgacccgcagagaaatcgagaaactggcggcgtccctttggctgtggaagagcgatatcgccagccactttagcaataagagaaagaaatgtgtgagagactgtgaaaagtacaaaccgggagtgctcctggggtttaacatgaaggaattgaataaggtgaagcacgaaatggacttcgatgccgagtggctgttcgaaaatcacgatgaaaaagactccagggtgaacgcgagtaagaccgcggacaagaaactgaatctggggaaggaggacgactcgtcgtcggactctttcgaaaacctggaggaagagtccaacgagtcgggatccccatttgatccggtgttcgaggtcgagccgaagatcagcaatgacaacccggaagagcatgtcctgaaggttatcccggaggacgcctcggaatcagaagaaaagctcgaccagaaggaagatggatccaagtacgaaactatccatttgaccgaagagcctaccaagctgatgcacaatgcgtcggacagcgaagtggatcaggatgacgtagtggaatggaaagatggagcgtctccatccgaatccggaccgggttcccaacaggtttcagactttgaggataacacttgcgaaatgaagccgggtacttggtcggacgagagctcacaatcggaagatgcgcggtcgtcgaagccggctgctaaaaagaaggcaactatgcagggagatcgcgaacagctgaaatggaagaactcttcatacggaaaagtggaaggattttggtcgaaggaccagtctcaatggaagaatgccagcgagaacgacgaacggctttctaacccacagatcgaatggcagaactcaaccatcgactcagaggacggcgagcagttcgataacatgaccgacggggtggcggagccaatgcacggctcgttggcgggagtgaagctgtcctcacaacaggcg

SEQ ID NO: 5749 - DNA, 3306 bp, synthetic construct
  misc_feature 1..3306: note = source = /note="Description of Artificial Sequence: Synthetic coding sequence"
  source 1..3306: mol_type = other DNA
atgttccagctccccgtgaacaatcttggttccctgagaaaagcaagaaagactgtcaagaaaattctgtccgatatcgggctggaatattgtaaggagcatattgaagatttcaagcagtttgaaccaaatgatttctacctcaagaatactacctgggaagatgtgggactctgggatcctagccttacgaagaatcaagattacagaaccaagccgttctgttgctcggcatgccctttttcttccaaattcttctcagcgtataagtcgcatttcaggaacgtgcattcggaagatttcgaaaataggattctgctcaattgtccctactgtaccttcaatgccgacaagaaaactcttgagactcatatcaagatttttcacgcgccgaacgcatccgcccctagctccagcctctccacctttaaggataagaacaaaaatgacggtctgaagcctaaacaggcggatagcgtggagcaagcagtctactactgtaagaaatgtacttacagggaccctctgtacgaaattgtccgtaagcacatttaccgagagcatttccagcatgtggcagcaccgtacatagcaaaggctggggaaaagtcgctgaacggagcagtcccactgggttcgaatgcacgggaagaatcctcaattcattgcaaacgctgtcttttcatgcctaaatcctacgaagcactggtgcagcacgtgattgaagatcatgaaagaattggctaccaagtgactgcaatgattgggcacaccaacgtggtggtgccacgatccaagccactgatgctgatcgcacctaagccacaagataagaagtccatgggtctgccacctcgcataggctcgttggcatcgggtaatgtgcgatcattgccatcgcaacagatggtgaacagactctctattccaaaacctaacctgaactccaccggagtgaatatgatgtcgtccgttcatctccaacaaaacaactacggagtgaagtctgtgggtcaggggtactcagtcggtcaatcgatgcgcctggggctcggtggtaacgctccagtgagtataccgcaacagtcccaatccgtgaaacagctgctgccatcaggaaatggtcggtcgtacggactcggctccgaacaaagatcgcaggcgccagcaagatactccctgcaaagcgcgaacgcgtcgtctctgtcctccggtcaacttaagtccccttcgctgtctcaatcacaggcatcgagagtgcttggccagtcgtccagcaaacctgcggcagcagcaaccggacctcctcccggtaacactagctcaacccagaagtggaagatttgcactatttgcaatgaactctttccggaaaacgtctactccgtccactttgaaaaagagcataaggcagaaaaggtccctgccgtggccaactacatcatgaagatacacaactttaccagcaagtgtttgtactgtaatagataccttccgaccgataccctcctgaaccatatgcttatccacggactctcttgtccatactgcagatcaaccttcaatgacgtggaaaagatggcggcacatatgaggatggttcatattgatgaggagatgggtcccaagaccgactccactttgtcctttgacctcactcttcagcaaggatcacataccaacattcaccttttggtcaccacctacaatttgagagacgcgcctgcagaaagcgtcgcataccatgcacagaataatcctccagtccctcctaaaccccagcctaaggttcaggagaaagcggatattccagtgaagtcctcgcctcaggcagcagtcccctacaagaaggatgttggtaagactctgtgtcctctgtgtttctccattctgaagggtcctatatctgatgccctcgcgcatcacctgagagagagacatcaggtgatccaaactgtccacccagtcgaaaagaagctgacctacaagtgcatccattgtctgggtgtgtatacttccaacatgaccgcgtcgactatcactcttcatctcgtgcattgtcggggtgtgggcaagacgcaaaacggtcaggataagaccaacgcaccatccaggctgaaccaaagcccatctctcgccccagtgaaacgtacctacgagcagatggaatttccccttttgaagaaacgtaagctcgatgatgattcggatagcccttcctttttcgaggagaagccagaagaaccagtcgtcctggcacttgaccccaaagggcacgaagatgactcgtacgaggccagaaagtcattcctgaccaagtacttcaataagcaaccttaccctacccgtagagaaattgagaaacttgcagcttcactgtggctttggaagagcgatattgcatcccatttttcaaacaaacggaagaaatgtgtgcgggattgtgaaaagtacaaacctggagtcctcctgggctttaacatgaaggaactcaacaaggtgaagcatgaaatggactttgacgcagaatggcttttcgagaatcatgatgaaaaagattccagagtgaacgcttctaagactgcagataagaaacttaacctggggaaggaggatgattcatcgtcggactcatttgagaaccttgaggaagagtcgaatgaatcaggttcgccttttgatcctgtgtttgaggtggaacccaagatttcgaacgataacccggaagaacatgtcctgaaggtgatccccgaagatgcatcagaatcggaagaaaagctcgaccagaaggaagatggatcaaaatacgaaaccatccatcttacggaggagcctactaagctcatgcataatgcctcagactcagaggtcgaccaggatgacgtagtcgaatggaaggacggagcttccccttccgaatccgggcctggctcacagcaggtcagcgattttgaagataacacttgtgagatgaagcctggaacttggtcagatgagtcctcgcaatcggaagatgcacgtagctccaaacccgccgcgaagaagaaagcaactatgcaaggcgatcgggagcaactgaagtggaagaattcgagctacggtaaggtggagggattctggagcaaagaccaatcccaatggaaaaatgcgtcagaaaacgatgaacgtctgagcaatccgcaaatcgaatggcaaaactccactatcgattcagaggatggagaacaatttgataacatgacggacggcgtggcagaaccaatgcatgggtcacttgctggcgtgaaactttcgagccaacaagct

SEQ ID NO: 5750 - DNA, 3306 bp, synthetic construct
  misc_feature 1..3306: note = source = /note="Description of Artificial Sequence: Synthetic coding sequence"
  source 1..3306: mol_type = other DNA
atgtttcagctgcccgtgaataatctaggaagccttcggaaggcccggaagactgtgaagaagatactatccgacataggtcttgagtactgtaaagagcatattgaggattttaagcagttcgagccaaatgatttctacctgaaaaacactacctgggaggatgttggcctgtgggatccctctctgaccaaaaaccaggattatcgaaccaagcccttttgttgtagcgcctgtcccttctcttctaaattcttcagcgcatacaagagtcattttaggaacgttcattccgaggatttcgagaacagaattctcttaaactgcccttattgcacctttaatgcagataagaaaaccctggagactcacataaaaattttccatgcacctaacgctagtgcaccaagctccagtctgtccacctttaaagataagaacaaaaacgacggtctaaagcccaagcaggccgacagtgtggagcaggcagtttattattgcaagaaatgtacatatagagatcctctatacgaaatcgttcgaaagcacatttaccgggaacattttcaacacgtcgccgccccatacattgctaaagccggcgagaagtccctcaatggagccgtgcctttaggcagtaatgccagggaggaaagcagtattcattgcaagaggtgcctgttcatgccaaagtcttacgaagctctggttcagcatgttatcgaggaccacgagcgaatcggataccaagtgaccgcaatgatcggacacactaatgtggtggtacccaggtctaaacccttaatgctgatcgcacctaagccacaggataagaagagtatggggttgcctccccgaattggcagcctagcaagcgggaatgtcaggtccctgcctagccagcaaatggtgaacagattgtctatacccaagccgaacctgaattctaccggggtgaacatgatgtcctcagtgcatttacagcagaataattacggggtcaagtcagtgggacaggggtactccgtgggccagtccatgcgactaggcctcggcggaaacgcacctgtcagtattcctcagcaaagtcagtcagttaaacagctgcttccaagtgggaatggcagatcttatggactggggtctgaacaaagaagccaggcacctgctcgttacagcctgcagtctgctaatgctagcagcttaagcagcggacagttaaagtcccctagtctatcccagagtcaagcatctcgggtcctaggccagtcctcctctaagcccgccgctgctgccactggcccccccccaggcaacacttctagtacacagaaatggaagatttgtaccatatgcaacgagctgtttcctgaaaacgtgtacagtgtgcatttcgaaaaagagcataaggcagagaaagtgcctgccgttgcaaattacattatgaagatccataacttcacctcaaagtgcctctactgtaatcgctacttaccaacagataccttactaaatcatatgttaatccacggcctgtcttgtccttactgtaggagcacttttaacgatgtagagaagatggcagctcatatgaggatggtgcatatagacgaggaaatgggacccaaaacagatagcacattgtcctttgacttaaccctgcaacaggggagtcacaccaatatccaccttctcgtcactacttataacctaagggacgcccctgccgagagcgttgcatatcatgctcagaataatcctccagtgcccccaaaaccacagcctaaagtgcaggagaaagctgatatcccagtgaaatcttccccacaggctgccgttccctacaaaaaggacgtgggaaagactctgtgtcctttatgttttagtatcctgaaggggcctataagtgatgctttggctcaccacctacgcgagcgccaccaggtcatacagactgtgcacccagtggagaagaagctgacttataagtgtatccactgtctaggggtgtataccagtaacatgacagctagtaccattaccctgcatctggtacattgtaggggggtggggaaaacccagaacggccaagacaaaaccaatgccccatcaagactgaaccagagtcctagcctggcaccagtgaagcgcacctatgagcagatggaatttcccctactgaagaagcgcaaacttgatgacgattctgacagcccttcttttttcgaagagaagcccgaggagcctgtcgttctagctctggaccctaaggggcacgaggatgactcctatgaagcccggaaatccttcttgactaaatattttaataaacagccttaccctaccagacgcgaaatcgagaaactggcagccagtctgtggctgtggaagtcagacattgcaagccactttagcaataagcgcaaaaaatgcgttagagattgcgaaaagtacaaacctggagttctcctcggctttaacatgaaggaactcaataaggtcaaacacgagatggacttcgacgccgagtggctcttcgaaaaccacgacgagaaggattctagagtgaatgcctctaagaccgctgacaagaagctgaacctgggcaaggaggacgactcatctagtgactccttcgaaaatctggaagaagaatcaaacgagtcaggctctccatttgatccagtgttcgaggttgagcctaagataagtaacgataaccccgaggagcacgtgttaaaagtgatccccgaggatgccagcgagtccgaggagaagctggaccaaaaggaggacggatccaagtacgaaaccatccacctgacagaggagcctacaaaactgatgcataatgccagtgattctgaggtggaccaagacgacgtcgtggaatggaaggacggagcatccccctccgagagcggccccggctcccagcaggtgagtgatttcgaagacaatacttgcgagatgaaacctggcacatggtctgacgaaagcagccagagcgaggatgccaggtcatctaaacctgctgccaagaaaaaagcaactatgcagggagatcgagagcaactgaaatggaagaacagcagctacggcaaggttgagggtttctggtccaaggatcagagtcagtggaaaaacgctagtgaaaatgatgaacgcctgtcaaacccccaaattgaatggcagaactctaccattgattccgaggatggggagcagtttgataacatgacagatggagtggcagaaccaatgcacggatccctcgctggagtgaaactgtcatcccagcaggca

SEQ ID NO: 5751 - DNA, 3306 bp, synthetic construct
  misc_feature 1..3306: note = source = /note="Description of Artificial Sequence: Synthetic coding sequence"
  source 1..3306: mol_type = other DNA
atgttccagctgcctgtcaataacctggggtctctgcgtaaggcccggaagaccgtgaaaaaaatcctttccgatatcggtctcgaatactgcaaagaacacattgaggacttcaagcagttcgagccaaatgatttttacttaaaaaacacaacttgggaggacgtgggcctttgggacccatctctcactaaaaatcaggactatcgaaccaaaccattctgctgtagtgcatgcccgttctcttctaaattcttctccgcctacaaatctcatttccgcaatgtacattcggaggactttgaaaaccggatcctgctcaactgcccttattgtacattcaatgccgataaaaaaacattggagacacacattaaaatctttcacgccccgaatgcttccgcccctagctcttccctgtccacattcaaagacaaaaacaagaatgatggtctaaaacctaagcaggctgactctgtcgaacaagccgtgtactattgcaagaagtgcacctatcgtgatcctctctatgaaattgtgcgcaagcacatatatagggagcactttcagcacgttgccgcaccttacatcgcgaaggctggggagaagtccttaaacggggctgtgcccctgggctctaacgcccgcgaggaatcttcaatccattgtaagagatgtttgttcatgccaaagagctacgaggccctggtgcagcacgttatcgaggatcatgagagaataggttaccaagtcaccgcaatgattggacacacaaacgttgtagtaccaagatcgaagcctctgatgctgatcgctcccaagccgcaagataagaagagtatggggctgcctcctagaattgggtccctggcgtccggcaacgtcaggtccctcccttcacagcagatggtgaaccggttgtctatccccaaaccaaatctgaattcaaccggcgttaatatgatgtcttcagtgcatctgcagcagaataattatggggtgaaatcagtgggccagggatacagcgttggccaaagtatgaggttaggactaggaggaaacgcaccggtcagcataccgcagcagtcccaaagtgtgaaacagctccttccatcgggtaacgggcgaagctacggcctcgggtctgaacagaggagccaggcccctgctcgctactctttgcagtccgcaaacgcatcttctttgagcagtggacagttaaagtccccttctctctcgcagtctcaggctagtagagtcctgggacagagttcaagtaaacctgccgctgcagccaccggtccaccaccaggcaatacttcctctacacaaaagtggaaaatctgtactatatgtaatgaattgtttcctgagaacgtgtattccgtacactttgagaaagagcacaaggccgagaaggtccccgcagtggccaattatattatgaaaatccacaacttcactagcaagtgtctctactgtaatagatatttacctacggatacactacttaaccacatgctgattcatggactatcttgcccctactgcaggtctacatttaacgatgttgagaaaatggctgcacacatgcggatggttcatatcgacgaggagatgggaccaaaaaccgatagcaccttgtcctttgacctgactctgcagcaggggtcgcacactaacatacacttgcttgtgaccacatataacctgagagatgcccccgcagagtccgtggcatatcacgctcagaataacccgcctgtcccccctaaacctcagcccaaagtacaggaaaaagccgatataccggttaaatcctctccccaggccgctgtaccctacaagaaggatgttggcaagacactgtgcccactgtgcttttcgattctaaaaggccccataagtgatgcactcgctcatcacttgcgagaacgccaccaggtgatacagaccgtacacccagtggaaaagaaattaacttataaatgcattcactgcctgggtgtctacacgtctaacatgactgcctccaccattacgctgcacctggtgcattgtaggggcgtgggcaagacacagaacggccaggataagacaaatgcaccatctcggcttaaccagtcccctagcctggccccagttaagcgtacctacgagcaaatggagtttccactgctaaaaaagagaaaactcgatgacgacagcgattctccaagtttcttcgaagaaaaacctgaagagcccgtggtgctggccctagaccctaagggacacgaggacgactcatacgaagcgcgtaagtcattcttgaccaagtactttaacaagcaaccgtacccaacccgacgtgaaatcgaaaagctcgccgcctccctatggctgtggaaatcggatatcgcatcacactttagcaacaagcgaaaaaaatgtgtacgggattgcgagaagtataaaccaggggtgctcttgggtttcaacatgaaggaactcaataaggtaaagcacgagatggattttgatgctgaatggttgtttgagaatcatgacgagaaggacagccgcgtcaacgcttccaagaccgccgataaaaaattaaatcttgggaaggaggacgactctagttcagattcttttgagaaccttgaagaagaatctaacgagagcggctctccgtttgaccccgtatttgaggtcgagcccaaaatctccaacgacaatccggaggaacacgtgttgaaagtgattccagaggacgcatcagagagtgaggagaaattggaccagaaagaagatggcagcaaatatgagaccattcacctgaccgaagagccaaccaagctgatgcataatgccagtgattcggaggtcgatcaggatgatgtggtggagtggaaagatggtgcctcaccctctgagtcggggcccgggagtcagcaggtcagcgatttcgaagacaatacatgtgagatgaagccagggacttggtcagacgagtcctcacaaagtgaggacgcccgttcatccaaacctgctgcgaaaaaaaaagctactatgcaaggggaccgagagcagctgaaatggaaaaactcatcctacgggaaagtggaaggattctggagtaaggatcaatcccagtggaagaatgcaagcgagaacgacgagcggctctcaaaccctcagattgagtggcaaaactcaactatcgattctgaggacggtgaacaatttgacaacatgacagacggcgtcgccgagcctatgcatggctcactcgcaggcgtgaagcttagtagtcaacaggcc

SEQ ID NO: 5752 - DNA, 3306 bp, synthetic construct
  misc_feature 1..3306: note = source = /note="Description of Artificial Sequence: Synthetic coding sequence"
  source 1..3306: mol_type = other DNA
atgttccaactcccagtgaacaaccttggatccctgcgaaaggcacgtaagactgtgaaaaagattcttagcgatattggtcttgagtactgtaaggaacatattgaggatttcaagcagtttgagcctaatgacttctacctcaagaataccacgtgggaggatgtgggattgtgggacccttcgctgaccaagaaccaggactaccggaccaagccattttgctgctcagcctgtcctttctcgagcaagttcttcagcgcctacaagtcccattttagaaatgtgcattcagaggactttgagaatagaattctcctcaactgtccatattgtacgttcaacgctgataagaaaacgcttgaaactcacataaagatattccatgcgcccaacgcatccgcgcctagctcgagcctctccacttttaaggacaagaacaaaaacgatggactgaagcctaaacaggcagattcagtcgaacaagcagtgtactactgtaagaaatgtacttaccgggacccactgtacgaaattgtgaggaaacatatctaccgggagcatttccaacatgtggcggcaccttacattgcaaaggcgggagagaaatcacttaatggtgcagtgccgctcggctccaatgcaagagaagagagctccatccactgtaaacgctgtcttttcatgcccaaatcctatgaagcccttgtgcaacatgtaattgaggaccacgagaggattggttaccaagtgaccgcgatgatcggtcataccaatgtggtcgtgccaaggagcaagcctctgatgttgatagcccctaagccacaggataagaagtcgatggggcttccaccgagaatcggtagcctcgcatccgggaacgtcaggtcgctgccatcccaacaaatggtgaacagactctcaatcccaaagcccaacctgaactcaactggggttaacatgatgtcctcggtgcatctccaacaaaacaattacggcgtgaaatctgtgggtcaaggctactccgtggggcaatccatgcgtctcggacttggaggcaatgcgcctgtgtcaataccccagcaaagccaatccgtcaaacagcttttgcctagcggtaacgggcggtcctacggccttggatccgagcagagatcccaagcaccggcacgatactccctgcaatcggcaaacgcttcgtccttgtcaagcggccagctgaagagcccatcgctgtcgcaatcccaggcctcaagggtgctcggtcagagctcatccaagcctgcagccgcagccactggtcctcccccagggaacacttcatccacccaaaagtggaaaatctgtaccatatgtaacgaactttttccagagaatgtgtacagcgtgcattttgagaaggaacacaaagcggaaaaggtccctgctgtggcaaactacattatgaagattcataacttcactagcaaatgtctttactgtaatagataccttcctactgatactcttcttaaccacatgctgatccatggtctttcatgcccatactgccgatccactttcaacgatgtggaaaagatggcagcacatatgcgtatggtgcatatcgatgaagaaatgggccctaagaccgattcgactctgtcctttgatttgacgcttcagcagggatcacataccaacattcacctgctggtcacgacttacaatctgagagatgccccggcggaatccgtggcgtaccatgctcagaacaaccctcctgtgcccccgaagcctcagccaaaggtgcaagaaaaggcagatatccccgtcaagtcgagcccccaggcggcagtgccctataagaaggacgtgggcaagactctgtgccctctttgtttttcgattctgaaaggtccaatctctgatgctctggcacaccatttgcgggaacgccatcaggtcatccagaccgtacacccagtggagaaaaagttgacctataagtgtatccactgtctgggtgtgtacacttcgaacatgacggcaagcactataacgcttcatttggtgcactgtcgaggtgtcggaaagacgcaaaacggacaggataagaccaacgccccatcgcgcctgaatcaatcaccttcacttgcaccagtcaagcgcacctacgaacagatggaatttccgcttctcaagaaaaggaagctggatgatgattccgactcgccttccttctttgaagaaaagcccgaagagccggtcgttctggcgcttgatcccaagggtcatgaggatgattcctacgaagccagaaagtcgttcttgacgaagtactttaacaagcagccgtaccctactagacgggaaattgagaaactggcagcctctctttggctttggaagtcggatattgcatctcatttttcgaataagcgaaagaaatgtgtgcgtgactgtgagaaatacaaaccaggggtgcttctcggatttaacatgaaggaactgaacaaggtcaaacatgagatggattttgacgcagaatggctgtttgaaaaccacgacgaaaaagattccagagtcaacgcgtccaaaactgctgataagaagctgaacctcggaaaggaagatgacagctcatccgatagcttcgaaaaccttgaagaagaaagcaatgagtccggttctccatttgatcccgtgtttgaagtggaacctaagattagcaacgacaatcctgaggaacatgtgctgaaggtcatacctgaagatgcctcggaatcggaggagaagctcgatcagaaagaagatgggagcaaatacgaaacgatccaccttaccgaagagcctaccaaacttatgcacaatgcatcggactctgaggtcgatcaagatgatgtggtcgagtggaaggacggagccagccctagcgagtcgggacccggaagccagcaggtatctgacttcgaagataacacctgtgaaatgaagcctggcacttggtcggatgaatcgtcccagtccgaggacgcacgtagcagtaagcctgcagcgaagaagaaggctacgatgcagggagatagggaacagctcaagtggaagaactcgtcatacggaaaggtggagggcttctggtcgaaggaccagtcgcaatggaagaacgcatccgaaaatgatgaacgcctgtccaacccccaaattgaatggcagaatagcaccatcgacagcgaggacggcgagcaattcgataacatgaccgacggagtcgcagaacctatgcacggttcgcttgccggtgtgaaacttagctcacagcaagca

SEQ ID NO: 5753 - DNA, 3306 bp, synthetic construct
  misc_feature 1..3306: note = source = /note="Description of Artificial Sequence: Synthetic coding sequence"
  source 1..3306: mol_type = other DNA
atgttccagcttccagtaaataatctcggcagcctgagaaaggcacgcaagaccgtgaaaaagattttgtcagatatcgggctcgagtattgcaaggagcacatagaggatttcaagcagtttgagcccaacgatttttatctcaagaacaccacatgggaagatgtaggcctctgggacccttccctgactaaaaaccaggattaccggactaaacccttttgttgttcggcctgtccattcagtagcaagtttttttcggcatacaaatctcatttcagaaatgtccacagcgaagacttcgaaaaccggattctcctgaattgtccctactgtaccttcaatgcggataagaaaacgcttgaaactcatatcaaaatcttccacgcgcccaatgctagcgctccctccagctccctgagcacatttaaagataaaaataagaatgatggtctgaagcccaaacaagccgactctgtggaacaagccgtttactactgtaagaagtgtacataccgtgatccactctatgagattgtccggaaacatatctacagagagcacttccaacacgtggccgccccctatatcgccaaggcaggagagaaatctctgaatggtgcagtcccgttgggaagtaatgccagagaagagagctctattcattgtaagcggtgcttgttcatgcccaaatcttatgaggctctagtgcaacacgtgatcgaagaccacgagagaatcggataccaagtgacagccatgatcggccataccaacgtcgtcgttccccgcagcaaacctttgatgctaatcgcccccaaacctcaggataaaaagtcaatggggctacccccgcgcattggatcactagcaagtggaaatgtgaggtcattgccctcccagcagatggtgaaccgcttgagcatccccaaacctaacctgaattctactggagtcaatatgatgtcatctgtccacctgcagcaaaacaactatggcgtaaagagtgttgggcagggttattccgttggtcagtccatgcggctgggactaggtggcaacgcgccagtgagcatacctcaacagagccagtctgtgaagcagctgctcccatcgggtaacgggcggtcctacgggctcggctcagagcagcgaagccaggcacccgctcgctatagcctacagtccgcaaacgcgtcctccttgagcagcggtcagctcaagagcccctccctgtcccagagccaagcaagtagagttcttggacagagcagctccaagcccgcggcagccgccacagggcctccacccggtaataccagttccacgcagaagtggaaaatttgcacaatctgcaatgaactgttcccggagaacgtctactctgtccacttcgaaaaggaacacaaagctgagaaagtgcccgccgtcgcaaattacatcatgaagattcataacttcacctccaagtgcctgtattgcaaccggtatctcccaaccgacacacttctgaatcatatgctgattcacggattgagctgcccttactgccgaagtacctttaatgacgtagagaagatggcggctcacatgcgcatggtccacatcgacgaagagatggggcccaagactgacagtacactttccttcgacctaacactgcagcaaggcagtcatacaaatattcacctgctcgtgacaacttacaacctgcgcgacgcacctgctgaaagcgtggcttaccatgctcaaaataatccgcctgtccctcccaagccccagccaaaggtccaggaaaaagcagacatccctgtgaaatcatctccccaggccgcggttccttacaaaaaagatgtgggtaagaccctgtgccccctctgttttagcattcttaagggcccaataagcgacgctctggcccaccacttgcgggaacgacaccaagtgatccagaccgtccatccagttgagaaaaagctgacatataaatgtattcactgcctgggggtttacacctccaatatgaccgccagtacgataacgctgcacctcgttcactgtagaggagtggggaaaactcaaaatggtcaggataagacaaatgctcccagtagactgaatcagagtccaagtctggcacccgtgaaaaggacttacgagcagatggagttcccattactgaagaagaggaagctggacgatgacagtgacagcccgtcattcttcgaggaaaaaccagaggagcctgtcgttttggccttagatcccaaagggcacgaagacgactcctacgaggcccgcaaatcgtttctgactaaatacttcaataaacagccttatcccacgcggcgcgaaattgaaaagctagccgcgtctctttggctctggaagtctgacatcgcgagccattttagcaataagcggaaaaaatgtgtcagagattgcgagaaatataaacctggggttctgctcgggttcaacatgaaggagctgaacaaggtcaagcacgaaatggatttcgacgcagagtggctgtttgaaaatcacgatgagaaagatagccgcgtgaacgccagcaaaaccgcggacaagaaattaaatctggggaaggaagatgatagctctagcgatagttttgaaaatttagaggaagaaagcaatgaaagcggaagcccctttgacccagtatttgaagtggaacctaagataagtaacgacaatcctgaggagcatgttttaaaagtcatccctgaagacgcaagcgagtccgaagaaaaacttgatcaaaaggaagacggatcaaaatacgagaccatccacctaactgaggagccaacaaagctgatgcacaacgcaagcgactcggaagtcgaccaagacgatgtggtagagtggaaggatggtgctagtccatcagagagcggaccgggttcacagcaggtgtctgattttgaggacaatacttgtgaaatgaagcctgggacctggtctgacgagtcctcacaatccgaggatgctcgcagttctaaaccggccgccaaaaagaaagccaccatgcagggcgatcgtgaacagctgaaatggaagaattcgtcctatggcaaggttgaagggttctggtccaaagaccagtctcagtggaaaaatgcttcggaaaatgacgagcgtctgtccaaccctcaaatcgagtggcaaaactccactatcgactctgaggacggtgaacagtttgacaatatgaccgatggggtcgctgagcccatgcacggtagcctggccggtgtgaagctgagttcccagcaggcc

SEQ ID NO: 5754 - DNA, 3306 bp, synthetic construct
  misc_feature 1..3306: note = source = /note="Description of Artificial Sequence: Synthetic coding sequence"
  source 1..3306: mol_type = other DNA
atgtttcaacttccggtgaataacctgggatctctgcggaaagccagaaagactgtgaagaaaattctctcggacatcggcttggaatactgtaaagagcacatcgaggacttcaagcagttcgagccgaatgacttctatttgaagaacacgacgtgggaggacgtcggattgtgggacccaagcctgactaagaaccaggattaccgaaccaagccgttttgctgcagcgcatgcccattcagctccaagtttttctcagcctacaagtcgcacttccggaatgtgcactcagaggacttcgaaaatagaatcctcctcaattgcccctactgcaccttcaatgccgacaaaaagaccctcgagactcacataaagatcttccatgcgccaaacgcctcggccccgagcagcagcctgagcacttttaaggacaaaaacaagaatgatgggttgaagccgaaacaggccgactcagtggagcaggcggtgtactactgcaagaaatgtacttaccgggatccgctttacgaaatagtaaggaagcacatttacagagagcatttccaacacgttgccgccccgtacatcgccaaagccggagaaaagtcgctgaatggggcagtcccactgggaagcaatgccagagaggagtcgtccatccattgcaagcgctgcttgttcatgccgaagtcatacgaagccctggtacagcatgtcatcgaagatcacgagcgcatcggttaccaggtcactgccatgatcgggcataccaacgtcgtggtgcccagaagcaagcctctgatgctgatcgccccgaaacctcaggacaagaagtctatgggactgccgcctcggattggatccctcgcatcaggcaacgtgcgctccctgccgtcgcaacaaatggtgaatcgcctgtcgatcccaaaaccaaatttgaatagtactggcgtgaacatgatgtcctcggtgcacctgcagcagaacaactacggcgtaaagagcgtcggacagggttattcagtgggccaatcaatgcgcctgggactgggaggaaacgccccggtgagtatcccgcagcaaagccagtccgtcaagcagctgctcccgtccggtaacggacgctcctacggcctcggatccgaacagcgctcgcaagcgccggctcgctactcgctccagtcagcaaacgcatcctcactgtcgtcaggtcaacttaagtccccgtccctctcgcagtcgcaggcgtcgcgggtgcttggccagtcctcgtcaaagcccgcagcagctgctaccggacctccgcccggtaacacctcatccacccagaagtggaaaatctgcaccatctgcaacgagctgtttcctgagaatgtgtactccgtgcatttcgagaaggagcacaaggctgaaaaagtgcccgcggtggccaactacatcatgaaaatccacaatttcacctcaaaatgcctgtactgcaaccgatacctgccaactgatacgctgctcaaccatatgctcatccacggactgtcatgtccatactgcagatccactttcaacgacgtcgaaaagatggcagcgcacatgcgcatggtccatatcgacgaagagatggggccaaagaccgatagcactctttcctttgatctgaccctgcaacaggggtcgcatactaacatccacctcctggtcaccacctacaacctgcgggatgccccggctgaatcagtcgcgtaccacgctcagaacaacccaccagtgcctccaaagcctcagccgaaggtccaggagaaggcggatatcccggtgaagtcgagccctcaagctgcggtgccttataagaaagacgtgggaaagactctgtgcccgctctgtttcagcattctcaaggggccaatcagcgacgctctggcacaccacctccgggagcgtcaccaagtgattcaaactgtgcacccagtggagaaaaagctgacgtacaagtgcatccattgtctgggcgtgtacactagcaatatgacggcgtcgacgatcactcttcaccttgtccattgccgcggagtgggaaaaacccagaacggacaagataaaaccaatgccccgtcacggctcaatcagtcgcctagcctcgcaccggtgaagcggacgtacgaacagatggaatttccgctgctgaagaagcgcaagctggacgacgattccgatagcccgtcgttctttgaggagaagcccgaggaaccagtggttctggctctggatccaaagggacatgaggacgattcctacgaggctcggaaatcattcctgacgaagtactttaacaagcaaccttatccgactcgcagagagatcgaaaagctcgcggcatccttgtggctgtggaaaagcgatatcgcaagccacttctccaacaagagaaagaagtgtgtgcgggattgcgaaaagtacaagccgggagtgctcttgggattcaatatgaaagagctgaacaaagtgaaacacgagatggacttcgacgccgaatggctcttcgaaaatcatgatgagaaggattcgcgggtgaacgcatcaaaaaccgcggacaagaaactcaacctcggaaaggaagatgatagcagttccgatagcttcgaaaacttggaagaggagtcaaatgaatccggctcgcctttcgacccggtattcgaagtggaaccaaaaatcagcaatgacaacccagaagagcatgtcctgaaggtaatcccggaagatgcctcggaatccgaagagaaactggatcaaaaagaagatggaagcaagtacgaaaccattcaccttactgaagaaccaactaagctcatgcataacgcctcagactcagaggtggaccaagacgacgttgttgaatggaaagacggtgcctctccttcagagtccggaccagggtcccagcaagtctcggactttgaggacaacacctgtgagatgaaaccaggcacctggtcggacgaatcatcccagagcgaggacgcgcgcagctcgaagcccgcggcgaaaaagaaggcgactatgcaaggggacagagaacaactgaagtggaagaattcgtcgtacggcaaagtcgaaggattctggtccaaggatcaatcccaatggaagaacgcttccgaaaacgacgaaaggcttagcaacccccagatagaatggcagaactccaccatcgacagcgaggacggggaacagttcgacaacatgaccgacggcgtcgccgaacctatgcacggatcgctcgccggtgtgaaactgtcctcgcagcaggcg

SEQ ID NO: 5755 - DNA, 3306 bp, synthetic construct
  misc_feature 1..3306: note = source = /note="Description of Artificial Sequence: Synthetic coding sequence"
  source 1..3306: mol_type = other DNA
atgttccagctgcccgtgaacaatctgggcagcttgcgcaaggccagaaagactgtcaagaaaatcttgtcagatatcggcctggaatactgtaaagagcacatcgaggatttcaagcagttcgaaccgaatgacttttacctgaagaacactacctgggaagatgtgggtctgtgggacccatccctgactaagaatcaggattaccgcaccaagccgttttgctgctccgcatgcccattctcctcaaagttcttcagcgcctacaagtctcacttcaggaacgttcactcggaggacttcgaaaatagaattttgcttaactgcccttactgcactttcaatgcggacaaaaagacgctcgaaacccatatcaagatcttccatgccccgaacgcttcggcgccatcgtcctcactgagcaccttcaaggacaagaataagaatgatggactgaaaccgaaacaggcggactcagtggaacaagcggtctactactgcaagaaatgcacttatcgtgaccccctctacgaaatcgtccggaagcacatctaccgcgaacacttccaacatgtggccgccccttacattgccaaggcaggagaaaagtccttgaacggagctgtgccgctgggatcgaacgcacgggaagaaagcagcatccactgcaagcgctgcctgtttatgccaaagtcctacgaagccctggtccaacacgtcatcgaggaccacgaaagaatcggataccaggtcactgctatgatcggccacacgaatgtggtggtgccaagaagcaagccgctgatgcttattgctcctaagcctcaagataagaagtcgatgggtctgcccccaagaatcggatcactcgcgtcgggcaacgtgcgctccctcccttcccaacagatggtcaatcggctgtccatccctaagccgaacttgaactcaacgggcgtgaacatgatgtcgagcgtgcatctccagcaaaacaattatggagtgaagtcggtggggcaaggatactcagtcggacagtcgatgcgtttgggactgggtggtaacgccccggtttccatcccacagcagagccagtccgtcaagcagctgctcccgtccggtaacggacggtcctacggtctgggatcagagcaacggtcccaggccccggcgcgatactcactgcagtctgccaatgcctcgtccctttcatcgggacaactgaaatcgccgtctctgagtcagtcccaggcgtcaagagtgctcggccagtcctcctccaaaccggccgctgcagccaccgggccaccgccaggaaatacctcgagcacccagaagtggaagatctgcaccatctgcaacgaactgttccccgaaaatgtgtacagcgtgcacttcgagaaggagcacaaggccgaaaaggtgccggcagtggcaaactacatcatgaagatccataacttcacctcgaagtgcctttactgcaatcggtatcttccgactgataccttgttgaatcatatgctgatccacggactgagctgtccgtactgccgctccactttcaacgacgtcgaaaagatggcggcccacatgcgcatggtccacatcgacgaggaaatggggccgaaaactgactccaccctgtcctttgatctcacgctgcaacagggatctcacactaacatccacctgttggtcactacgtacaacctgcgcgacgcccctgcggaaagcgtggcctaccatgctcaaaacaacccgccagtcccacctaagccacagccgaaggtgcaggaaaaggctgacatcccagtgaaaagcagcccgcaggccgccgtaccgtacaaaaaagatgtcgggaaaaccctctgccctttgtgcttttcaatcctgaagggcccaatctccgacgcactggcacaccacctcagagagagacaccaagtgatccaaaccgttcacccggtggaaaagaagctcacttacaagtgtatccactgcctgggagtgtacacctcaaacatgactgcctccaccattactcttcatctggtccactgccggggagtcggcaagacccaaaatggacaggataagactaacgctccttcaaggctcaaccaatctcctagcctcgctccagtcaagcgtacctacgaacagatggaattcccacttctgaagaagcgcaagttggatgacgattcagactcaccgagcttcttcgaagagaaacccgaagaacctgtcgtgctggcactcgatccgaagggacacgaagatgattcctacgaagcgcggaagtcattcctcacgaagtactttaacaagcaaccgtaccctaccagacgcgaaatcgaaaagctggccgccagcctctggctctggaagtcggatatcgcctcccatttctcaaacaaacgcaagaagtgtgtgcgcgactgcgagaagtacaaaccgggtgtgctcttgggattcaatatgaaggaactgaataaggtgaagcatgagatggacttcgacgccgaatggctcttcgagaatcatgatgagaaagactcacgagtcaatgcctcaaagaccgctgacaaaaagctgaacctgggcaaggaagatgactcatcctccgatagcttcgagaacctcgaggaagaatcaaacgagtcaggatcaccgttcgatccggtgtttgaggtggagcctaaaatctcaaacgataacccggaggaacacgtcctgaaggtgatcccggaggacgcgtcggagtcggaagaaaagttggatcaaaaggaggatggaagcaaatacgaaaccattcacctgacggaggagccgaccaaactgatgcacaacgcctcagactcggaagtggaccaggacgacgtcgtggagtggaaagacggagcctcgccgtcagaaagcggcccgggttcccagcaggtgtccgatttcgaggacaacacctgcgaaatgaaaccaggaacttggtccgacgaaagctcacagtcagaagatgcgcggtcatccaagccggccgcaaaaaagaaggctactatgcagggcgaccgggaacaactgaagtggaagaattcgagctatgggaaggtggaaggattctggagcaaggaccaatcccaatggaagaacgcgtccgaaaatgatgaacgcctgagcaacccgcagatcgaatggcaaaacagcactatcgattcggaggatggcgaacagttcgacaacatgactgacggagtggcggagccgatgcacggctcgctggctggagtgaaactgtcgtcgcaacaggcg

SEQ ID NO: 5756 - DNA, 3306 bp, synthetic construct
  misc_feature 1..3306: note = source = /note="Description of Artificial Sequence: Synthetic coding sequence"
  source 1..3306: mol_type = other DNA
atgtttcagctccctgttaacaaccttggcagcctgcgaaaagcccgtaagaccgtcaagaaaatcctgtccgacattggtctggagtattgtaaagagcacatagaggactttaaacagttcgagcccaatgatttttacctgaagaatacgacctgggaggatgtcggtctctgggacccaagcctcacgaaaaatcaggattaccgcacgaagccgttctgctgtagcgcgtgtccttttagctccaagttcttttccgcctataaaagccacttcaggaacgtccattcagaggatttcgagaatcggatcctgctcaattgtccgtactgcacgtttaatgcggataaaaaaacgttggagacccatattaaaatctttcacgcaccgaacgcatcagcgcctagcagtagcctaagcacgtttaaggacaaaaataagaacgacggcctcaaaccgaagcaggcggatagcgtagaacaggcagtgtattattgcaaaaagtgcacctaccgggaccctctgtatgagattgtgcgcaaacatatctaccgcgaacacttccagcacgttgccgcgccatacatcgcgaaggcaggcgagaaatccctgaacggtgctgttccattgggtagcaatgcacgggaagaatccagcattcactgcaagcggtgtctgtttatgccgaagtcttatgaagcgcttgtgcagcatgtgattgaggaccacgagcggattggttaccaagtgacggccatgatcggtcacaccaatgtcgtagtgccacgaagtaaacctcttatgctaattgccccgaagccacaggataagaaatcgatgggtctgccgcctcggatcggctctctggcgagcggcaacgtgcgtagcctgccttcccagcagatggtcaatcggctgagcattcccaagccaaacctgaattctaccggcgtaaacatgatgagttccgtccatctgcagcaaaataactacggtgtcaaaagcgtgggacaaggctacagtgttggtcagagcatgcgccttggtttaggagggaatgcgcccgtgtccatccctcaacaatcccaaagcgtcaaacaattgttaccaagcggtaacggtcgttcttacggcttgggctccgagcagcgcagccaggcaccggcacgctattccctgcaaagcgcaaatgcgtctagtttgagtagtggtcagctgaagagtccttctctgtcccaatcgcaagcgtctcgagttttgggtcagagctcctctaaaccggcagcagctgccacgggccctccgcccggcaatacctctagcacccaaaaatggaaaatctgcaccatttgtaacgagctgtttccggaaaatgtctatagcgtgcactttgagaaggagcacaaagctgagaaggtgccagcagtggcgaattatattatgaaaattcataatttcactagcaagtgcctgtattgtaaccggtacttgcccaccgatacgctgctcaatcatatgttgattcacggcttgtcttgcccttactgccgttccacctttaacgacgtggagaaaatggccgctcatatgcggatggttcatatagacgaggaaatgggcccgaagaccgacagcaccctgtcgttcgatttgacgctgcagcagggttcacatactaacatacacctgctggtgacgacctacaatctgcgcgacgcgccggccgagtcagtggcctaccacgcccagaacaatcccccagttccacctaagccgcagccaaaggtgcaagaaaaggccgacatcccggtgaaatcttcccctcaagcagctgtgccgtataagaaagacgtcggaaaaaccctgtgccccctgtgctttagcattctgaaaggccctattagcgatgctctggctcaccatctgcgcgagcgccaccaggtcattcagaccgtccatccggtggagaagaagctgacatacaaatgcattcactgtttgggcgtatatacctcgaatatgactgcttcgacaatcactctgcatcttgtgcattgtcgtggtgtgggcaaaacccagaacggtcaggacaagacaaacgccccgagccgcttgaaccagtcgccgagcctggcccctgttaagcgcacctatgagcagatggaattcccacttctgaaaaaaaggaaactggatgatgatagcgactctccatcattcttcgaagaaaaaccggaggaaccggtggtgcttgcgcttgatccgaagggccacgaggacgacagctacgaggctcgtaaaagctttctgactaagtattttaacaagcaaccataccccacccgccgcgagatcgaaaaactggctgcatcactgtggttgtggaagagtgatattgcctcacacttcagcaataaacgcaaaaagtgcgttcgtgactgcgagaagtataagcctggtgttctgctgggttttaatatgaaagaactgaacaaagtcaagcatgagatggatttcgacgcggaatggttgtttgagaatcatgacgagaaggacagcagggttaacgctagcaagaccgctgacaaaaagctgaatttaggtaaggaggatgacagctcttccgattccttcgagaacttggaagaggagagcaatgagagcggtagcccattcgaccccgttttcgaggtcgaaccgaagattagcaatgataaccccgaagagcatgtcctgaaagtgatcccagaagatgcaagcgagtcagaggagaagctcgatcagaaggaagacggtagtaaatacgaaactattcatctgactgaggagccaaccaagctgatgcacaatgcctcggacagcgaggtggaccaggatgacgtggtcgagtggaaggatggtgccagtcctagcgaaagcggtccggggtctcagcaggtgagcgatttcgaagacaacacctgcgagatgaagccagggacttggtctgacgaaagctctcagagcgaggacgcacgttcttcgaagcctgccgcgaaaaagaaggctaccatgcaaggtgacagggagcagctgaaatggaaaaatagcagctacggtaaggtggaagggttctggtccaaagaccagagccagtggaagaacgcgtcagagaacgatgagcgtctgagcaacccgcagattgagtggcagaactccactatcgacagcgaagacggcgagcagttcgacaacatgaccgacggtgtcgctgagccgatgcacggcagcctcgcaggtgtaaaactgagctcccaacaagca

SEQ ID NO: 5757 - DNA, 3306 bp, synthetic construct
  misc_feature 1..3306: note = source = /note="Description of Artificial Sequence: Synthetic coding sequence"
  source 1..3306: mol_type = other DNA
atgttccagttaccggttaataacttgggaagccttaggaaagcgagaaaaactgttaagaagatcctgagcgatattggtctggagtactgtaaggaacatatagaagattttaagcagttcgaacctaacgatttctatctcaagaatactacatgggaagacgttgggttgtgggacccatctcttacaaagaatcaggactataggaccaagcccttctgttgttccgcgtgcccattctcttcaaaatttttttccgcatacaagagtcacttcaggaacgttcattcggaagattttgagaatagaatattacttaactgcccctattgtacctttaatgctgataagaagacattggaaacccatatcaagatctttcatgcccctaatgcttctgctccctctagttctctttcgactttcaaagataagaacaagaatgacggtttaaaacctaagcaggctgattcagtagaacaagcagtatattactgcaagaagtgcacctatcgtgaccccctctatgaaatcgtgagaaagcatatataccgcgagcattttcaacacgtggctgccccgtatattgccaaagctggcgagaagtctctcaacggtgctgtcccactaggttcaaacgctagagaagagagctccattcactgcaaaaggtgtctttttatgccaaaatcctatgaagctctggttcagcacgtcatcgaggatcatgaaaggattgggtaccaagttacagctatgattggacataccaatgtagtcgtcccacgatctaagcctttgatgcttattgctcctaagcctcaggacaagaaatccatgggtcttccacctagaattgggagcctagccagcggtaatgttcgatcacttccatctcaacagatggtcaacagactgtcgattcctaagcctaatcttaactctactggagtaaatatgatgagttccgtccatttgcaacagaataactacggagtgaagtccgtcggacagggttatagtgtcggacaatccatgcgactcggactggggggtaacgctcctgtaagtataccccagcaatctcaaagtgttaagcaacttttaccatcgggaaacggtagatcatatggtttgggctccgaacaacgtagccaagcccctgcacgatactcgcttcaaagtgctaacgcatcaagtctttctagtggacaattgaaatccccaagtctttcgcaatcacaagcttcgcgcgttctaggtcagtcttcctcaaaaccagctgctgctgcaaccggacctcccccgggaaacactagttccacccaaaagtggaagatttgcaccatttgcaacgagctctttcctgaaaacgtatattcagtgcacttcgagaaggaacataaggctgaaaaggttccagcagttgctaactatataatgaaaattcacaatttcacatcgaagtgcctctattgcaaccgctatcttccaaccgacacgcttcttaatcacatgttaatccatggactttcttgcccatattgccgttccacctttaatgatgttgaaaagatggctgcccatatgagaatggtgcatatagatgaggaaatgggtcccaagaccgattcaaccttgtcattcgacctaactcttcaacaaggaagtcacaccaatattcatctgttagttaccacatataatcttcgtgatgcccccgcagagtcagtggcatatcatgctcagaacaatccgccggtgccacctaagcctcaacccaaagtgcaggaaaaggctgatatccctgtaaagagtagcccacaagcagctgttccatacaagaaagacgtgggcaaaaccttatgtcctctgtgtttttcaattttgaaaggacctatctccgatgctctcgcgcaccatctccgtgaacgccatcaggtgattcagaccgtccatccggtcgagaagaagttaacttataagtgcatacattgccttggagtgtacacatccaatatgacggcatcaaccataacactccacttggttcattgtcgtggcgttggtaaaacgcagaacggacaagataagactaacgcaccatctaggctcaaccagtctccttcacttgcaccagttaagagaacctacgaacaaatggaatttcccttacttaagaagagaaaattggatgatgacagcgattctccgagcttcttcgaagaaaagccagaggagccagtcgttttggctttggatcctaaaggtcacgaagatgattcctatgaagctaggaagagcttcctgaccaaatacttcaataagcaaccttatcctacaaggagagagattgagaagcttgctgctagcctctggttgtggaaatctgatattgccagtcatttttcaaacaaacgcaaaaaatgcgttcgagattgtgagaagtataaacccggtgtgttgttgggatttaatatgaaagaactaaataaagttaagcatgagatggatttcgatgcggaatggttattcgaaaatcatgatgagaaggatagtcgagtgaacgcaagtaagacagctgacaagaaattgaacctcgggaaagaagatgatagcagctcagattctttcgagaacctagaggaagaatctaacgaatcaggtagcccgttcgatccggtttttgaggtggaaccgaaaatttctaatgacaatccagaggagcatgtgttgaaggttatccctgaagacgcttctgagtcagaagaaaagttggatcaaaaagaagatggtagcaaatacgagacgattcatctgacagaagagcctactaagcttatgcacaacgcctctgattcggaggttgatcaagatgatgtggtggaatggaaggacggtgcgagtccaagtgagagcggacccggtagccagcaggtgtctgattttgaggataacacttgcgagatgaagcccgggacgtggagcgacgaatctagccaatctgaagatgctaggagtagcaagcctgccgccaagaagaaagcgaccatgcagggtgatcgagagcaattgaaatggaagaattcatcatatgggaaagtcgaaggattttggagtaaagaccagtctcagtggaagaatgcttccgagaacgacgaacgtctctctaacccccagattgagtggcaaaattctaccatagatagcgaggatggcgaacagtttgacaacatgaccgacggagtagctgagccgatgcacggcagcttggcaggagttaagttgtcttcacaacaggca

SEQ ID NO: 5758 - DNA, 3306 bp, synthetic construct
  misc_feature 1..3306: note = source = /note="Description of Artificial Sequence: Synthetic coding sequence"
  source 1..3306: mol_type = other DNA
atgttccaactgccagtgaataaccttggctcccttagaaaggcccggaaaaccgtcaagaaaattctgtcggatattggccttgaatactgtaaagaacatattgaagatttcaagcagtttgaacctaatgatttctacctgaagaataccacctgggaggatgtgggcctttgggatccttccctgaccaagaaccaagattacaggactaagcccttctgttgttcggcgtgtccattctcatctaaattctttagcgcgtataagtcgcactttagaaatgtccattccgaggactttgaaaataggatattgctgaattgcccatattgtaccttcaatgcagacaagaaaactcttgagactcacataaagatattccatgcccctaacgcatccgcacccagctcaagcctttccacctttaaggataagaacaaaaacgacggtctgaaaccaaagcaggccgattcggtggaacaggcagtgtactactgcaagaaatgtacctatcgcgatcctctttacgagatcgtgcgcaaacacatttaccgggagcatttccaacacgtggcagcaccatacattgcaaaagcaggcgaaaagagcctgaacggggcagtgcctctcggttcgaatgcaagagaagaatcctcgattcactgtaaaaggtgtctcttcatgcctaaatcgtacgaggcacttgtccagcacgtgatcgaagatcacgaaagaattggctaccaggtgactgcaatgatcgggcacactaacgtggtcgtgcccagatcaaagccacttatgctcatcgcccctaagcctcaagacaagaaatcaatgggcctgcctccccgaatcggaagcctcgcatccggaaacgttagatcactgccttcgcagcagatggtgaatcgcctgagcattccaaaacctaatctgaacagcactggtgtgaacatgatgtcgtccgtgcacctccaacaaaacaactacggagtcaagtccgtgggacagggatactcagtgggacagtcaatgagacttggactcggcggaaacgcccccgtgtcgatacctcagcaatcccagtcagtgaagcaactgcttccgtctgggaatggtcgctcgtacggactgggttcggaacaacgctcgcaagcacctgcaagatactctctccaatccgcgaacgcgtcctctctgtccagcggccaactgaaatcgcctagcctgagccagtcccaagcatctcgtgtgctgggacaaagttcgtccaagccagcagcagctgcgactggtccaccacctgggaacacctcctccactcaaaagtggaagatttgcaccatctgtaacgaattgtttccggagaacgtgtattccgtgcatttcgagaaagaacataaagcagaaaaagtacctgccgtggcaaactacatcatgaagattcataactttacttcgaaatgcctctactgcaaccggtaccttccaaccgacaccttgcttaaccacatgctgatacacggtttgagctgtccatactgtagatcgacctttaatgacgtggagaagatggccgctcacatgcggatggtgcacatcgatgaggaaatgggaccaaagaccgattccaccctctcgtttgacctgaccctccaacagggttcccatacgaacattcatcttctggtcaccacttacaacctgcgggatgcgccagctgagagcgtggcgtaccatgcccaaaacaatccgcctgtgccgcccaagccgcagcctaaggtgcaagaaaaggcggatatccccgtgaaatcatcaccgcaggcagcggtgccatacaagaaggacgtcggcaagactctgtgtcctctctgtttttcaattctgaagggacctatatccgacgccctggcgcatcatctgcgagaacggcatcaggtcatacagactgttcatcccgtggagaagaagttgacctacaagtgtatccactgtctgggagtgtacacctcgaatatgactgcctccactattaccctccatctggtgcactgcaggggggtgggcaagacgcagaacggacaagataaaaccaacgcaccaagccgcctgaatcagagcccttcgcttgcaccggtgaaacgaacctacgaacaaatggaattcccacttctcaagaagcggaagctcgacgatgattcggactcgccttcatttttcgaggaaaagcccgaggaacctgtggtcctggcgctggaccctaaggggcacgaagatgatagctacgaagctcggaaatcattccttaccaagtactttaacaagcaaccgtacccaactcggcgcgaaattgagaaacttgcagcatcactctggctctggaaatccgacattgcaagccacttttcgaataagcgcaagaaatgtgtgcgagattgcgaaaagtacaaacctggggtgctgctgggattcaatatgaaggagctgaataaggtgaagcatgaaatggactttgatgcagagtggctgttcgaaaaccacgatgaaaaggattctcgcgtgaacgcgagcaagaccgcagataagaagctgaatcttggaaaggaagatgattcctcatccgattcgtttgagaacctcgaagaagaatcgaatgaatcgggttcacctttcgacccagtgtttgaagtggagcccaagatatcgaacgataacccagaagaacatgtgcttaaggtcatacccgaggacgcctccgagagcgaggaaaagttggatcaaaaagaggacggatccaagtacgagactatccatctgaccgaagaaccaacgaagttgatgcataacgcttccgattccgaggtggaccaggatgatgtcgtcgaatggaaggacggagcctcgccttccgaatcgggaccaggttcgcaacaggtgtccgatttcgaggataacacttgtgagatgaaacctggaacttggtcggatgaatcgagtcaatcggaggacgcgagatcatccaaacctgccgcaaagaagaaagcaactatgcaaggtgatagggagcaacttaaatggaaaaactcgtcctacggcaaggtcgaaggtttttggtcaaaggatcaatcgcaatggaagaacgcgtcggaaaacgatgaaaggttgagtaatccacaaattgaatggcagaactcgactatcgatagcgaggacggagaacaattcgacaatatgacggatggagtggccgaacccatgcatggatccctcgccggagtgaagctgtcctcccaacaagcc

SEQ ID NO: 5759 - DNA, 3306 bp, synthetic construct
  misc_feature 1..3306: note = source = /note="Description of Artificial Sequence: Synthetic coding sequence"
  source 1..3306: mol_type = other DNA
atgttccagctgccagttaacaatctcggcagcctgcggaaggccagaaagactgtgaagaagatcctctccgacatcgggctggaatactgcaaggagcacatcgaagatttcaagcaatttgagcctaatgacttctacctgaaaaacaccacttgggaggacgtggggttgtgggatccatcgctgactaagaatcaagactacaggactaaaccgttctgctgcagcgcctgccccttctcgtccaagtttttctccgcctacaagtcccatttccggaacgtgcatagtgaagatttcgagaaccggatcctgctgaattgcccttactgtactttcaacgccgacaagaaaaccctcgaaacccatatcaagatcttccatgctcctaacgcatcagccccaagctcctcgctgtccaccttcaaagacaagaacaagaacgacggactgaagcccaagcaggcagacagcgtggaacaggctgtgtactactgcaagaagtgcacttacagggacccactttacgagatcgtccggaagcacatttaccgggaacatttccaacacgtagcggccccatacatcgcgaaagccggcgaaaaatcgctgaacggagccgtgccgttgggcagcaatgcgcgcgaggaaagctccatccactgcaaaagatgtctcttcatgccgaagtcctacgaggcattggtgcagcacgtgattgaagatcacgagcgaataggataccaagtgactgccatgatcggacacacgaatgtggtggtcccacgctccaagcctttgatgctgatcgccccgaagccgcaagacaaaaagtccatgggactgccaccgagaattggcagcctggcctcaggtaacgtgagatccctcccaagccagcagatggtgaaccgactttcgatcccgaaacctaatctgaacagcaccggagttaacatgatgtcctcggtgcatctgcaacaaaacaattacggagtgaagtctgtggggcaaggttactcagtcggtcaatcgatgcgcctgggacttggtgggaacgcgccagtgtccatcccacagcaaagccaatctgtcaagcagttgcttccgagcgggaacggacggtcgtacggactcggatcggagcaaagatcgcaggcacccgctcgctattcattgcagtcggccaatgcgagctcgctgtcctcgggccagctgaagtccccttcactctcccagtcgcaggcgtcccgcgtgctgggacaatcatcatcgaagccggcagcggctgctaccggacctccgcccggcaatacttcctccactcagaagtggaagatctgtactatctgcaacgaattgttccctgagaacgtctactcagtgcacttcgagaaagagcacaaggcggaaaaggttccggctgtggccaactacatcatgaagatccataacttcacttcaaagtgtttgtactgcaacagatacctcccgaccgatacgctgcttaatcacatgctcatccatggactgtcatgcccttattgtaggtctaccttcaacgacgtggaaaagatggctgcgcacatgcggatggtgcatatcgacgaagaaatggggccaaagactgactcgacccttagcttcgacctgaccctgcaacaaggatcccacaccaacatccacttgctggtgaccacttacaacttgcgggacgcgcccgccgagtctgtcgcataccacgcacaaaacaatccacctgttccgcccaagccgcagccgaaggttcaggagaaggcggacatcccggtcaagtcctccccacaagccgccgtcccttacaaaaaggatgtgggaaagaccctgtgccccctgtgtttctccatcctcaagggaccgatttcggacgcccttgcacaccacctccgggaacggcaccaggtgatccagaccgtgcatcccgtggaaaagaagttgacttacaagtgcatccattgcctgggagtgtacacttccaacatgactgcctccaccatcaccctgcacctcgtgcattgccggggtgtcggcaaaacccagaacggacaggacaagacgaacgcacctagccgccttaaccagagcccgagcctggcaccggttaagaggacctacgagcagatggagttcccgctgctcaagaaacgcaagttggacgatgatagcgatagcccatcgtttttcgaggagaagccggaagaaccggtggtgctggccttggacccgaagggacacgaggatgactcttacgaggcgaggaagtccttccttactaaatacttcaataaacagccgtatccgacgaggcgcgaaattgagaagctggcggcttcactgtggctgtggaaatcagacatcgccagccatttttcgaacaaacggaagaagtgcgtccgcgattgcgagaaatacaaacctggagtgctgctggggtttaacatgaaagaattgaacaaagttaagcatgagatggacttcgatgccgaatggctgttcgaaaaccatgatgaaaaggatagcagagtgaacgcatcaaaaaccgctgacaaaaaacttaatctcggaaaagaggacgactcttcctcggactcattcgagaatctggaagaggaaagcaatgaaagcggttcaccattcgatccagtgttcgaagtggagccgaagattagcaacgataatccagaggagcatgtgctgaaagtgatcccggaggacgcatcggaaagcgaagagaagctggaccagaaggaggacggaagcaagtacgaaactatccatctgactgaagagcccactaaacttatgcataacgcctcagattcggaggtggaccaggacgatgtcgtggaatggaaggacggagcctccccgtctgagtccggaccaggatcccaacaagtctccgatttcgaagataacacttgcgaaatgaaaccgggcacctggtcggacgagtcaagccaatccgaggacgcacgctccagcaagccggcggccaagaagaaggctactatgcagggagacagggaacagttgaagtggaaaaactcctcctacgggaaggtggaaggtttctggtccaaagatcaatcccagtggaaaaatgcttccgagaacgatgagcgcctctccaacccacagatcgagtggcaaaattcgaccatcgactcggaggacggtgagcaattcgacaacatgaccgacggagtggcagagccgatgcacggatccctcgcaggcgtcaaactgtcctcccaacaggcc

SEQ ID NO: 5760 - DNA, 3306 bp, synthetic construct
  misc_feature 1..3306: note = source = /note="Description of Artificial Sequence: Synthetic coding sequence"
  source 1..3306: mol_type = other DNA
atgttccagttaccagttaacaatctgggcagtctccgcaaagcacggaagacagtgaaaaaaatactaagcgatatcgggcttgagtactgtaaggaacacattgaagatttcaaacaatttgagcctaacgatttctacctgaaaaataccacatgggaagacgttgggctgtgggacccttccctcactaaaaatcaagactacaggacaaaaccattttgctgcagtgcgtgtcccttttcttcaaagttcttctccgcatataaatcccacttcagaaatgtccactctgaggacttcgaaaacaggatcttacttaactgcccatactgcaccttcaatgctgataaaaagacccttgaaacccacattaagatctttcacgctcctaacgcttccgcgccctcctctagcttaagcacttttaaagataagaataagaatgacggcctgaaaccaaaacaggctgattccgtggaacaggctgtgtactattgtaagaagtgcacctatagagacccgctgtatgagattgtgcgtaaacacatctatagggaacattttcagcatgtggcagccccatacattgccaaggctggagagaaatcacttaacggagccgtaccactgggaagcaatgcgagagaagaaagcagcatccattgcaaacgctgcttgtttatgcctaagagctacgaagctctggtgcaacatgtgatcgaggaccatgaacgaataggataccaggtgacagcaatgatcggtcacaccaacgtggtggtcccccgtagcaagcccttaatgcttatcgcaccaaaaccacaagataaaaagtccatgggcttaccaccaagaatcgggtcactggccagcggaaatgtcaggtcactgcctagccagcagatggtcaatcgcctttctataccgaagcccaacctgaacagcaccggcgtcaacatgatgtcctctgtccatcttcagcagaataactacggggtgaaaagcgttggacaggggtacagtgtaggccagtccatgcggctgggattgggcggcaacgcgcccgtatccatcccacaacaatctcaaagtgtcaaacagctgctgccctccggaaacgggaggagctacggcctgggcagtgagcaacgtagtcaggctccagcaaggtattctctgcagagtgccaacgctagtagcttgagtagtggacagttgaaaagtccatctctctctcagtcgcaggcttctcgcgtgctaggacaaagctcttcaaaacccgccgctgctgctactggaccccctcctggcaacaccagttctacacagaaatggaaaatctgtactatttgtaacgagcttttccccgaaaacgtgtacagtgttcactttgagaaggagcacaaagcagagaaagttcctgcagtagcaaactacataatgaaaatccacaacttcacctcaaagtgtctatactgcaatagatacctgcccacggataccctgcttaaccatatgctcatccacggcctgagttgcccttattgcagatcaacattcaatgacgtggaaaaaatggccgctcatatgaggatggttcatattgacgaggagatgggaccaaaaaccgatagtacactgagctttgacctgacccttcagcaaggttcccatacaaacatccatcttttagtgaccacctataacttgcgggacgcccccgcagagtcagtggcttaccacgctcagaacaatccccctgtacccccaaaacctcagcccaaggttcaagaaaaggcggacatcccagttaagagcagccctcaggcagctgtaccttacaagaaagacgtcggcaaaaccctgtgtcccctgtgcttcagcatcctcaaaggccccatctccgacgcactggcccatcatcttagggaaaggcatcaagtgatacagaccgtccaccccgtcgagaagaaactgacctacaaatgcatacactgtctgggagtgtatacctctaacatgaccgctagcacaatcaccctgcacctggtccattgtaggggggttggtaagacccaaaacgggcaggacaagactaacgctccttctaggctgaatcaatctccgtccctggcacccgtcaaacggacatacgaacagatggagtttcccttgctcaaaaaacggaagctggacgatgacagcgatagcccctcattcttcgaagaaaagccggaggagcctgtcgtcctcgctcttgatccaaagggacacgaggatgatagctacgaagccaggaagagcttcctcactaagtattttaacaaacaaccataccctaccaggagagaaatcgagaagctggcagcgtctctttggctttggaagtccgatatcgcctcccatttcagcaacaaaagaaaaaagtgcgttcgcgactgcgagaagtacaagccgggtgttctgttgggatttaacatgaaggagctcaacaaagtcaaacacgaaatggattttgatgctgagtggctgttcgagaaccacgatgagaaagatagtagggtgaacgcaagcaaaacagccgacaagaagctcaacctgggcaaggaagatgactccagtagcgactcatttgaaaatctggaagaagaaagcaatgaatccgggtcaccgtttgatcctgtgtttgaagtggaacctaaaattagtaatgataaccccgaagaacacgtgcttaaggtgattccggaggacgcctctgagtcagaggagaagctcgatcagaaagaagacggctcaaaatacgagaccattcacctcactgaagaacccacgaagctcatgcacaatgcttctgacagcgaggttgatcaagatgacgttgtggagtggaaagatggcgctagtccttcggaatctggccctggaagccaacaggtgagtgatttcgaggataacacctgcgagatgaaacccgggacttggtctgatgagtccagtcagtctgaagacgctagaagttccaagccagccgccaaaaagaaagctactatgcagggcgatagggagcagctcaagtggaaaaatagctcatacggaaaggtggaaggattttggtccaaagatcagagccagtggaaaaacgcaagcgagaacgatgagaggttgtctaacccacaaatagagtggcaaaacagtaccatcgatagtgaggacggcgagcaattcgacaatatgacagatggcgttgccgagccgatgcacggtagcttagctggcgttaagctcagttcccagcaggcc

SEQ ID NO: 5761 - DNA, 3306 bp, synthetic construct
  misc_feature 1..3306: note = source = /note="Description of Artificial Sequence: Synthetic coding sequence"
  source 1..3306: mol_type = other DNA
atgtttcaactgccagtgaacaaccttggatctctccgcaaggcgagaaaaactgtgaagaagattctttccgatatcgggcttgaatactgcaaggaacatattgaggatttcaaacagttcgaacccaatgacttttaccttaagaacaccacttgggaagatgtgggtctgtgggacccatcgctgactaagaaccaagactatcgcactaagcctttctgttgttccgcatgtccctttagcagcaagttcttctcagcatacaagagccatttccgtaacgtccattcggaagattttgaaaataggattctcttgaattgtccatactgcactttcaacgcagataagaaaacgctggaaactcatatcaagatttttcacgcgccaaatgcaagcgccccttcctcgtcactttctaccttcaaggataagaacaaaaatgatggcctcaaacccaagcaggctgactcagtggaacaggcagtgtactactgcaaaaagtgcacctacagagatccattgtatgaaatcgttcggaaacacatataccgtgaacacttccagcacgtcgcagcaccgtatattgcgaaagccggagaaaagagccttaacggggcagtgccgctgggatccaacgcgagggaagaatccagcattcactgtaaaaggtgtttgtttatgcccaagagctatgaggcactcgtgcaacatgtcatcgaagatcatgaacggataggttaccaagtgaccgctatgattggccacaccaatgtggtggtcccccggtctaagccacttatgctgatagccccgaaaccccaagataagaagagcatgggccttcccccacgaattgggtccctcgcaagcgggaacgtgcgcagcctgccttcccaacagatggtcaacagattgtccattcccaaaccaaacctgaactccactggggtgaatatgatgagctcggtgcacttgcagcaaaacaactacggagtgaaatccgtcggacaaggttactcggtgggacaaagcatgagacttggacttggaggtaatgcaccagtgtcaatcccacagcaatcccaatccgttaagcagcttcttccatctggaaacggaagatcgtacggcctcggctcggaacaacgatcccaggcgcctgcacggtactcccttcagtcagccaacgcttcgtctcttagcagcggccagctcaaatcaccttcgctttcccaaagccaagctagccgggtgctgggtcaatcctcgtccaagcctgcagcggccgcaaccgggcctcctcctggcaacacctccagcacccagaaatggaagatatgtaccatttgtaacgagctttttccggagaatgtgtactcggtgcatttcgagaaggaacacaaggcagagaaggtgccagcagtggccaactacattatgaaaatacataactttacttcaaagtgtttgtactgtaaccgatacctgccaactgatacccttcttaaccatatgctcatccacggactttcctgtccctactgccgctcaacgtttaatgacgtggagaagatggccgcacatatgagaatggtgcacatagacgaggaaatgggaccaaaaactgattccacccttagctttgacctgactctccaacagggttcacacactaatatccatctgctggtcaccacctacaatctccgggatgcgccggcagaatccgtggcataccatgcacaaaacaaccctcctgtgccacctaagccgcaaccaaaggttcaggaaaaggcagatataccagtgaagtcatcaccacaagcagccgtgccttacaagaaggatgtgggcaagaccctgtgcccactctgtttttcgattctgaagggtccaatcagcgatgcgctggcccatcatctgcgcgagagacatcaagtgattcaaaccgtgcaccctgtcgaaaagaagctcacctacaagtgcatccattgtcttggagtctacacttcgaacatgaccgcctcaactataactctccacctggtccattgtagaggggtgggcaagacgcagaacggacaggacaaaactaacgccccgtccaggcttaatcagtccccaagcctcgcacccgtcaaacgaacctacgagcaaatggaatttcccctgctgaagaagagaaaactcgacgatgactccgactcgccttcctttttcgaagaaaagcccgaagagccggtggtgctggctcttgatcccaagggacacgaagatgattcttacgaagcgcggaagtcgtttcttaccaagtactttaacaagcaaccctacccgactcggcgagagatcgagaaactggcggcatctctgtggctgtggaagtccgatattgcatctcatttttccaataagcggaaaaagtgcgttcgggattgtgaaaagtacaagccaggtgtgctccttgggttcaatatgaaagaactgaataaggtgaagcacgagatggactttgatgccgaatggctgtttgaaaaccacgacgagaaggatagccgggtgaatgcaagcaagactgcagacaagaagctgaaccttggaaaggaagatgattcatcgagcgattcgtttgaaaatcttgaggaggaatccaacgaaagcggatcaccttttgacccagtctttgaagtcgagcccaagatttccaatgacaaccccgaggagcatgttctgaaggtgattcccgaagatgcatcagagtcggaggagaaactcgaccagaaggaagatggttctaagtacgaaaccatccatcttacggaagaacctaccaagttgatgcataacgcatccgacagcgaggtcgatcaggatgacgtggtggaatggaaagatggagcatccccgtcggaatcggggcccggttctcaacaagtctcggactttgaggataatacttgcgagatgaaacctgggacctggtccgacgaatcgtcgcaaagcgaggatgccagaagctcaaaacctgcggccaagaagaaagcaactatgcaaggagacagagagcaactgaagtggaaaaactcgtcttacggaaaagtcgaggggttctggtcgaaggatcaatcgcagtggaaaaacgcatcggaaaacgacgaacgcctttcgaatccacaaatcgaatggcagaattccaccattgactcggaagatggtgaacagtttgataacatgacggatggtgtggccgagcctatgcatggttccttggcaggggtgaagctgtcgtcacagcaagca

SEQ ID NO: 5762 - DNA, 3306 bp, synthetic construct
  misc_feature 1..3306: note = source = /note="Description of Artificial Sequence: Synthetic coding sequence"
  source 1..3306: mol_type = other DNA
atgtttcagctacccgtcaacaatctgggatccctccgcaaggcccgcaagactgtgaaaaaaattctgagcgatatcggcctggagtattgtaaagagcatatcgaggacttcaaacaattcgagcctaacgacttttatctgaaaaacactacatgggaggacgttggtctctgggacccgtccttaactaaaaatcaggattatcgcactaagcccttttgctgctcagcatgtcccttttcaagtaagtttttctctgcatacaaaagccacttcagaaacgtgcactcggaagatttcgagaatcggattcttctgaattgtccttattgcaccttcaatgctgataagaagaccctggaaacacatatcaagatctttcacgcccccaacgcctccgctccctccagtagcctgagtacattcaaggataaaaataagaacgatggtcttaagcccaaacaggcggattccgtagagcaggccgtgtactactgtaagaagtgtacttaccgggatcccttatacgaaatcgtacggaagcatatttatagagagcactttcagcatgtggccgcaccttatattgctaaagctggcgaaaaatctctcaacggagccgttccgctgggcagcaacgctcgcgaagaatccagcattcattgtaagcgatgcctgttcatgcctaagagttatgaagctctagttcaacatgtgattgaggatcatgagaggattgggtatcaagtgacagccatgatcggccataccaacgtcgttgtgccaaggtccaagcccctgatgctgatcgcccccaaacctcaggataaaaagtctatggggctgcccccacgaatcggcagtctggcctctggtaacgttagatcactgccctcccagcagatggtgaatcgcttgtctatccccaagccaaatctgaactccacaggagtgaacatgatgtcgtctgttcacttacagcagaacaactatggggttaagagcgtgggacaaggctacagcgtgggccagtccatgagactggggctaggtggcaatgccccggtgagcatcccccagcaaagtcagtcagtcaagcagttactcccatccggcaacggtcgttcgtacggcctaggcagcgagcagcgaagccaggcccctgcgcgatacagtttacagtcagcaaatgcgtcatcgctctcttccggacagttgaagagcccctctctctcgcagtcccaggcatcacgcgtgctgggacaatcgtcctccaaacccgctgccgccgcaacggggcccccccctggcaatacgtcatctactcagaaatggaaaatctgcacaatttgcaacgaactgttccctgagaatgtctacagtgttcatttcgaaaaagaacataaggctgaaaaggtccctgccgtggccaactatataatgaagatccacaactttacatctaagtgtctgtattgtaatcgttatctgcctaccgataccctgctcaaccacatgctgattcacggcctcagttgcccttattgtcgttcgacattcaacgatgtggagaaaatggcggcacacatgcggatggtgcatattgacgaagaaatggggcctaagacagattcaacactcagctttgaccttacccttcagcagggatcccacacaaacatacatctcttggtgacgacttacaacctgcgggacgcccctgccgagagcgtggcatatcacgcacagaataacccccccgtcccccccaaacctcagcccaaggttcaggagaaagccgacatccccgtaaaaagcagtcctcaggcagcggttccttacaaaaaggatgtaggtaaaacactgtgccctctgtgcttctccattctcaaagggcctatttctgacgctctcgctcaccacttgcgtgagaggcaccaggtgattcagacagtccatcctgtcgaaaagaagctcacgtataagtgcatacactgtctcggggtgtacacctcaaacatgacagctagtacgatcaccttgcatttagtacactgccgcggtgtcgggaagacccagaatgggcaagacaaaacaaatgccccttctcgtctgaaccagagcccttccctcgccccagtcaaacgcacctatgagcagatggaattccccctgctcaagaagaggaagctggacgacgactccgacagcccatcattctttgaggaaaagccagaggagccagtcgtgctggcactcgacccaaaaggacatgaagatgatagttacgaggctcggaaaagttttttaacaaagtacttcaacaagcaaccctacccgacccgccgtgagatcgaaaagctcgccgcttctctgtggctgtggaaatcagatatcgcaagccatttctcaaacaagcgcaaaaagtgcgtgagggactgtgagaagtacaaacctggggtgctgttgggcttcaacatgaaggaactaaacaaagtgaagcacgaaatggattttgacgccgagtggctttttgaaaatcacgacgagaaggattctcgcgtgaacgcttctaaaacagccgataaaaagctgaacctcgggaaggaagatgattctagctcagacagcttcgaaaacttagaggaagaatccaacgaaagcggcagtccttttgacccggtgttcgaagtagaacccaaaattagtaacgacaaccccgaggagcacgttctgaaagtgataccggaggacgcatcagagagcgaggagaaacttgaccagaaagaggacggatctaagtacgagaccatccatctgacggaagagccaactaaactcatgcacaatgcatctgattcagaggttgatcaagatgacgtcgtggaatggaaggacggggcaagccccagtgaatcgggcccaggaagccagcaggtcagcgactttgaggataacacatgtgagatgaagcccgggacctggtcggatgaatcaagccagtcggaagatgccaggtcctccaagcctgctgccaagaaaaaggcaaccatgcagggtgatagggagcaactgaaatggaagaactcttcctatggtaaggtcgagggcttctggagcaaagaccagagccagtggaagaacgcctcggagaacgacgaacgcttatcaaacccacagattgaatggcagaactcaaccatcgattcagaggatggagaacagttcgataacatgactgatggcgtcgctgagcccatgcatggatccctggcgggagtcaagctgtcctcacagcaagct

SEQ ID NO: 5763 - DNA, 3306 bp, synthetic construct
  misc_feature 1..3306: note = source = /note="Description of Artificial Sequence: Synthetic coding sequence"
  source 1..3306: mol_type = other DNA
atgtttcaattgcccgtgaataacctggggtctctccgcaaagcgaggaagaccgttaagaagattttatcggacattggtctggaatattgcaaggagcacatcgaggacttcaaacagtttgagcccaacgacttttacctgaagaacaccacctgggaggacgtgggcctctgggatccctcgctcactaaaaaccaggactacaggactaagccattctgctgttcagcttgtccatttagttcaaagtttttttcagcctacaagtctcacttcagaaatgtgcatagtgaggactttgaaaataggattctgctcaactgcccttattgcactttcaatgctgataagaagacgcttgaaactcatatcaagatctttcacgcacccaacgcaagcgccccaagttccagtttgagcacttttaaagacaagaacaagaatgacggtttgaagcccaagcaagctgattctgtggaacaggctgtctactactgcaagaaatgcacttaccgggacccgttgtatgaaatagtgcgtaaacacatttatcgagagcacttccaacacgtcgctgcgccgtatattgcaaaagcgggagaaaaatctctaaatggtgcagtcccgctgggctcaaacgcgcgggaagaatcttctatccactgtaagcggtgcttattcatgccaaagagttatgaggcgctggtgcagcacgtgatcgaggatcacgagcgaatcgggtaccaggtgaccgccatgatcggacatacaaacgtggtggtgccacgatccaagcccctgatgctgattgccccgaagccacaggacaagaagtcgatgggtctgccacctcgtattggatcactcgcttctggtaatgtccgaagcctgcctagccagcagatggtgaacaggctgtcgattcctaaacctaacttgaatagtacaggagtgaacatgatgagtagcgtgcatctgcaacagaacaactatggcgtaaagagtgtcggacagggatattccgtcggacagagcatgaggctaggactagggggaaatgctcctgtctccattccacagcagtcccagtcagttaaacagctgctgccctcagggaatggcagaagttatggccttggctcagaacagcgatcccaagcgcccgcacggtactccctgcagagtgccaatgcttcctcattgtcatcaggacagcttaagagcccttctctgtcccaaagccaggccagcagagttctgggccagtcctcgtctaagccagcagccgccgcaacaggtccgcccccggggaacacgagctcgacccagaagtggaagatctgtacaatctgcaacgaactgttccccgaaaatgtttatagcgtgcacttcgaaaaagagcacaaggctgagaaagtgcctgccgtcgccaactatataatgaaaatacacaacttcacgtctaagtgcctctactgtaatcggtacttgcccacagacactctgctcaatcacatgctgatccatggtctaagctgcccgtactgccggagcacattcaacgacgtggagaaaatggccgcacatatgcgcatggtgcacatcgacgaggagatgggacccaaaaccgattccaccctgtcatttgacctgactctgcagcaaggatcacacaccaatatacatttactggtaaccacgtacaatttgcgtgatgcacccgcagaatccgtggcataccacgcacagaataatcctcccgtaccgcccaaacctcaaccaaaggtacaggaaaaagctgatattcctgtcaagtcctccccacaggcggctgtgccatacaaaaaggatgtcggaaaaaccctctgtccactgtgcttctctatcctcaagggcccaatctccgatgcactcgctcaccaccttagagagcggcaccaggtaatccagactgtgcacccagtagaaaaaaagctgacctacaagtgtatccactgcctgggggtctacaccagcaacatgacagcttctaccattacgttacacctggtacactgccgaggtgtaggcaagacccagaacgggcaggataagaccaacgctccttccagactgaaccagtccccttctttagcccccgtgaagcgtacctacgaacagatggagtttccgctactaaagaaaaggaagttggacgacgactctgactccccatcgttcttcgaggaaaagccagaggaacccgtggtgctggccctagaccccaaaggccatgaggatgatagctacgaggcgcgaaaaagcttcctgactaagtactttaataaacaaccctatccgactagacgggagattgaaaagctggcggctagcctgtggctgtggaaaagtgatattgcatcccattttagtaacaaaaggaaaaagtgtgttcgagactgcgaaaagtataagcccggggtgttattggggttcaatatgaaggagctgaacaaggtcaagcacgaaatggattttgatgctgaatggttgttcgagaaccacgacgaaaaagattcccgggtcaacgcctcgaaaacggccgacaagaagctaaatctggggaaggaggacgatagttcatccgattcctttgagaatctggaagaggagagtaatgagtcaggaagcccttttgacccagtctttgaggtggaacccaaaatctccaatgataaccccgaagagcacgtccttaaggtcatccccgaggacgcctccgaatcggaagaaaaacttgaccagaaggaggacggctctaagtatgagactattcacctgacggaggagcccacaaagttaatgcataacgcaagcgattcggaggtggaccaggacgatgtggtggaatggaaggatggagcatctcccagtgagtcgggacccggaagtcagcaagttagcgattttgaagacaacacctgtgagatgaagcctggtacatggagcgacgaaagttctcagagtgaggatgcaaggtctagtaaacctgcggcaaaaaaaaaagctacaatgcagggcgaccgggaacagctgaaatggaagaacagctcctacggcaaagtcgaggggttctggagcaaagatcaatcacaatggaagaacgcgagcgaaaatgatgagcgcctgagcaacccacaaatcgagtggcagaacagcaccattgactctgaggacggtgaacaatttgataacatgacagatggggtggccgaaccgatgcacggaagcctcgcgggcgtcaagctgtcttcgcagcaggct

SEQ ID NO: 5764 - DNA, 3306 bp, synthetic construct
  misc_feature 1..3306: note = source = /note="Description of Artificial Sequence: Synthetic coding sequence"
  source 1..3306: mol_type = other DNA
atgttccagctacccgtcaacaatctgggctccctgcggaaggcaagaaagacagtcaaaaaaatcctgagcgacatcggactggagtattgtaaggagcacatcgaggatttcaagcaattcgagcccaacgacttttacctgaaaaatacgacttgggaggacgttggtctgtgggacccatctctaacgaaaaatcaggactaccgtacaaaaccattttgttgctccgcttgcccctttagctcaaagttcttttctgcttacaagtcccactttagaaatgtgcacagcgaagatttcgagaataggatcctgctcaattgtccatactgtactttcaacgcagacaaaaaaaccctggaaacgcatattaagatattccatgcacccaacgcgagcgccccatccagctcactgagtacttttaaagataagaacaaaaacgatggactgaaacctaaacaggcggactccgttgagcaggcagtgtactactgtaagaagtgcacttaccgcgatccactgtatgagatagtccgcaaacacatctatcgcgaacatttccagcatgtggctgcgccatatatcgcaaaagcaggagagaagagcctgaatggtgctgtgccactggggtccaacgccagagaggagagttctattcactgcaaacggtgtctctttatgcccaagagctacgaggccctcgttcaacacgttatcgaggatcatgaaagaatcggctaccaggtgaccgctatgatcgggcacaccaatgtagtagtgcctagaagcaagccactgatgttgatcgctcctaagccacaggacaagaaaagcatgggcctacccccccgcatcggtagcttagccagcgggaacgtgagaagcctgccctcccagcagatggtcaacaggctctcaattcccaaacctaaccttaacagtacgggggtaaatatgatgagctccgtccatctacagcagaacaattacggcgtgaaatcagtgggccagggctactcggtgggccagagcatgagactcggcttaggggggaatgctccagtctcaataccacagcagtcccagtccgtcaagcagctgctgccctccgggaatggacggagttacggcctcggatccgagcaacggtcacaagccccggctcgatacagcctgcaatctgcaaacgccagcagtctaagcagcgggcagctgaagtctccatctttgtcgcaatcacaggcatcaagagtgctgggccagagcagctctaagcccgccgcagccgcgacagggcctcctccaggaaacacctcttccacacagaaatggaagatttgtacaatctgtaacgagctgtttcccgaaaatgtatactctgtccacttcgagaaggagcacaaggcagaaaaggttccggctgtcgctaactacattatgaagattcacaacttcacttccaagtgtctctactgtaacaggtaccttcccacagacactctgcttaaccacatgctcattcacggactgtcctgcccttattgtaggagtacattcaatgatgttgagaaaatggcagctcacatgcggatggttcatatcgacgaggaaatgggaccgaaaacggattcaacgctctccttcgacctgacactccaacaaggtagtcacacgaatattcatctcctcgtgaccacgtataatctccgcgacgctccagccgaaagcgtggcctaccatgcccagaacaatcccccagtgccaccaaaacctcagccaaaggtccaggagaaagcggatattcccgtgaagtccagcccacaggccgctgtgccctacaagaaagatgttgggaagaccttatgtcctctttgtttcagtatattaaagggacctatttcagacgctctagcccaccacctgagagagcggcaccaagttatccagactgttcatcccgtggaaaaaaaactgacctacaaatgcatccattgtctgggcgtctatacctccaatatgacggcgtcaacgataacactgcatctggtccactgccgaggagtagggaaaacccagaatggacaggataagactaacgctccctcacgcctcaaccagtccccgtcgctggccccggtgaagcgaacctatgagcaaatggaatttccactcctaaagaagcggaagctcgacgatgactcagatagcccctccttcttcgaggagaaacctgaagaacccgtggtactcgctctggacccaaaaggccatgaagacgactcttacgaggccaggaagtccttccttaccaaatacttcaataagcaaccatacccgacccggcgggagatcgaaaaactggcagcatcactgtggctctggaaaagcgacattgcctcccacttcagcaacaagagaaaaaagtgcgtgcgtgactgcgagaagtacaagcctggtgtcttgctgggattcaacatgaaggaactgaataaagtcaagcacgagatggactttgacgcagagtggctgttcgaaaaccacgacgagaaggacagtagggtcaatgcgagcaagaccgccgacaagaagctgaatttgggaaaggaagatgattcctcgtccgactcttttgaaaacctggaagaagaaagtaatgagtccggctctcctttcgaccccgtgtttgaggtcgagcccaagatatccaacgacaaccccgaagagcatgtgctcaaggttatacccgaggacgcctctgagtccgaagaaaagttagaccaaaaggaggatggatctaaatatgaaactatccatctcacagaagaaccaacaaagttgatgcacaatgcctcagactccgaggtggaccaggacgacgtcgttgagtggaaggacggagctagtccaagcgaaagcgggccagggagccagcaggtatccgatttcgaagacaacacctgcgagatgaaaccgggtacctggagtgacgagagttcgcagtctgaagacgcacgaagttccaagcctgcagcaaaaaagaaggccactatgcagggagaccgcgagcagctgaaatggaagaacagtagttatggtaaagtggaaggtttttggtccaaagaccagtctcagtggaagaatgcctccgaaaatgacgaacggctgtccaatccgcagatcgagtggcagaattctactattgatagtgaagatggggaacagttcgataatatgaccgatggcgttgctgaacctatgcacggcagcttggctggcgtgaagctgagttctcagcaggca

SEQ ID NO: 5765 - DNA, 3306 bp, synthetic construct
  misc_feature 1..3306: note = source = /note="Description of Artificial Sequence: Synthetic coding sequence"
  source 1..3306: mol_type = other DNA
atgttccaactcccagtgaacaatctgggatcactgagaaaggcacgtaagactgtgaagaagatcctgagcgatatcggacttgagtactgcaaggaacatattgaagatttcaaacaatttgagcctaacgacttttacctgaagaacactacgtgggaggacgtgggcctgtgggacccttcactgaccaagaaccaggattaccggaccaagcctttctgctgctcggcttgtccattctcctcgaagttcttctcggcttacaagtcccacttccggaatgtgcattccgaagatttcgaaaaccgcatcctcctgaactgcccgtactgcactttcaacgcggacaagaaaacgcttgaaacccatatcaagatcttccacgcgccgaacgcatcggcgccgtcgtcgtctctgtcaaccttcaaggataagaataagaacgatggcctcaagccaaagcaggcggattccgtcgagcaggccgtctactactgcaagaagtgtacttacagggacccgctctacgagattgttcggaaacacatctacagagagcactttcagcacgtggccgctccatacattgcgaaagccggagagaagtccctgaatggagccgttcccctggggtcaaacgccagggaagaatcgtccatacattgtaagaggtgcctgtttatgcccaaaagctacgaggccctggtgcagcacgtaattgaggaccatgaacggatcggataccaagtgactgctatgatcggacacacgaatgtggtggtgccgcgctccaaacctttgatgcttatcgctcctaagccgcaagacaagaaatcaatgggcttgccaccgcgtatcgggagcctcgcctccggcaacgtccgctcgctcccatcgcagcaaatggtgaaccgcctgtccattccaaagcctaaccttaacagcactggggtgaatatgatgagctcggtccacctccagcagaacaattacggagtgaagagcgtcggacaaggatactcagtaggacagtcgatgcggctgggactcggaggaaatgcaccggtatctatcccgcaacagtcccagtctgtcaagcaacttctcccgagcggcaatggtcgcagctatggactcggttccgagcagcgatcacaagccccggcccggtactcacttcagtccgccaatgcgtcgtcgctgtcgtccggccagctgaaaagcccatcgctgtcccagagccaggcgtcgcgagtcctgggccagtcctcttcgaagcctgcggcggccgcaacgggtccaccaccagggaacacttccagcacgcaaaagtggaagatctgcaccatttgtaatgaactcttcccggaaaatgtgtatagcgtccacttcgaaaaagaacataaagcagaaaaggtgccggcggtggctaactacatcatgaagatccacaacttcacctccaagtgtctgtactgcaaccgctacctgccgaccgataccctgctcaaccatatgctcatccacgggctttcctgcccctactgcagatccacttttaacgacgtggagaagatggcggctcatatgagaatggtccacatcgacgaggagatgggtccaaagaccgattctaccctgtccttcgatcttaccttgcaacaaggatcacacactaatatccacttgctggtgaccacctacaacctccgcgatgcaccggcagaatcggtggcgtaccacgcccagaataacccgcctgtccctccgaagcctcagcctaaggtgcaggaaaaggcggacatcccggtaaagagctcgcctcaggcagcagttccgtataagaaggatgtgggcaagaccctgtgcccactgtgcttctccattctcaaaggaccaatctctgatgccctcgcacaccatcttagagagagacatcaggtgatccagaccgtgcaccccgtggagaaaaagctcacctacaagtgtatccattgccttggtgtgtacacctcaaacatgacggcttccactatcaccctccatttggtgcactgtcggggcgtcggtaagacccagaacggccaagacaaaactaacgcaccatccagactgaatcaaagcccgtccctggcgccggtcaaaaggacctacgaacagatggaatttccgctgctgaagaagcgcaagctggacgatgattcggatagccccagcttctttgaggaaaagccggaggaaccagtcgttctggccttggacccgaagggtcacgaagatgactcctacgaggcccggaaatcattcctcacgaaatacttcaataagcagccgtatccgactcgccgtgaaatcgaaaaactcgctgcaagcctgtggctgtggaagagcgatatcgccagccatttttcaaacaaacgcaaaaagtgcgtgcgcgactgcgagaaatacaagccaggagtgctcctgggttttaacatgaaagaattgaacaaagtcaagcacgagatggatttcgatgccgaatggctgttcgagaaccacgacgagaaagactcccgagtgaatgcttccaagaccgccgacaagaaactcaatcttggaaaagaagatgactcatcaagcgattcgttcgaaaaccttgaagaagaaagcaacgaaagcgggtccccctttgacccggtctttgaggttgaaccgaagatcagcaatgacaacccagaagagcatgtgctgaaggtgatcccggaggacgcgtcggagtcagaggaaaagctcgatcaaaaagaggacggatcgaagtacgaaactatccatcttaccgaggagccgactaaactgatgcataacgcgtccgactcggaggtggatcaggacgatgtggtagagtggaaggacggagccagcccttccgaaagtgggccagggtcgcagcaggtgtcggactttgaagataatacttgcgagatgaagccgggaacctggtcggacgaatcgtcccagtccgaggacgcccgcagctcaaaaccggctgccaagaaaaaagcaactatgcaaggagatagggaacagctgaaatggaagaactcgtcatacggaaaggtcgaaggcttctggtctaaggaccaatcacaatggaagaacgccagcgagaatgacgaacggctgagcaatccgcagatcgagtggcagaattcgactatcgactcggaggacggggaacaattcgacaacatgactgacggagtcgccgagccgatgcacggttcccttgccggcgtcaaactgtcgtcccagcaggcc

SEQ ID NO: 5766 - DNA, 3306 bp, synthetic construct
  misc_feature 1..3306: note = source = /note="Description of Artificial Sequence: Synthetic coding sequence"
  source 1..3306: mol_type = other DNA
atgtttcaattgccggtgaacaacttgggttccctcagaaaggcacgaaaaacggtgaagaagatcctctcagacatcggtttggagtactgcaaagaacatatcgaggacttcaagcaattcgaaccaaatgatttctacctcaaaaacacgacttgggaagatgtgggactctgggatccgtcactgacgaaaaaccaggactacagaaccaagccgttttgttgcagcgcgtgtcctttctccagcaagtttttcagcgcatacaagtcccactttcgcaacgtgcattctgaggactttgaaaaccgtattttgctcaactgcccatactgtacttttaacgcggataagaaaacccttgaaactcacataaagattttccacgcacctaatgcaagcgcaccatcatcgagcctcagcacctttaaggataagaacaagaacgatggacttaaaccaaagcaggccgatagcgtcgaacaggccgtctactactgtaaaaagtgtacctaccgagatcctctctacgagattgtgcgcaagcacatttaccgcgagcattttcaacatgtcgcggcaccctacattgcaaaggccggagaaaagtctctgaacggggcagtccctctgggctcgaacgcaagggaagaatcttcgattcactgtaagagatgtctctttatgccgaaatcctacgaagcactggtgcagcatgtgatcgaagatcacgagcggattgggtaccaggtgaccgctatgatcggccatactaatgtggtcgtcccccgcagtaaacctctgatgctgatagccccaaagccgcaagataagaagagcatgggactgcctccaaggattggttcccttgcgagcggaaatgtcagaagcctgccctcccagcaaatggtgaacagattgtccatcccgaaaccaaatctgaacagcactggggtcaacatgatgagctccgtacatcttcagcaaaacaattacggcgtgaagtcagtgggacaaggctactctgtggggcagtccatgcgcctgggacttggcggaaatgcaccggtgagtattcctcaacaatcacaatcggtcaagcagcttctccccagcggaaatggccgttcctacggacttggctcagagcaaagatcacaagcccctgcaagatacagcctgcaatcggctaatgcatcgtctctgtcctcagggcagctgaagagcccttcgctgagccagtcacaagcatcgcgggtgctcggtcagtcatcgagcaagcctgcagctgctgcaactggtcccccacctggcaacacttcctccactcagaaatggaagatttgcaccatctgtaatgaactttttcctgaaaacgtgtactccgttcatttcgaaaaggagcacaaggccgagaaggttcctgcggtcgcaaattacataatgaaaattcacaactttacttcgaaatgcctgtattgtaacaggtacctgccgaccgataccctcctcaaccatatgctcatacatggcctgtcatgtccttattgtaggtcaacctttaacgatgtggaaaagatggcggcacacatgaggatggtgcacatcgatgaagaaatgggacccaagacggactccactctgtcatttgacctcaccctgcaacaaggcagccacactaacattcacctgttggtgaccacttataaccttcgtgacgcacctgccgaatcagtcgcctaccatgcacagaataatccacccgttccacctaagcctcagccaaaagtgcaagagaaggcggatattccggttaagtcgtcccctcaggccgcagtgccatataagaaggacgtgggtaaaaccttgtgcccgctttgcttctcgatcctcaaaggaccaatctcggacgctttggcccatcatttgagagagcgacaccaggtgatacagaccgtacacccagtggaaaagaagctcacctataagtgcatacattgtctgggcgtctacacctccaacatgaccgcttcgaccattactcttcaccttgtccattgccggggagttggaaagactcaaaacggtcaggataagactaatgcccctagcagactgaatcagtccccttccctcgcccctgtgaaacgcacctacgagcagatggagtttcccctgcttaagaaacggaagctggatgacgattccgatagcccgtccttttttgaagaaaagcctgaggaaccagtggtgcttgcacttgatcccaagggacatgaggatgattcttacgaagcgagaaagagcttcctgaccaagtacttcaataagcagccataccctactagacgggaaatagaaaaactcgcagcaagcctctggctgtggaaaagcgatattgcatcgcacttcagcaacaaacgtaagaagtgtgttcgggattgtgagaagtataaaccaggagtcctcttgggctttaacatgaaagagctgaataaggtgaagcatgaaatggactttgacgcagaatggctttttgaaaatcacgatgagaaggactctagggtcaatgcatcgaaaactgcagacaagaagttgaatctcggtaaagaagatgactcgtcgtccgactccttcgaaaacctggaagaggaatccaacgaatcggggagcccctttgacccggtgttcgaagtggaaccgaagatctctaacgataaccctgaagagcatgtgcttaaagtcattccagaggatgcctccgagagcgaggaaaaacttgatcaaaaggaagatggctccaagtacgaaactattcaccttaccgaggaacctacgaagctcatgcataacgcatccgattcagaagttgatcaggatgatgtggtggaatggaaagacggtgcttcaccaagtgaatccgggccaggttcccaacaagtgtccgactttgaggacaacacctgtgagatgaagcctggaacttggtccgacgagtcgtcacagtcggaggatgcaaggtcgtctaagccggccgcaaagaagaaggcaaccatgcagggtgatagagaacaacttaaatggaagaactcaagctacggtaaggtggaagggttctggagcaaggatcaaagccaatggaagaacgcatccgaaaatgatgagagactgtcaaaccctcagattgagtggcaaaactccacgattgactccgaagatggcgagcaatttgataacatgactgatggtgtggccgaacctatgcatggatcattggcaggagtgaaacttagttcacaacaagcg

SEQ ID NO: 5767 - DNA, 3306 bp, synthetic construct
  misc_feature 1..3306: note = source = /note="Description of Artificial Sequence: Synthetic coding sequence"
  source 1..3306: mol_type = other DNA
atgttccagctgcctgtgaacaacctgggttccctgagaaaggcgagaaaaaccgtgaagaaaatactttcagatattggcctggaatactgtaaggaacacatagaggacttcaagcaatttgagcctaacgacttttacctgaagaatactacctgggaagatgtgggactctgggacccaagcctgaccaagaatcaggattacagaaccaagccattttgttgttcggcatgtcctttctcctccaagtttttcagtgcctacaagagccattttcggaacgtgcactccgaggacttcgaaaatcgaatccttctcaattgtccgtactgcacttttaacgcggacaaaaagacgttggagactcacatcaagatattccatgccccaaacgcatcggccccgtcgtcctccttgtccactttcaaggataagaacaaaaacgacggactgaagcctaagcaggcagactcggtcgaacaggcggtgtactactgtaagaaatgcacttaccgggatcctctgtacgagatcgtgcgcaagcacatttacagagaacatttccaacatgtggcggcaccctacattgcgaaggcaggggaaaagagccttaatggagccgttccgcttggtagcaacgcacgcgaagagtcgtcaattcactgcaaacgctgtctgttcatgcctaaatcatacgaggcactggtgcaacatgtcattgaagatcatgaaagaatcggttaccaagtcaccgcaatgatcggtcatactaacgtggtggtccctcgctcaaaacctctgatgctgatcgcgcctaagccacaagataagaagtcaatgggactgccccctaggattgggagccttgcatccggaaatgtcagatcacttcctagccaacaaatggtgaaccgtctttcaatccctaagccaaaccttaactccactggagtgaacatgatgtcgtccgtccaccttcagcagaataactacggggtcaagagcgtgggtcagggatactccgtgggtcagtccatgcgcctggggctcggaggtaacgctcccgtgagcattcctcaacaatcacaaagtgtcaaacaactgcttccctcaggaaatggaagatcgtacgggcttggtagcgaacaaagatcccaggccccagcgaggtactcccttcagtccgcgaacgcatcctcactgtcgtcggggcaactgaaaagcccttcgctgagccaatcgcaagccagccgggttctgggtcaatcgtcgagcaagcctgcagcagcggcaactggaccacctccagggaatactagcagcactcaaaagtggaagatctgtaccatatgtaatgaactgttcccagagaacgtgtattcggttcattttgaaaaggaacacaaggcggagaaggtgccggccgtcgcgaattacataatgaaaatccacaatttcacctccaaatgcctctactgcaacaggtacctgccgactgacacgctgctgaaccatatgcttatacacggtctgtcatgcccttactgtagaagcacctttaatgacgtggagaagatggcagctcacatgcgcatggtgcatattgacgaagagatgggacctaagactgactcgactctctcattcgatctcacccttcaacagggatcgcacaccaacatacacctgttggtgaccacctacaacctccgcgatgcccccgccgagagcgtggcataccatgcacagaataacccccctgtccctccaaagccgcaacctaaggtccaagaaaaggccgatattccagtgaaaagctcgcctcaagccgcagtgccgtataagaaggatgtgggtaagaccctctgtccgctttgtttttcaatcctgaaaggacctatatcggatgcccttgcccatcatctgcgcgaacggcatcaggtgatccaaaccgtccatcctgtggaaaagaaactgacctacaagtgtatccattgtcttggtgtttacacgtccaatatgacggcaagcaccattaccttgcatttggtgcactgtagaggggtgggtaagacgcaaaacggtcaggataagaccaacgcacctagcagactgaatcaatcgccctcgctcgcaccagtgaagcgaacctacgaacaaatggagtttcccctgctgaagaagaggaagctggatgatgactctgattcccccagctttttcgaagagaagcccgaagaaccagtcgttctcgcccttgatcctaagggccatgaggatgactcatacgaagcacggaagagctttctcaccaagtacttcaacaagcaaccataccctactagacgcgaaattgagaagctcgcagcaagcctgtggctttggaaaagcgacatagcctcccatttttcaaataagaggaagaaatgcgttagagattgcgaaaagtacaagcctggagtgcttctcggattcaacatgaaggaactcaacaaagtcaaacacgaaatggattttgatgctgaatggttgttcgaaaatcatgatgaaaaggattcgcgcgtcaacgccagcaagactgcagataagaaactcaatttgggcaaagaggacgacagctcgagcgattcatttgaaaaccttgaggaagagtcaaacgaaagcggatcccctttcgacccggtgttcgaagtcgagcccaagatctcgaacgacaatcctgaggaacatgtcttgaaggtcatacctgaggatgcgtccgaatcggaagaaaaacttgaccagaaagaagatggttcaaagtacgagactatccatcttactgaggaacccaccaaactgatgcataacgcatccgattcggaagtggatcaagatgatgtggtggagtggaaagatggggcctcacccagtgagtcaggccctggatcccaacaagtgtccgattttgaagataatacttgtgagatgaagcccggcacctggtccgatgaatcttcccaatccgaagatgcacgctcatcgaaacccgctgcaaaaaagaaggcgacgatgcagggagatcgggaacagctgaagtggaaaaactcatcgtacggtaaagtcgagggcttttggtctaaggaccagtcgcagtggaagaacgcaagtgaaaacgacgagcggctctccaacccccaaattgaatggcaaaattcgaccatcgattcagaggatggagaacagttcgataacatgacggatggcgtcgcagaaccaatgcacggctcacttgccggcgtcaaactcagctcacaacaagcc

SEQ ID NO: 5768 - DNA, 3306 bp, synthetic construct
  misc_feature 1..3306: note = source = /note="Description of Artificial Sequence: Synthetic coding sequence"
  source 1..3306: mol_type = other DNA
atgtttcagttaccagtaaacaatctgggatccctccggaaggcccgtaagactgtaaagaagatcctatcagacataggactggagtactgcaaagagcacattgaagattttaaacagttcgaacctaacgatttctaccttaaaaataccacatgggaggatgtaggactttgggacccttccctaactaagaaccaggattataggactaagcccttctgctgctctgcgtgtccattttcgtccaagtttttcagtgcctacaagtcccactttaggaacgtgcatagtgaggattttgagaatcgaatactgctgaattgtccctattgtaccttcaacgcagacaaaaaaacactagaaactcacatcaaaatctttcatgcaccaaacgcctctgcgccctcttcatccttgagcacttttaaagacaaaaataagaacgatggtctgaagccaaagcaagcggatagcgtcgagcaggcggtctattactgtaagaagtgcacctaccgggatccgttatacgagattgtgcgcaagcatatctatcgagagcatttccaacatgtggctgccccttacatcgcgaaggctggcgaaaaatcactgaacggcgccgttcccctcgggagtaacgccagggaagaatcatccatccactgcaaaaggtgcctgttcatgcccaagtcatatgaagctctagtacagcacgtgatcgaggaccacgagcgcatcggctatcaggtgactgcaatgatcgggcacactaacgtggtcgtgcctcgctctaaaccgctgatgttgattgcaccgaagcctcaggataagaagagtatggggttgccccctcggatcggatcacttgcgtcaggcaacgtcaggtccctcccatcccagcagatggttaatcgcctgtccattcccaagcccaatctgaattccactggagtgaacatgatgtcgagcgtgcatctacagcagaataattacggggtgaaaagcgtgggacaggggtacagtgtaggtcagtccatgagattgggcctgggggggaacgctcccgtgtctatcccgcaacagagtcagtcggtcaagcagctgctcccttctgggaatggccgctcgtacgggctggggagtgagcagcgatcacaggcgcccgctcggtatagcctgcagtcagcaaacgcatcatctctctctagcggccagctgaaatcgccctcgctctcacaaagtcaggctagccgcgtattgggacaatcctccagtaagcctgcggctgctgctacaggccccccaccagggaacacctcgtcgacacagaaatggaagatatgtaccatctgcaacgagctcttcccagagaatgtatacagcgtgcattttgagaaagagcacaaggccgagaaagttccggcggtggccaattacatcatgaagatccacaatttcacttcaaaatgtctgtattgcaaccgctatctcccaaccgacaccttactaaatcacatgctgattcatggattgtcctgtccatattgtcgttctacgttcaacgatgttgagaaaatggcggcccacatgagaatggttcatatcgatgaagagatgggaccaaagacagactccacactctccttcgacctgacgctgcaacagggcagtcacacaaatatccatctgctggtgaccacctacaatctgagggacgctcccgccgaatccgtagcttatcacgcccaaaacaatccccctgtcccgcccaagccgcagccaaaggtgcaagagaaggcagatatccccgttaaatcctctccccaagcagctgtcccatataaaaaagacgtgggcaagaccttgtgtcctctgtgcttctccatccttaaaggacccatcagtgatgccctggcgcaccatctgagggagcgacatcaagtgatccagacagtacatccagtagaaaaaaagttgacctacaaatgcatccattgtctcggtgtgtatactagcaatatgacagcctcaactattaccctccatctcgttcactgcagaggtgtgggaaagacccaaaatggtcaggataagaccaacgctccctccaggttgaaccaatctcccagcctcgcccctgtaaaacgcacttacgagcaaatggagtttccgctcctcaagaagagaaagctcgacgatgactctgattccccctcgttctttgaggaaaagccagaggaacctgttgttcttgccctggaccccaaggggcacgaggatgacagctatgaggctcggaagtcgttccttacaaagtacttcaacaagcagccgtatccaacgcggagagagattgagaaattggccgcctctttatggctctggaaatctgacatcgccagtcatttctcaaacaaacggaaaaaatgcgtacgagattgcgaaaaatacaagccaggcgtgctcctgggtttcaacatgaaggaactcaacaaggtcaaacatgaaatggacttcgatgccgagtggttattcgaaaaccatgacgagaaggactcacgcgtgaacgcttccaaaaccgccgataagaagctgaacttggggaaggaggatgactcctcttctgattcatttgagaatctagaagaagaaagtaatgaatccggctccccgtttgaccccgtatttgaagtggaacccaaaatcagcaacgacaatcccgaagaacacgttctgaaggttatccctgaggacgctagcgagagtgaagagaaactggatcagaaagaggacggttcaaagtacgaaacaatccaccttaccgaagaacccaccaagcttatgcacaacgctagcgattccgaggtggaccaagatgacgttgttgagtggaaggatggggccagccccagcgaaagtggacctggctcacagcaggtgagcgacttcgaagacaacacgtgtgagatgaagcccggaacttggagcgatgagtcttcccagagcgaggatgctaggtcttcgaaacctgccgcgaaaaaaaaggccacaatgcaaggtgatcgagagcagctcaagtggaaaaattcttcatacgggaaagtggagggcttctggagtaaggaccaatcccagtggaagaacgcctcagaaaacgacgagaggctttctaacccccagatcgagtggcagaattccaccatcgactctgaggatggcgagcaattcgataacatgactgacggggttgccgaaccaatgcatgggagcctagccggcgttaaactctccagccagcaagcc

SEQ ID NO: 5769 - DNA, 3306 bp, synthetic construct
  misc_feature 1..3306: note = source = /note="Description of Artificial Sequence: Synthetic coding sequence"
  source 1..3306: mol_type = other DNA
atgtttcagctgccagtaaataacctcggatctcttcgcaaggctaggaaaacagtgaagaaaatcctttcagacatcgggctcgaatattgtaaagaacacatcgaagacttcaaacagtttgaacccaacgatttctatctcaagaatacaacttgggaagatgtggggctgtgggatccatccttaactaaaaaccaggattatcgcactaaaccattctgctgttcagcttgccccttctcttcaaagtttttctctgcctataaatctcattttcggaatgtacactctgaagatttcgaaaatagaattttactaaactgtccatattgtacatttaacgccgataaaaaaacactggaaactcatataaaaatcttccacgcgcccaatgcctcagcacccagtagttcactgtctactttcaaagataaaaataagaatgatggattaaaacctaaacaggctgattcggtagaacaggccgtgtactactgcaaaaagtgcacatatcgggatcctctctatgagatcgtgagaaaacacatttatagggagcattttcaacatgtggcagcaccatatatagccaaagctggggaaaagtctctaaacggggctgtacccttgggaagtaatgcacgggaagagagttctatccattgtaaaagatgtttgtttatgcccaaatcatatgaagcgcttgtgcagcatgtaatagaggatcatgaaagaatcggataccaggttactgctatgatcgggcacacaaatgtggtggttccccggtctaaaccattgatgctgatagctcctaaaccccaggataaaaagtccatgggactgccaccaaggattggaagtctagctagtggaaacgtcaggtctcttccttctcagcagatggtgaaccgactgtctatccccaaacccaatctgaacagtacaggggttaatatgatgtcctccgtgcacctgcagcagaacaattatggggttaaatccgtgggacagggatatagtgtcgggcagtctatgcgattaggattaggggggaatgcgcccgtatccatcccccagcagtcccaatctgttaaacagctcctcccttcagggaacggacgttcctacgggctgggatccgaacagcgctcacaggcacccgctcggtattccctccagtcggccaatgcctcaagtctttctagtgggcagcttaagtctccctcgctctctcagtcacaggccagtagagttctagggcagtcctctagtaaacctgcggcagcagccacagggccccccccagggaacacaagttcgactcaaaaatggaaaatttgcactatatgcaacgaactctttcctgagaacgtttattctgtgcattttgaaaaagaacacaaagccgagaaagtcccagctgtggctaactacatcatgaaaatacacaactttacttctaaatgtctatactgtaaccggtatctccccacagatactctcctgaatcacatgctcattcacggactttcatgcccttattgtagatcaactttcaacgacgtagaaaaaatggccgcccatatgagaatggttcatatcgatgaagaaatgggacccaaaactgactctactctgtcttttgatctgactctccagcaaggatcccacacaaacatccatctcctggttacaacatataacctacgcgacgccccagcagagtctgtggcataccatgcccagaacaacccccccgtccctcccaaaccccagcctaaagtgcaggaaaaagctgatatccccgtgaaatcttctccccaagcagcagtgccttataaaaaagatgtaggaaaaactttatgtcccctctgtttctctatcctgaaagggcccatttctgacgccctcgcccaccatctaagggaacgccatcaggtgatacagactgtgcaccctgtagaaaaaaagctcacatataagtgtatacattgcctcggagtgtacacatccaatatgacagcatcaactattactttgcatctggtgcattgccgtggggtaggaaaaacacagaacgggcaagataaaactaacgctcctagtaggctgaaccagagtccctctctggctccagtgaaacgcacatatgaacagatggaatttccgctgctcaagaaaaggaaactagatgatgattcagactccccttctttttttgaagaaaagccagaagagcccgtggtgcttgctctcgatcctaaagggcatgaagatgattcctatgaagcccggaaatccttcctcacaaaatactttaacaaacagccatatcctactcggcgcgaaattgaaaaactggccgccagtctgtggctgtggaagagtgacatcgcctctcacttcagtaacaaacgaaagaagtgtgtccgggattgcgaaaaatataaacccggggtcctcttgggatttaatatgaaagaactcaacaaagtcaagcatgagatggacttcgatgctgaatggctcttcgaaaatcatgatgaaaaagattcccgcgtgaacgccagtaaaacagccgataaaaaattaaacctgggaaaggaggacgactctagttctgattccttcgagaatctggaagaagagagtaatgagtcagggtccccctttgatcctgtgtttgaagtcgagccaaaaatctccaacgataatcctgaagaacacgtgctaaaagtcatccctgaagatgcttctgaatctgaagaaaaactcgatcagaaagaagacgggtctaaatacgaaactattcatctgacagaagaacctacaaaactcatgcataatgcatctgatagtgaagttgatcaagatgatgtggtggagtggaaggatggagcctctccctccgaatctggaccagggtctcagcaggtctcagattttgaggataacacatgcgaaatgaaaccagggacatggtccgatgaatcttctcaatcagaggatgctaggtcatccaagccagctgcaaaaaaaaaagctactatgcagggagatagagagcaactgaaatggaaaaattcttcttatggaaaagtggagggattctggagtaaagatcagtctcagtggaaaaatgctagtgagaatgatgaaagactatctaatcctcagatagagtggcagaactctactattgattcagaagatggggaacagtttgataacatgacagatggggtcgccgagcccatgcatgggtctttggccggggtgaaactctcttcccagcaggct

SEQ ID NO: 5770 - DNA, 3306 bp, synthetic construct
  misc_feature 1..3306: note = source = /note="Description of Artificial Sequence: Synthetic coding sequence"
  source 1..3306: mol_type = other DNA
atgtttcagctacctgttaacaatttaggttcactcagaaaggccagaaagaccgttaagaaaatcctatctgatattggtctggagtactgcaaggagcatatagaagactttaagcagttcgagccaaatgacttctatttgaagaatacaacgtgggaggatgtgggactgtgggaccccagcctcaccaagaatcaggattacagaacaaaacccttctgttgctccgcatgtcccttttcttctaagttcttcagcgcttataaaagtcacttccgcaatgtccattcggaggactttgagaaccgcatccttctcaattgtccctattgcactttcaacgccgataaaaagacacttgaaacacacatcaagatttttcacgcccccaatgcatcagctccgagttcatctcttagtacattcaaggataagaataagaatgacggacttaaacctaagcaggccgactctgtcgagcaagccgtctactattgtaagaagtgcacttaccgcgacccgttgtacgaaatcgtccggaagcacatctaccgcgagcattttcagcatgtcgcggcaccatatatagcgaaggcaggcgaaaagtcgctaaatggcgctgtccctctcgggtccaacgcccgagaagaaagctccattcattgcaaacggtgcctgttcatgccaaagagctatgaggcccttgtgcagcacgtgattgaggaccacgaacggatcggataccaggtgacagccatgattgggcacactaacgtcgtggtgcctcgctctaaaccactcatgttaattgcacccaagcctcaggacaagaaatctatgggtctccctccccgcatcggatcgcttgcctcaggcaatgtacgctcccttccttcacagcaaatggtcaatagactgtctattcctaagcccaatctgaactctaccggagtgaatatgatgagctccgtccacctgcagcagaacaactatggcgtgaaatcagtgggccaaggctatagtgttggccagtcaatgcgactcggattaggaggcaacgctcccgtaagtatcccccaacagtcccagtctgttaagcagctgctgccaagcggaaacggacggagttacggcctcggtagtgagcagaggtcccaggcccctgctcgatactccctgcaaagcgcaaatgcatcaagcctgagtagtggacagctaaagtcaccttctctatcccagagtcaggcgtcccgcgtgctgggccagagtagtagtaaacccgccgccgctgccactggtcctcctcccggcaatacctcttcaacgcaaaagtggaagatctgcaccatctgcaatgagctgttccccgagaatgtgtactccgtgcactttgagaaggagcataaggcggagaaagtgccagcggtagccaattatataatgaagatacacaattttactagtaaatgcctttactgtaatcgttacttgccaaccgatacattgctcaatcacatgctgattcacggcctctcctgcccctattgccggtcgacttttaacgatgtggagaagatggcagcacacatgaggatggttcacattgacgaggagatgggcccaaagaccgacagtaccctgagctttgatctgactttgcagcagggttcgcacactaacatccacctgctcgtcacaacgtataatctgcgagatgccccagccgaatccgtggcgtaccatgctcaaaataatccacccgtgccaccgaagccacagccgaaagtccaggaaaaggctgatattccagtgaaatcttctcctcaggcagccgttccctacaaaaaagatgtgggtaagaccctgtgtcccttgtgtttctcgattttgaaaggacccatatcagatgcacttgcccaccacttgcgtgaaagacaccaggtcatccagactgttcatccagtggagaaaaagctgacttacaagtgcatccattgtcttggcgtgtatacaagcaacatgaccgcctctaccatcaccctccacttagtgcactgccggggcgtggggaagacacaaaacggccaagacaaaacgaatgcaccttccaggctgaaccagtcgccctcgctagcacctgtgaagcggacctatgaacagatggagtttcctctcctgaaaaagagaaaacttgatgacgactccgattcaccatccttcttcgaggagaagccagaggaacctgttgtgttggcgctcgatccaaagggccatgaagatgactcctacgaagccagaaagtcgtttctcaccaagtattttaataagcagccgtaccccacaagaagagaaattgaaaaacttgcagcctctctgtggctctggaaaagtgacattgcgagccatttttctaataaacgcaagaaatgtgtgcgtgactgtgaaaagtataaaccaggggttctgcttggattcaacatgaaggaactgaacaaagttaagcacgagatggattttgacgccgagtggcttttcgaaaaccacgatgagaaggattccagagtgaatgcctcaaaaacagccgacaagaaactgaacctgggaaaggaggacgatagtagtagcgactcattcgaaaaccttgaggaggagtccaacgagtcgggcagccctttcgacccagtgtttgaagtcgaacctaaaatctccaatgataaccctgaagagcacgtgctgaaggtgatccccgaggacgcttctgagtccgaagaaaagttagaccagaaggaagacggtagcaaatatgaaactatccatctgaccgaagagcccacaaagctgatgcacaacgctagcgactccgaagtggatcaggacgatgtagttgagtggaaagatggtgcgtcgccgagcgagtctggacccggctctcagcaagtttccgacttcgaggacaatacttgcgagatgaaaccaggtacatggagcgatgaatcctcacagagcgaggacgcccgttctagtaagcccgcagccaaaaaaaaggctacgatgcagggcgatcgggagcagttgaagtggaaaaactcttcctacggaaaagtggagggattctggtcaaaagatcagagtcagtggaaaaacgcctctgagaatgatgaaagattatccaacccccagatcgaatggcaaaattctaccatcgacagcgaagacggcgagcagttcgacaatatgaccgacggggttgctgagccaatgcatggcagcctggcaggggtgaaacttagcagccagcaggct

SEQ ID NO: 5771 - DNA, 3306 bp, synthetic construct
  misc_feature 1..3306: note = source = /note="Description of Artificial Sequence: Synthetic coding sequence"
  source 1..3306: mol_type = other DNA
atgttccagttgcccgttaataatctgggttcacttagaaaagctaggaagacagtgaaaaagattttgtcagacatcggcctcgaatactgcaaggagcacatcgaggacttcaagcaatttgaacctaacgacttttacttgaagaacactacctgggaggatgtcggtctgtgggaccccagcttgacaaagaatcaagactacagaactaagcctttttgctgctctgcatgtcccttctcttctaagtttttttcagcatacaagtctcactttagaaatgtgcattcagaggactttgagaaccgtattctgctgaattgcccctattgtaccttcaatgccgacaagaaaaccctcgagacccatatcaaaatctttcacgccccaaacgcttctgctccatcttcctccctgagtaccttcaaggataaaaataaaaacgacggacttaaacccaagcaggccgacagcgtcgaacaagctgtgtattactgcaaaaagtgtacatatcgtgatcccctttacgaaattgtgaggaagcatatttacagggagcatttccagcacgtagccgccccatacattgcaaaggctggcgagaaaagtctcaacggcgctgtaccactgggatctaacgcacgtgaggaatcttcaatccattgcaaacgctgtctttttatgcctaaaagctacgaggctctcgtgcagcacgtgattgaggaccacgaaaggattggttaccaagtcaccgccatgatcggccatacaaatgtggtcgttcctaggagtaaacccctcatgctgatcgcacccaaaccacaagataagaagtccatgggcctgcccccccgcatcggttccctggcctcaggcaacgtccgttcccttccctcacagcagatggtgaacaggctcagcatccccaagcctaaccttaactctactggcgtgaatatgatgtcatcagtccatctccagcagaacaattacggtgtcaaatctgtgggccagggttactccgttggccagtctatgaggctgggcctgggaggcaacgcccccgtcagtattcctcaacagtcccaatctgtcaagcagctcttgccttccggaaacggtcgctcttacggcctgggctccgagcaacgctcacaggctccagcacgttattccctgcaatcagcaaatgcctcttctctttccagtggtcagctgaaaagtccttccctctcccaatcccaagcctccagggtactcggtcaaagctccagtaagccagctgcagccgctaccggtcccccaccaggtaacacctctagtacccagaagtggaagatctgtacaatctgtaacgaactcttccccgagaacgtctattccgttcacttcgaaaaggaacataaagctgagaaggttccagccgtggctaactatattatgaaaatccataacttcacctctaaatgtttgtactgcaaccgctatcttccaactgatactttgctgaaccatatgctgatccacggactttcttgtccatactgtcgtagcactttcaacgacgttgaaaaaatggccgcccatatgcgcatggtgcatattgatgaggagatgggccccaaaacagactcaaccttgagcttcgacctgaccctgcagcagggctctcataccaacatccaccttctcgtgactacctacaatctcagagatgcacctgccgaatctgtggcctaccacgcacaaaacaaccctcctgtccctcctaagccacagcctaaggttcaggagaaggcagatatcccagtaaagagttctccccaggccgccgtgccatataagaaggacgtgggtaagaccctttgccccctctgctttagcatcttgaaaggacccatttccgatgcacttgctcaccacctcagggagcgccaccaagtaatccagactgttcaccccgttgaaaaaaaactcacctataagtgcattcactgcctgggagtctatacctccaacatgacagcctccaccatcacactgcacctggttcattgcaggggtgtgggaaagacacagaatggccaggacaagaccaacgcaccaagtagactgaaccagtccccaagcctggcccccgtcaaacgcacctacgaacagatggagttcccactgctgaagaagaggaagctggacgacgattccgattcccccagtttctttgaggagaagccagaggaacccgtggtgctggccctcgatcctaaaggtcacgaagacgactcatacgaagctaggaagtcttttctcaccaagtactttaacaagcaaccataccccactagacgcgagattgaaaaattggccgcttctttgtggctttggaagtcagatatcgcttcccacttctcaaacaaaaggaagaagtgtgtgagagattgtgagaagtacaagcccggagtgctgctgggattcaatatgaaagaacttaacaaggtcaagcacgaaatggatttcgatgccgagtggctgtttgaaaatcacgacgaaaaggattcaagagttaatgcatctaaaacagctgacaagaagctgaacctcggcaaggaagacgattccagtagtgactcctttgaaaatctcgaggaggaatctaacgagtctggctctcccttcgacccagtgtttgaggtggaacctaaaatcagcaacgataacccagaagaacatgtgttgaaggtgatccccgaagatgcatctgaatcagaggaaaagttggaccagaaggaggatggttcaaaatatgaaactattcatctgaccgaagagccaacaaaattgatgcacaacgcttccgattcagaggtggaccaggacgacgtagttgaatggaaagacggtgcatctccttcagagtccggaccaggaagtcagcaggtgtccgacttcgaggacaacacttgcgagatgaagcccggtacctggtcagatgaatctagccagagtgaggatgcacgtagttctaagcctgccgctaagaagaaagccacaatgcaaggcgacagggaacagctgaagtggaagaactccagctacggaaaggtcgaaggtttctggtcaaaggatcaatctcagtggaagaacgcctctgagaacgacgaaagactcagtaacccacaaatcgaatggcagaattccacaatcgacagcgaggatggcgagcaatttgataatatgaccgatggagtggcagagccaatgcacggctctctggccggtgtcaaactctcatcccagcaggct

SEQ ID NO: 5772 - DNA, 3306 bp, synthetic construct
  misc_feature 1..3306: note = source = /note="Description of Artificial Sequence: Synthetic coding sequence"
  source 1..3306: mol_type = other DNA
atgttccagctgccggtgaacaacctgggatcactgagaaaggcaagaaaaaccgtcaagaagattctttcggacattggcctggagtactgcaaagagcatatcgaggactttaaacagttcgagccgaacgacttctacttgaagaatactacttgggaggatgttggactgtgggacccctcactgaccaagaaccaggattaccgcacgaagccgttttgctgctctgcgtgcccgttctcaagcaagttcttttcggcctacaagagccacttccgcaacgttcactcagaggacttcgagaataggatcctcctgaactgcccgtactgcaccttcaatgcagacaaaaagactctggagactcatatcaagatttttcacgctccgaacgcctctgcaccttcatcctcattgagcacttttaaggataagaataagaatgatggactcaagccgaaacaggcagactcggtggaacaggcagtgtattactgcaagaaatgtacctaccgcgatccactctacgaaatcgtcagaaagcacatctaccgggaacattttcaacacgtcgccgccccatatatcgccaaagcaggggagaagtccctgaacggagccgtgcctctgggctccaatgcgcgcgaggaatcctccatccactgtaagcgctgcctgttcatgccgaaaagctacgaagcgctggtccaacacgtcatcgaggaccatgagcggattggttaccaggtgactgcgatgatcggtcataccaacgtggtcgtgccgcggagcaaaccactgatgctgatcgcaccgaagcctcaggataagaagagcatggggttgccaccccggatcgggagccttgcatcaggaaacgtgcggtccctgccgtcccagcagatggttaatcgcctgagcattccaaaacccaacctcaatagcactggtgtgaatatgatgtcgtcggtgcacttgcagcagaacaactacggagtgaaaagcgtcggtcagggctactcggtgggacaatccatgagactcggcctgggaggtaatgctccggtgtccatcccacagcaatcacagtccgtcaaacaactgctgccatcgggcaatggtagatcatacggactcggcagcgaacaacgctcgcaggcacctgctcggtacagcctgcaatccgctaacgcgtcatcactcagttcaggacagctcaagtcgcctagcctgtcccaatcgcaggcctcccgggtcctcggccagtcctcctcgaaaccagccgcagctgctaccggaccaccaccggggaacacctcgtcgacccagaagtggaagatctgtaccatctgcaacgagttgttcccggaaaatgtgtactcagtgcattttgagaaagaacataaagccgaaaaagtgccggcagtcgccaattacataatgaaaattcacaacttcactagcaaatgtttgtactgtaatcggtacctgccaacggacacccttctcaatcacatgctgatccacgggctgtcctgcccttactgccggtcaaccttcaatgacgtggagaagatggccgcgcacatgcgaatggtccacatcgacgaggagatgggcccaaaaaccgattcgaccctgtccttcgacctcaccctgcagcaaggctcgcataccaacatccacctgctcgtcaccacctacaacctgcgggatgcaccggcggaatcagtcgcgtatcacgcacaaaacaacccgccggtgccgcctaaaccgcagccgaaggtgcaggaaaaggccgatatcccagtgaagagctcgccccaggccgcagtgccttacaaaaaggacgtgggaaagaccctctgcccgttgtgcttctctatcctgaagggtccaatctcggatgccctcgcccaccacctgagagagcggcatcaggtgatccagacggtgcatccggttgaaaagaagctcacctacaaatgcattcactgtctcggcgtgtacacctcaaatatgaccgcgtccaccatcaccctccacctggttcactgccgcggtgtcggaaagacccagaatggccaagacaaaactaacgctccgagtagactcaaccagtccccatcattggcccctgtgaagcgcacctacgaacagatggagttcccgctcctcaagaagagaaagctggacgatgattcggacagcccttccttcttcgaagagaagccggaagagcctgtggtgttggcactcgacccgaagggacacgaggacgattcctacgaagcacgcaagtcgttccttacgaagtactttaacaagcaaccgtacccgacccgacgcgaaatcgagaagttggcagcctccctctggctgtggaagtccgatatcgcctcacacttctccaacaagcgcaagaagtgcgtgagggattgtgaaaagtataagccgggagtgctgttgggcttcaatatgaaggagctcaacaaagtgaagcacgaaatggatttcgacgccgagtggctgttcgagaatcacgacgaaaaggacagcagggtcaacgcatccaagaccgcagacaagaagctgaatctgggtaaggaagatgactcgtcctcggactccttcgaaaacctggaggaggagtcaaatgagtccggaagcccgttcgacccagtttttgaagtcgagccgaagatctccaacgataacccagaagaacacgtcctcaaggtgatccctgaagatgcatcagagagcgaagaaaaactcgatcaaaaagaggacggaagcaagtacgaaaccatccatcttactgaagagccaactaaattgatgcacaatgctagcgatagcgaagtcgatcaggacgacgtcgtggagtggaaggatggagcctccccgtctgaatcgggaccgggttcccagcaggtatcagatttcgaggacaacacctgcgagatgaagccaggaacttggtcggacgaatcgtcgcagagcgaggacgcacgctcctcgaagccggccgcgaagaaaaaggccacgatgcaaggagatcgcgagcagttgaaatggaagaacagcagctatggcaaggtcgagggattctggtctaaggaccagagccagtggaagaacgcatcggaaaacgacgagcggctcagcaatccacagatcgaatggcagaactccaccatcgactctgaagatggcgaacagttcgacaacatgactgatggtgtcgctgaacctatgcacgggtcgctggcaggagtgaaactgtcatcacaacaagcc

SEQ ID NO: 5773 - DNA, 3306 bp, synthetic construct
  misc_feature 1..3306: note = source = /note="Description of Artificial Sequence: Synthetic coding sequence"
  source 1..3306: mol_type = other DNA
atgttccaactgcctgtgaacaaccttgggagccttagaaaagcccgaaagactgtgaagaagattctgtcagatataggcctggaatactgcaaggaacatattgaggactttaagcagtttgaaccgaacgatttctacctgaagaataccacctgggaagatgtcggtctgtgggacccttcgttgacgaaaaaccaagactaccgaaccaagcccttctgttgcagcgcctgcccatttagctccaagtttttctcggcatacaaatcacattttaggaatgtgcattccgaagattttgaaaacagaatcctgctgaattgtccgtactgcacctttaacgccgacaagaaaactctggaaacccacattaagatatttcacgcacctaacgcatcggcaccttcatcctccctgtccacctttaaggataagaacaaaaacgacggccttaagccaaagcaggcagatagcgttgagcaggctgtgtactactgtaaaaagtgtacttacagagatccactgtacgaaatcgtaagaaagcacatttaccgtgaacattttcagcatgtggctgcaccttacatcgcaaaggccggtgaaaagtcgcttaacggagcggtgccactgggtagtaatgcccgcgaagagtcgtcaattcattgtaagaggtgtctgttcatgcctaagtcctacgaggcactggtgcagcacgtcattgaggaccatgaaagaattggttatcaagtgactgcaatgattggtcatactaatgtcgtggtgccacgcagcaaaccgctgatgcttattgcccccaaaccacaagataagaagtcgatgggcctgccacctcgaatagggagccttgcatcaggtaacgtgaggtcgctcccatcccagcaaatggtcaatcgtctgagtattcccaagcctaaccttaacagcactggggtgaacatgatgtcgagcgtgcacctccaacagaataactatggtgtcaagtcagtggggcagggctactcggtcggacagtctatgcggcttggattgggcggaaacgcacctgtgtccattcctcagcaatcacaaagcgtgaaacaactgctgccctctggaaatggccggtcctatggtctgggttccgaacaacgttcccaggctcccgctcggtactcgcttcaatccgcgaacgcatcctcgctgtcgagcggtcagcttaagtcgccttccttgtcgcaatcacaagcatcaagagtgctgggacagtcgtcgagcaaacctgcagcggccgccacgggacccccgcctgggaatacgtctagcactcaaaagtggaagatctgtactatatgcaatgaattgtttccagaaaatgtctactcggtgcatttcgaaaaggagcataaggcggagaaagtgccagccgtagcgaattacataatgaagattcataactttactagcaagtgcctgtactgcaacagataccttccaactgatacgctcctgaaccatatgctgatccacggcctttcttgtccttactgtcgctccaccttcaatgacgtggagaagatggcagctcacatgcgcatggtccatatcgatgaggagatggggccaaagaccgactcgaccctcagctttgacctgacccttcaacaaggttcccacactaacattcatctcttggtcactacctacaaccttcgtgatgcacccgcagagagcgtcgcataccatgcacagaacaatcctccggtgccacctaagccacaaccaaaggtgcaagaaaaggcggacatccctgtgaaaagcagccctcaggcggcagtgccttataagaaagatgtcggaaagactctttgcccactttgtttcagcatactgaaaggaccaatatccgacgccctggcacatcatctccgagagcgacaccaggtgatccaaaccgttcatcctgtcgagaaaaagctcacctacaaatgtattcattgtttgggagtatacaccagcaatatgaccgcatctactatcactctgcacctcgtgcactgtaggggcgtcggaaagacgcagaacggtcaggataaaactaacgccccgagcaggctcaatcaatcaccttcgcttgcaccagtgaagagaacctacgaacagatggaatttccgcttctgaaaaagcgcaagttggatgatgactccgattccccttccttttttgaggagaagccggaagaaccagtggtgctggcgctcgaccctaaaggacacgaggacgactcatacgaagcgaggaagtctttcctgactaaatacttcaacaagcagccataccctaccagaagagaaattgaaaaactcgcagcatcgctctggttgtggaaatcggatatcgcgtcgcacttttccaacaagaggaaaaagtgtgtcagagattgtgaaaagtacaaacccggtgtgctcctcggattcaacatgaaagagcttaacaaggtcaagcatgaaatggactttgacgctgaatggctttttgaaaaccacgacgagaaggattccagagtcaatgcttcgaaaaccgctgacaagaagctgaacctcggtaaagaagatgattcgtcatcagatagcttcgagaatctcgaggaagagtcgaatgagtcgggttccccattcgatccggtattcgaagtggaacccaagatctccaatgataacccggaggaacatgtgcttaaggtgataccagaggatgcctcggagagcgaagagaaactggaccaaaaagaggacggatcgaagtacgaaaccatacatcttactgaggaaccaaccaaactcatgcataacgcatcagacagcgaagtcgatcaggatgacgtggtggaatggaaggacggagcgtcgccttcagaatcgggccctggatcgcaacaagtgtctgactttgaagataacacttgcgaaatgaagcctggaacttggtcggatgaatcgtcccaatcagaggatgcacggtcgagcaagccagcagccaagaaaaaggctaccatgcagggagatcgggagcagcttaaatggaagaactcgtcgtatggtaaggtggaaggcttttggtcgaaggatcagtcccagtggaagaatgcatcggaaaacgatgaacgtttgagcaatccacagattgaatggcaaaacagcacgatcgatagcgaagatggagaacagtttgataacatgaccgatggggtggccgaacccatgcacggatcgctggcgggagttaagctgtcatctcaacaagcc

SEQ ID NO: 5774 - DNA, 3306 bp, synthetic construct
  misc_feature 1..3306: note = source = /note="Description of Artificial Sequence: Synthetic coding sequence"
  source 1..3306: mol_type = other DNA
atgttccagctgccggtcaacaacctggggtcactgcgcaaggcccggaaaactgtgaagaagatcctctcagacatcgggctggagtactgcaaggaacatatcgaggacttcaagcaattcgagccgaacgacttctacctgaagaacactacctgggaggacgtcggactttgggaccctagcctcaccaagaaccaagactaccggacgaaaccgttctgttgctccgcgtgcccattttcgtctaaattcttcagcgcatacaagtcgcactttcggaacgtgcactcagaagatttcgagaataggatcctgctgaattgtccttactgtacttttaacgcggacaaaaagactctggagactcacatcaagatcttccatgcccccaacgcgtcggcgccgtcatcgtcgctgagtacgtttaaggataagaacaagaacgacggactcaagcctaagcaggcggattcagtcgaacaagcagtgtattactgcaagaagtgcacttaccgggacccgctgtacgagatcgtgaggaagcatatctaccgggaacatttccagcacgtggccgccccttatatcgctaaggccggtgagaagtcgctgaacggtgctgtcccgctcggatcgaatgcgcgggaggaatcgtctatccactgtaaacgctgcctcttcatgccgaagagctacgaggcactggtgcagcacgtcatcgaggaccatgaacggatcggatatcaggttactgcaatgatcggacacactaacgtggtcgtgccgcgctccaagccgcttatgcttatcgcgccgaaaccgcaagataagaaatcgatgggactgccaccgcggatcgggtccttggcttcgggaaacgtgagatccttgccttcccagcaaatggtgaatcgcctttccatccctaaaccgaacctcaacagcactggagtcaacatgatgtcatcagtccacctccagcaaaacaattacggcgtcaagtccgtgggacaaggatattcggtcggacagagcatgagactcgggctgggagggaacgcgcctgtgtccatccctcaacagagccagagcgtgaaacagcttctcccgagcggaaacggacgctcgtacggattgggctccgaacagaggtcccaagcaccggcacggtattcgctgcaaagcgcaaatgcttcgtcattgtcctccgggcagctgaaatcgccaagcctctctcagagccaggccagcagagtgctgggccagtcctcgtcgaagcctgccgcagcggctactggcccgcctccgggaaacacctcgtcgacgcaaaagtggaagatctgcacgatctgcaatgagctctttccagaaaatgtgtactcagtgcactttgaaaaggagcataaagcggagaaggtgccggccgtcgccaactacatcatgaaaatccacaatttcacgtcaaaatgcctgtactgcaatcggtacctgccgaccgacaccctgctgaaccatatgctgatccacggcctgagctgcccatactgccggtccaccttcaacgacgtggaaaagatggcagctcacatgcgcatggtgcacattgacgaagagatgggtccaaagaccgactcaacgctgtcctttgatctcaccctccagcaggggtcgcacaccaatattcatcttctcgtcacgacttacaacctgcgcgacgcgcctgcggaatccgtcgcctaccatgcacagaacaatccccccgtgcctccaaagccccaaccgaaggtccaggaaaaggcggacattccggtgaagtcctcaccacaggctgcggtgccttacaagaaggatgtgggaaaaactctttgccccctgtgtttctccatcctgaaaggcccaatctccgacgccctggcgcatcatctgagagagcgccatcaggtcatccagaccgtgcatcccgtcgagaaaaagctgacttacaagtgcatacattgccttggcgtgtacacctctaatatgactgcgtcgactattacgctccacctggtgcattgccgcggcgtgggcaaaactcagaatggccaagataagacgaacgccccgagccgcctgaaccaatccccttccctggcgcctgtgaagcggacctacgagcaaatggaattcccgctgctgaagaagagaaagctcgatgacgattcggactccccgtcgtttttcgaggaaaagcctgaagaacctgtggtcctcgcgctggatccgaaggggcacgaggacgattcctacgaggcacgcaagtcgtttctcaccaaatacttcaataagcagccatatccgacccgccgcgaaattgagaaactcgcagcgtcactgtggctgtggaaatccgacatcgcttcgcacttctcgaataaacggaaaaagtgcgtgagagactgcgaaaagtacaagccgggagtgctgctgggctttaacatgaaagaactcaacaaagtgaagcacgagatggacttcgatgcggaatggctgtttgaaaaccacgatgagaaagattcaagagtgaacgccagcaagaccgctgacaagaagctcaacttgggtaaggaggacgactcctcttcggactctttcgaaaacctggaagaagaatcgaatgagagcggaagccctttcgacccggtgttcgaagtggaacccaagatttcgaacgacaaccccgaagaacacgtgctgaaggtcatccccgaggacgcatccgagtcggaggagaagctggaccagaaagaggatggatcgaagtatgaaaccatccatctgactgaggaaccgaccaaactcatgcataatgcgtcagactcagaagtcgaccaggacgatgtggtcgaatggaaggacggcgcgtcgccgagtgaatcggggccgggctcccagcaggtgtcagacttcgaggacaacacctgcgagatgaaacccgggacctggtcggacgagtcctcgcagtcggaagatgccagatcatccaagccggccgccaaaaagaaagccacgatgcaaggtgaccgcgaacagcttaaatggaaaaactcgagctacggaaaggtggaaggattttggtccaaggatcagtcacagtggaagaatgcttcagaaaatgatgagcggctgtccaatccacaaatcgagtggcagaacagcaccatcgattcagaggacggagaacagttcgacaatatgaccgacggggtcgctgaaccgatgcatggatccctcgccggggtcaagctgagctcacagcaagcc

SEQ ID NO: 5775 - DNA, 3306 bp, synthetic construct
  misc_feature 1..3306: note = source = /note="Description of Artificial Sequence: Synthetic coding sequence"
  source 1..3306: mol_type = other DNA
atgttccagctgccagttaataacctaggatccctacgaaaagcaagaaagactgtgaaaaaaattctttccgatataggactcgaatactgcaaggagcacatagaagattttaagcaatttgaacccaacgacttctatttgaaaaataccacgtgggaagatgttggcctctgggacccatctctgacaaagaaccaggactataggacaaaaccgttctgttgctccgcttgcccgtttagcagtaaatttttttctgcgtataagagccatttcaggaatgtgcactccgaagattttgaaaacagaatcctgttgaactgtccctattgtaccttcaatgccgataagaaaacgctggagactcacattaaaattttccatgcaccgaatgcctcagctccttctagctccctgtccactttcaaggataagaacaagaacgacggccttaagccgaaacaagcagactccgtggaacaggcagtatactactgtaaaaaatgcacttacagggacccactttatgagatcgtaaggaaacatatctacagagagcactttcaacacgtagccgctccatacatcgctaaggccggagaaaagagtctgaatggcgccgtgccgcttgggagcaacgcaagggaagagtcatctattcattgtaaaagatgccttttcatgccaaagtcctatgaggctttggtccagcatgtgatcgaggaccacgagaggatcggataccaggtaacggccatgatcggacacacaaatgtggtggtgcctcgatccaagcctttaatgctgatcgcgccaaaaccgcaggacaagaaaagtatgggcctccccccaaggataggttctcttgcgtcaggaaatgtccggagcctgcctagccagcagatggtgaacagactgagcatcccgaaacctaacctgaactcaactggtgtgaacatgatgtcgtcagtgcacctacagcagaataactatggggtcaaaagcgtggggcagggctattccgtaggccagagcatgcgactcggcttagggggaaacgccccagtgagcattccacagcagtctcagtccgtcaaacaactgttaccttccgggaacgggcgaagctatggactcggctccgagcaacgatcacaggcgccagctagatattcactacaatcggctaacgcctcaagtttgtcctctggtcagttgaagtccccttcgctgtcccagagccaagcctccagggtgttaggccagagctctagcaaaccagctgcagctgcaaccggccctccccccggaaatacctcctccacccagaagtggaaaatttgtacgatctgtaatgaacttttccctgagaacgtatattcagtgcatttcgaaaaggaacataaggccgaaaaggttccagcagtcgctaactacatcatgaaaatccacaacttcacctccaaatgtctgtattgtaatcgatatctgcctacggacactctcttaaatcatatgttaatccatggtctgtcctgcccttattgccgaagcaccttcaacgacgtggaaaagatggcggcacacatgaggatggttcatattgacgaagaaatgggtccaaaaaccgattccactctgagtttcgacctcacacttcagcagggatcacacactaacatccacctgctagttacgacgtacaatttgcgagacgcccctgccgaaagtgtagcctaccacgcccagaacaatccacccgttcccccaaagccacagcctaaagtgcaggaaaaggccgatattccggtgaaatcctccccgcaagccgccgtgccttataagaaagacgtcggtaaaaccctgtgccccttgtgtttctctatccttaaagggcctatcagtgatgctttggcccatcatctgagggaaagacatcaggtaatccagaccgttcacccggtggaaaagaaactgacctacaagtgcatccactgtctgggtgtgtataccagcaatatgacagcctcaacaataaccttgcatctggtccactgcagaggcgtgggcaaaacacagaatggacaggataagacaaacgcaccgagccggctgaaccaatccccctctctcgctccagttaaaagaacatacgagcagatggagttcccgctcttgaaaaagcgtaaactggacgacgatagtgactccccatcattcttcgaagaaaaacctgaggaacctgtggtattagctctcgatccaaaggggcacgaggatgacagttatgaggcaaggaaatccttcctgactaaatattttaacaagcagccctacccaacccgtcgtgaaatcgaaaaattagccgcaagtctgtggctttggaagagtgacattgcctctcacttctccaacaagagaaaaaagtgtgtcagggactgtgagaaatataaacctggagttctgttgggcttcaacatgaaagaactaaacaaagtgaagcacgaaatggatttcgatgccgagtggctctttgagaaccacgatgaaaaggattctcgggtgaatgcatccaaaaccgccgacaaaaaactgaacctggggaaggaagacgactctagctccgattcttttgagaaccttgaagaagaatctaacgaaagtggctccccctttgatcccgtgttcgaagtggagccaaaaattagcaatgacaaccccgaagaacatgtgctaaaggtaattcctgaagacgcttccgaaagcgaagaaaaactcgatcaaaaggaggacggttcaaagtatgaaacgatccacctcaccgaagagccaacaaagttgatgcacaacgcttccgatagtgaggtggaccaagacgatgtggttgaatggaaggatggggctagcccaagtgaatccggcccgggttcacagcaggtgtccgatttcgaagacaatacatgtgagatgaagcccggcacctggtccgatgaatcttcccagtccgaagacgctcggtcctcaaagccagctgcgaagaagaaagccacaatgcagggggatcgagagcagcttaagtggaagaactcatcctatgggaaagtggaaggtttttggtcgaaagatcagagtcagtggaaaaacgccagcgagaatgacgaaaggctgtccaatccccagattgagtggcaaaatagcaccatcgatagtgaagacggggagcaattcgataacatgaccgacggcgttgccgagccaatgcacggctccctggcaggggtgaagctttcctctcaacaggcc

SEQ ID NO: 5776 - DNA, 3306 bp, synthetic construct
  misc_feature 1..3306: note = source = /note="Description of Artificial Sequence: Synthetic coding sequence"
  source 1..3306: mol_type = other DNA
atgttccagcttccggtgaacaacttgggttctctccgaaaggcgcgcaaaactgtcaagaaaatcctgtccgacatcggccttgaatactgcaaagaacacatcgaggacttcaagcagttcgaaccgaatgacttttacctgaagaacaccacgtgggaagatgtcggactttgggacccttcgctcaccaagaaccaggattaccggactaagcccttctgctgctccgcgtgtcccttcagcagcaagttcttttcggcatacaaatcgcatttccgaaatgtgcattcggaagatttcgagaatcgcatccttctcaactgcccgtactgcaccttcaacgccgacaagaaaaccctcgagactcatatcaaaatctttcatgcgcccaacgcatcggccccgtcctcgtcgctctcaaccttcaaggataagaataagaacgacggactgaaaccgaagcaggcggactcggtggagcaggcagtgtactactgcaaaaagtgcacttaccgtgacccgctctacgagatcgtgaggaagcatatctacagagaacacttccagcatgtggccgcaccgtacatcgccaaggcaggagagaagtcactgaatggcgcagtgccattggggtcgaatgctcgagaagaatccagcatccactgcaaacggtgcctcttcatgcccaagtcctacgaggccctggtccagcatgtgatcgaagatcatgaacgcatcggctaccaggtcactgctatgatcggacatactaacgtcgtggttccgcggtcaaagcccctcatgctcattgcccctaagccgcaagacaaaaagtcgatgggacttccgccccgcatcggaagtctggcttctggcaatgtgcggtccctgccgagccagcagatggtcaataggctctccatcccgaagccgaaccttaactcaacgggtgtgaacatgatgagttcggtgcacctgcagcaaaacaattacggcgtcaagtcagtgggacaagggtacagcgtcgggcaatcgatgcgcctcggactgggcggtaacgcaccggtgagcatcccacaacaatcgcagtccgtgaagcagctccttccctcgggcaacgggcgctcctacggactgggaagcgaacagcggtcgcaggcccctgccagatattcgctgcagagcgctaacgcgtcatcactcagctcgggacaactgaagtcaccaagcctgtcccagtcccaggcctcgcgcgtcctgggccaatccagctctaaaccggcggcagcagccaccggaccaccgcctggaaacaccagctcgacccagaagtggaagatctgcaccatctgcaacgagctgtttccagagaacgtctacagcgtccacttcgagaaggaacacaaagccgagaaggtccctgcggtggcgaattacatcatgaagatccacaacttcacctcaaaatgtctctactgcaaccgctaccttccgactgatactctcctgaaccatatgctcatccacggtctttcgtgtccgtactgtcgcagcacctttaacgatgtggaaaagatggccgcccacatgcggatggtgcatatcgatgaagaaatgggcccaaagactgatagcacgctcagctttgatttgaccctccagcaaggatcacacaccaatatccacctgttggtgactacctacaatctgcgcgacgcgcctgcagaatcggtggcataccacgcgcagaataatccaccggtgcctccgaaaccacagcccaaggtgcaggaaaaggccgatatcccagtgaagagctcgccacaggcagcggtgccttacaagaaggatgtgggaaagactttgtgtcccctgtgcttctcgatccttaaaggtccaatcagcgacgccttggcacaccacctgcgggaacgccaccaagtgattcagactgtgcaccccgtggagaaaaaactgacctacaagtgcattcattgcctgggcgtgtacacctcaaacatgacggccagcaccatcaccctgcatctcgtgcattgcaggggcgtcggaaaaacccagaatggacaggataagactaatgcaccgtcccggttgaatcaatcaccatcgcttgctccagtgaagcggacctacgagcagatggaatttcctctgctgaagaagcggaagctggatgatgatagcgactctcctagcttcttcgaggagaaaccggaagaacccgtcgtgctggccctcgatccaaagggtcatgaagatgactcctacgaagcccgcaagtcctttctgaccaagtatttcaacaagcaaccatacccgacgcgccgggagatcgagaagctggctgccagcctctggttgtggaaatccgatatcgcctcccacttctcaaataagagaaaaaagtgcgtgagggactgcgagaagtacaagcctggtgtccttctcggattcaatatgaaggaactcaataaggtgaagcacgagatggatttcgacgctgagtggctgttcgaaaatcacgatgagaaagactcgcgggtgaacgcctccaagaccgcggacaagaagctcaacctcggaaaagaggacgactcgagctccgacagcttcgaaaacctcgaagaggagtccaacgagtcgggttctcctttcgaccctgtttttgaagtcgaaccgaaaatctcaaacgataatccagaggaacacgtgctcaaggtcatcccggaggacgcatcggaaagcgaggaaaagctggaccaaaaggaggacggctcaaagtacgaaaccatccatctgaccgaagagccgactaagctcatgcataatgcttccgactcagaggtcgaccaagacgacgtggtggagtggaaagatggagcctccccctcggaatctggacctggctcgcagcaggtgtcggatttcgaggacaacacctgtgagatgaagcccggcacctggtcggacgaaagcagccagtcggaagatgcccggagctccaagcccgccgcaaaaaagaaagcgactatgcaaggagatcgagagcaactgaagtggaagaactcgagctacgggaaggtggaagggttttggtctaaagaccagtcgcagtggaagaatgcctcagagaacgacgaacggctgtccaacccgcaaatcgagtggcaaaattcgactatcgatagcgaagatggggaacaattcgacaacatgactgacggagtggccgaaccaatgcatggttccctggcgggagtgaagctgtcgtcccagcaagcc

SEQ ID NO: 5777 - DNA, 3306 bp, synthetic construct
  misc_feature 1..3306: note = source = /note="Description of Artificial Sequence: Synthetic coding sequence"
  source 1..3306: mol_type = other DNA
atgttccaacttccagtgaataacttgggatcgctcaggaaagcccgaaaaaccgtgaagaagattcttagcgatatcggactcgagtactgtaaggagcatatcgaagatttcaaacagtttgaacccaatgatttctatctcaagaatactacttgggaagatgtgggtctttgggatccatcccttaccaaaaaccaggattatcgcactaagcctttttgctgcagcgcatgtccattctcatctaagtttttctcggcctacaagagccattttaggaacgtgcattccgaagatttcgaaaaccgcatcctgctgaattgcccatattgtacctttaacgctgacaaaaagactctggaaacccacattaagatttttcacgccccaaacgcaagcgccccttcaagctcactctccacttttaaggacaagaataagaatgacggattgaagccaaagcaggcagattcggtggaacaagccgtgtactactgcaaaaagtgtacctaccgggatccactgtacgaaatcgtgagaaagcatatctaccgggaacattttcagcatgttgcagccccctacattgcaaaggcaggtgagaagtcgctgaacggtgcagtccctctgggctcgaacgcaagagaggaatccagcatccattgtaagcgctgtttgtttatgccaaagtcctatgaggcacttgtccaacatgtcatcgaagatcatgaaaggataggataccaagtgacggcaatgatagggcataccaacgtggtggtaccccggagcaaaccccttatgctgattgcaccaaagccacaagacaagaaatcgatggggcttcctcccaggattggctcacttgcctcgggtaacgtgcgatcgctgcccagccaacaaatggttaaccgtcttagcatccccaagcctaatcttaattcaaccggagtcaacatgatgtcgtcagtacatcttcaacagaacaattatggggtaaagagcgtcggccaaggctatagtgtcggtcagtcgatgagacttggtcttggtggaaacgcacctgtgtcgatcccccagcagagccaatcggtgaaacagcttctgccttcgggtaatggaagatcttacggacttggttcggagcagcggagccaggctccggcacggtactccctccaatccgccaacgcatcaagcctctcctccggacaacttaaatccccctcgctctctcagtcgcaggcttcgcgtgtgctggggcaatcttcatccaaacctgccgcagcagcaactggtcccccgcccggtaacacgtcaagcactcagaagtggaagatctgcactatttgcaacgaactgtttccagaaaacgtgtactcggtccattttgaaaaggaacataaggcggagaaggtgccagcagtcgctaactacattatgaagatccataacttcacgtccaaatgcctgtactgtaataggtatcttccaactgataccctgctgaatcacatgctgatccacgggctcagctgtccatactgtcggtcgacttttaacgatgtggagaaaatggccgcacatatgagaatggtgcatatcgatgaggaaatgggtccaaagaccgattccaccctttcgtttgatctgactcttcagcaggggtcacatacgaacattcacctgcttgtgactacctacaacttgagggatgctcctgccgaatccgtggcataccatgcacagaacaatcctcccgttccaccgaagccacagccaaaggttcaagagaaggccgacatacccgtcaaatcttccccccaagccgccgtcccatacaagaaagacgtcggtaagaccctttgcccgctttgtttttccattctgaagggacctatttcggacgcactggcacaccaccttcgcgagcggcatcaggtgatacagactgtgcatcccgtcgagaagaaactgacgtacaaatgtattcattgtttgggagtctacactagcaacatgaccgcatcaaccattaccctccacctcgtccattgtcggggagtgggtaaaacccaaaacggacaggacaagactaatgccccttcgcgcttgaaccaatcgcctagcctggcacctgtcaagagaacctatgagcaaatggaatttccactgcttaagaagagaaagctggatgacgactccgactcaccatccttctttgaagaaaagccagaggaacccgtggtgcttgcactggatccgaagggacatgaagatgatagctacgaggcacgcaagagctttctgaccaagtacttcaataagcaaccatacccaactagacgggaaattgagaaacttgcagcatcactgtggctttggaagtcagatatcgcgtcccatttctcaaacaagagaaagaagtgcgtgagagactgtgagaagtacaagcctggcgtcctccttggtttcaatatgaaagaacttaacaaagtgaaacatgagatggatttcgacgccgaatggctgttcgaaaaccacgacgagaaggatagcagagtgaatgcatcgaaaactgctgataagaagctcaaccttggaaaggaagatgattcctcatccgattcgtttgagaatctcgaagaggaatcgaacgaatcgggctccccgttcgatcctgtgtttgaagtggaaccaaagatctccaacgacaatccggaggaacatgtcctcaaagtcattccagaggatgcctcagaaagcgaagagaaacttgaccagaaagaggatggatccaagtacgaaaccattcacctgaccgaggaacctactaaacttatgcataacgcaagcgactcggaagtggaccaggacgatgtggtggagtggaaagatggagcatcgccttccgagtcgggaccgggcagccaacaagtgtccgattttgaagataatacttgcgaaatgaaacctggaacctggtctgatgaatcctcccaaagcgaagatgcccgctcctccaagccggcagccaagaaaaaggccactatgcaaggggaccgagaacaacttaagtggaaaaactcatcctacggtaaggtggaagggttctggtcgaaggatcaatcgcagtggaagaacgcctcggaaaacgatgagcgactgtccaatcctcaaatcgagtggcaaaattcgaccattgactcggaggatggcgaacagttcgataacatgaccgacggggtcgccgaaccaatgcatgggtccctggcaggagtgaaactttcgtcacaacaagct

SEQ ID NO: 5778 - DNA, 3306 bp, synthetic construct
  misc_feature 1..3306: note = source = /note="Description of Artificial Sequence: Synthetic coding sequence"
  source 1..3306: mol_type = other DNA
atgtttcagctgccagtcaacaacttggggtctctaagaaaagcacgaaagaccgtcaagaagatcttgtctgacattggactagagtactgcaaagaacacatagaggacttcaagcagttcgaacctaacgacttttacctcaagaataccacgtgggaggacgtcggtctctgggatccatcgctcacaaagaatcaggactaccgcacaaagccgttctgctgctctgcatgtccattttcatctaagttcttttctgcttataagagccactttcgcaacgtccatagtgaggattttgaaaaccggatcttgctaaattgtccatactgtacctttaatgccgataagaagaccctcgagacacacattaaaattttccacgctcccaatgcctccgcaccatcttcatccctctccaccttcaaagacaagaacaagaatgacggcctgaagccaaaacaggccgactctgtggagcaagccgtgtattactgcaagaaatgtacgtaccgtgacccactgtacgaaattgtacggaaacacatttacagagagcattttcagcacgtggccgctccttacattgccaaagccggagaaaagtcccttaacggtgctgtacccctgggatctaatgcccgcgaggaatcttccatccactgcaagcgttgtctcttcatgccaaaatcatatgaggccctggttcagcatgtgatagaagatcacgaacgtatcggatatcaggtcaccgcgatgattgggcacactaacgtagttgtgccaaggagtaaaccactgatgctgattgctcccaaaccacaggataagaagagcatgggcttaccaccccgcatcggctcactggcatccggcaatgtccggtctcttccctctcagcagatggtaaataggctctccatccctaagccaaacctgaatagtacaggagtgaacatgatgagctctgtacatctgcagcaaaacaactacggggtcaagagtgtgggccaaggttactcagtgggacagagtatgcgcctggggctgggtggaaatgccccggtgagcatcccccaacaaagtcaatcagtgaagcagctcctaccttcaggtaacggtcggtcttatggccttggtagtgaacagaggtctcaggcgcctgcccgatactcccttcagtctgctaacgcctcaagtcttagttctggccaactgaagtccccatcccttagtcagtcccaggctagtcgagtcttgggacagagcagtagcaagccagccgcagccgccaccggaccccccccgggtaatacctcttcaacccagaagtggaagatttgcacaatctgtaatgaattgtttccagaaaatgtatactcggtacactttgagaaagaacacaaagcagagaaagtgccggccgtcgccaactacattatgaaaattcataacttcactagtaagtgtctctactgcaatcggtatctgcccactgatacactcctcaatcatatgcttatccacgggctgtcttgcccatactgtcggtccaccttcaacgacgtggaaaagatggccgctcacatgcgcatggtgcacatcgacgaagagatgggacccaaaacggactccaccctaagctttgacctaactctacagcaggggtcccacactaatatccacctccttgttaccacttataatttgcgtgacgcaccagctgaaagcgtggcctaccacgcgcagaacaatcctccggtgcccccgaagccgcagccaaaagttcaggagaaagctgacatccctgtgaagtcctcccctcaggctgcagtgccctacaaaaaagatgtgggtaagaccttatgtcccctgtgcttttcaatcctaaaggggcctatcagcgatgcacttgcccatcatctgagagagagacatcaagtgattcaaacggtgcaccctgtggagaaaaagctcacttacaagtgcatccactgtctgggagtgtacacatctaatatgacagcgtctaccattaccctccatctggtgcactgccgcggcgtcggaaaaacacagaatggacaggacaaaactaatgctccctcaagactgaaccaaagcccttctttagccccggtaaaacgaacctacgagcagatggagttcccactgctgaaaaagcgcaagctcgatgatgatagtgactcccccagttttttcgaggagaagcccgaggaaccagttgtgctcgctctagacccaaagggtcacgaagatgattcttatgaggctcgtaaaagtttcctgacaaagtacttcaacaagcagccgtacccgacacggcgcgaaattgagaagctcgccgcttcgctgtggctctggaaaagtgatatcgctagccacttttctaataaacgaaagaagtgcgtaagagactgtgaaaagtacaagcctggggtgctcctggggttcaacatgaaagaacttaacaaagtgaaacacgagatggacttcgacgcagaatggttgttcgagaatcatgatgagaaagatagtcgtgtgaatgctagcaagacagctgataagaaactgaacctaggtaaggaagacgattcatcctccgattcattcgagaacctggaggaggagagcaacgagtccggaagcccttttgaccccgtgttcgaagtggagcctaagatatcaaacgacaaccccgaagaacatgtcctcaaggtaatacccgaagatgcttcagaatcagaagagaagttagaccaaaaggaggatggcagcaaatatgagactatccatttaactgaggaacccaccaaactgatgcataatgcttccgactccgaggtagaccaggacgatgtggtcgagtggaaagatggcgcaagtcctagcgaatcgggtccaggaagccaacaggtgtctgacttcgaggacaacacatgcgagatgaagcctgggacttggagtgacgagagcagccagtccgaggatgccaggagtagtaaacccgccgcaaagaagaaagctactatgcagggggatcgggagcagctgaagtggaaaaacagttcttacgggaaagtggaaggcttttggagtaaggatcagagccagtggaaaaatgcaagcgagaacgacgagaggttgtcaaacccacagatcgaatggcagaacagcaccatagatagcgaggacggggagcagtttgataatatgacggacggggtggctgagcctatgcatggatctctggccggcgtcaaattaagttcccagcaggca

SEQ ID NO: 5779 - DNA, 3306 bp, synthetic construct
  misc_feature 1..3306: note = source = /note="Description of Artificial Sequence: Synthetic coding sequence"
  source 1..3306: mol_type = other DNA
atgttccaacttcccgtgaacaacctgggctccctgcggaaagcccggaaaactgtgaagaagatactttctgatatcggcctggagtactgtaaggagcatattgaggactttaaacaattcgaacccaacgatttctatttgaaaaatactacttgggaggatgttggactgtgggatccatcacttacaaagaatcaggactacagaacgaaaccgttctgctgctcggcatgtccgttctcatccaagtttttctccgcctacaagtcccattttcgcaacgtgcacagtgaagactttgagaacaggatcctccttaactgcccatattgcacattcaatgctgataagaagaccctggaaacacacataaagatctttcatgctcccaatgctagtgccccttcttctagcctctcaacattcaaggataagaataaaaatgacggactgaaaccaaaacaggctgactccgtggagcaagcagtgtactactgtaaaaaatgcacctatagagatccattgtacgaaatcgtgagaaaacatatttatcgggagcacttccagcatgtggcagccccctacatcgctaaggccggcgagaagtctctcaacggggcagttcctctgggctccaatgcccgcgaagaaagctccattcattgtaagcggtgcctattcatgcctaaaagttatgaggctctggtgcagcacgtgatagaggatcacgaacgaatagggtaccaagttactgctatgataggacacactaatgtggtcgttccacgcagcaagcctctcatgttgatcgctccaaaaccccaggacaaaaaaagcatgggcctccccccaaggatcgggtccctggcttccgggaacgtacgttctctgccctcccagcagatggtaaatcggctgtctatccccaaaccaaacttaaacagtacgggcgtgaatatgatgagttcagttcatcttcagcagaacaactacggcgttaagtcggtcggccaaggatattccgtgggccagagcatgcggcttggcctcggcggcaatgcaccagtttccattcctcaacagtctcaatctgttaaacagttactgccctccggcaacggaaggtcctacggactgggcagtgaacagaggtcacaggctcccgccaggtattccctgcaaagcgctaacgcttccagcttatcatcaggtcagctgaaatctccctccctctctcaatcccaggcgtcccgcgtgctcggacagagctcttccaagcctgctgcagccgccaccggtcctcccccggggaatactagttcaactcagaagtggaaaatctgtacgatatgcaatgaactttttcccgaaaacgtctactcagtgcactttgagaaagagcataaagctgaaaaggtgccggctgttgcaaattacatcatgaagattcacaactttacctctaagtgcctttattgtaataggtaccttccaacagatacgttgctgaatcacatgctgatccacgggctctcttgcccttactgtagatctacattcaacgacgtggagaagatggctgctcacatgcggatggtgcacatcgatgaggaaatgggacccaaaaccgattcgacattatcattcgatcttaccctacagcagggtagccacaccaacattcacctgttggtaacgacgtataacctgcgcgacgctccagccgaaagcgtggcttaccacgctcagaataacccgccagtaccacccaagccccaaccaaaagtccaggagaaagcagatatccctgtgaagtccagccctcaagccgcagttccctataaaaaagatgtggggaaaaccctgtgcccactgtgttttagtattctcaagggccctatctccgatgccctggcacaccatctccgggagaggcatcaagtcatccaaaccgtgcatccagttgagaagaagttgacgtataaatgcatccactgtttgggagtatatacatccaatatgacagcaagtacaattaccctccatttagttcactgtcggggtgttggaaaaacgcagaacgggcaggataagacgaacgctccgtctcgcctgaatcagtctccaagtctagcgcccgtgaagcggacttatgaacagatggagtttcctctcctgaagaagcgaaagctcgacgatgacagcgacagcccctccttttttgaagagaagcccgaggaaccagtagttctggcactcgaccccaagggtcacgaggacgatagctacgaagccagaaagtctttcttaaccaagtactttaacaaacagccataccccaccagaagggagattgagaagctggccgcgtctctgtggctttggaagagcgacatcgcttcccatttttcgaacaagcggaaaaaatgtgtccgcgactgtgagaagtacaagcccggcgtgctgctcggcttcaatatgaaagagctgaataaagttaaacacgaaatggacttcgacgcagaatggttgttcgaaaatcatgatgagaaagactcgagagttaatgccagtaagacagcagacaagaaactaaacctaggtaaggaagacgacagtagtagtgactcatttgagaacctcgaagaggagagcaacgaaagtggtagcccctttgacccagtattcgaagtcgaaccaaaaatctccaatgataaccctgaagagcacgtcttgaaggtcatccctgaggacgcttcggagtccgaagagaaactcgaccagaaggaggatggaagcaagtacgaaactatccatctcacagaggaacctaccaaactcatgcacaatgccagcgactccgaggtggaccaggacgacgtggtcgaatggaaggacggggcctccccatccgagagtggacctgggagtcagcaagtctccgacttcgaggacaatacctgcgagatgaaacccggcacttggagcgatgaatcttctcagtccgaagacgcaaggtcaagcaagcctgctgcgaaaaagaaggctaccatgcagggtgaccgggaacagctgaaatggaagaactcatcttatggaaaggtcgaggggttttggtccaaggatcagtcgcaatggaagaatgccagcgagaatgacgaacgtctgtcaaatcctcaaatagaatggcagaacagtaccatcgattcggaagatggggagcaattcgataacatgactgacggagtagcagaaccgatgcacggatcactagccggtgtaaagctttcctcccagcaggca

SEQ ID NO: 5780 - DNA, 3306 bp, synthetic construct
  misc_feature 1..3306: note = source = /note="Description of Artificial Sequence: Synthetic coding sequence"
  source 1..3306: mol_type = other DNA
atgttccaattgcccgtgaacaatctgggcagtttgcgcaaggctcggaagaccgtgaaaaagattctctctgatataggactggagtactgtaaggagcatatcgaagattttaagcaatttgagcccaatgatttttacctgaagaacacaacgtgggaggacgttgggctgtgggacccgtccttgacaaaaaatcaggactacaggactaagcccttctgctgcagtgcatgtcctttcagttctaaatttttcagtgcttataaatcacactttagaaacgtccacagtgaggatttcgaaaacagaattctgttgaactgtccctattgtacgttcaacgccgataaaaagaccttggagacacatattaaaatctttcacgcgcctaacgcaagcgccccttcaagtagcctctccaccttcaaagataaaaataagaacgatggcttgaagccaaaacaggcggattccgtggagcaagccgtgtactattgtaagaagtgcacctacagggatcccctctatgagatcgtgaggaaacacatttacagagaacattttcaacacgtggccgcaccttatatcgccaaagccggtgagaagagcttgaacggcgccgtccctctgggctctaacgcccgggaggagagcagcatacactgcaaaaggtgcttgtttatgccaaaaagttacgaagcgctggtgcagcacgtcatagaggaccatgagcggataggatatcaggtgactgccatgatcggacacactaatgtcgtggttcccaggtctaagccactcatgcttatcgctccgaaaccacaggataaaaaatcaatgggtctcccccctcgaatcgggagtctggcttccggcaatgttaggtcactgccctcacagcagatggtaaatcggttgtccatccccaaaccaaacctgaacagtacaggggtcaacatgatgagctcagtgcatcttcagcaaaacaattacggcgtgaagagtgttggccaaggatactccgttgggcagtccatgcgcctcggcctcggcgggaacgccccagtttccatcccacagcagtcccaatctgtgaaacagctgcttccttccggcaatggtagatcatacggccttgggtccgagcagaggtcccaggcccccgcacggtatagtctgcaaagcgccaatgccagcagcttgtcttcaggccagcttaagagcccttccctgagccaatcccaggccagccgagtcctcgggcagtcctcttcaaagccggccgccgcagcgactggccccccccctggaaatacctctagcactcagaagtggaagatctgcaccatctgtaacgaactctttcctgagaacgtttacagtgtacatttcgaaaaggagcacaaagctgaaaaagttccggccgtagccaactacattatgaaaattcacaattttacaagtaaatgcctctattgcaaccgctacctccccaccgatacactccttaatcacatgctgattcacggactgagctgcccctactgtcgatctacattcaacgatgtcgaaaagatggccgcgcacatgagaatggtgcacatcgatgaagagatgggtcctaaaaccgactctaccctgtcctttgatctgaccctgcagcaggggagccacacgaacatccatctcctggtgacgacgtacaatcttagagacgccccagcagaaagcgtagcctatcatgcccaaaataacccccccgtcccaccgaaaccacagccaaaagtgcaggagaaagcggatataccagtgaagtccagcccacaggccgcagttccttataaaaaggatgttggaaagacgctctgtcccctgtgcttctccatcctgaagggccccatcagtgacgcccttgcgcatcacctgagggagagacaccaggttatccaaaccgtgcatccggtggagaaaaaattgacctacaaatgcattcactgtctgggcgtttacacaagcaatatgactgcaagcaccattaccttgcatcttgtgcactgcagaggtgttggaaagacccagaacggtcaggataaaactaacgcccccagccggctgaaccagtcaccctcactggctcctgtaaagcgcacctatgagcagatggagtttccgttgctgaagaagcgaaaattggatgacgattccgactcaccttccttctttgaggagaagcccgaagaaccggtagtgctcgctctggacccaaaagggcacgaggacgacagttacgaggcccgaaaaagttttctgactaagtatttcaataagcagccgtatccgacacggcgcgagatcgaaaagctggcagccagtctgtggctttggaaatccgacattgcctcccactttagtaacaaacggaagaagtgtgtgcgagactgcgagaaatacaaacctggggtgctcctcggattcaacatgaaggagctcaacaaggtgaagcacgagatggactttgacgccgaatggctgtttgagaaccacgacgagaaagacagccgggtgaacgcgtctaagaccgcggataagaaactgaacctggggaaagaggacgactcaagcagtgacagttttgagaatctggaggaggaaagtaatgaatcaggatcccccttcgacccagtgtttgaggtggaaccaaaaatttcaaacgacaaccctgaggagcacgtgctgaaagtgatcccagaggatgcctctgaaagcgaggaaaagttggaccagaaagaagacgggtccaagtacgaaactattcacctgacagaggaaccaacgaaactcatgcataatgcttccgactctgaggtggatcaggatgacgtggtggagtggaaagacggcgcaagccccagcgagtccggcccgggcagtcagcaggtctccgacttcgaggataatacttgcgaaatgaaaccgggcacttggtccgatgagtcttctcaatcagaggacgccagatcctcaaaaccagccgctaaaaaaaaggccacaatgcagggtgatagagagcaattgaagtggaagaacagcagttatggaaaagtggagggtttttggtccaaggaccagtcccagtggaagaatgcatccgagaacgatgaacgcctctccaacccccagattgagtggcagaactccacaatagatagtgaggatggtgaacagtttgacaatatgaccgacggcgtcgccgaaccaatgcacgggtccctggctggtgtaaaactctctagccagcaggct

SEQ ID NO: 5781 - DNA, 1092 bp, synthetic construct
  misc_feature 1..1092: note = source = /note="Description of Artificial Sequence: Synthetic coding sequence"
  source 1..1092: mol_type = other DNA
atgccttatcagtaccccgcattgacaccggaacagaaaaaagagttgagtgatattgcccaccgcatagtggcacccggcaagggaattctcgccgcagacgaaagtactggcagcattgccaaaagattgcagagcattggaaccgagaacaccgaggagaatcgacggttttacagacagcttctccttaccgccgacgacagagtgaatccatgtattggcggggtgatcctcttccatgaaactttgtatcagaaagccgatgatgggcgaccattcccacaggtgattaaatctaagggaggggttgtcggaatcaaggtggataagggggtggtgccattagctggtacaaatggagagacaaccactcagggattggacgggctaagcgagcgttgtgcccaatataaaaaggacggcgccgatttcgcaaaatggagatgtgttctcaagattggagagcacaccccatcggccctggcgatcatggaaaatgccaacgtgctggcacggtacgcctcaatttgccaacagaacggtattgtccccatcgtggaaccagagatcttgccagacggggaccatgacctcaaaaggtgccagtacgtcactgagaaggtgctggccgcagtgtacaaagccttgagtgaccaccatatttacctcgaggggacgcttctgaagcccaacatggtgactcccggacacgcctgtacacaaaagttctctcacgaagagatcgctatggcaactgtaacggccctcagacgcacagtccctcctgctgtaactggtataacgtttctaagcggcggccagagcgaagaagaggcttctattaacttgaacgcaattaataaatgtccacttttgaagccctgggccctcaccttctcctatgggagggcgcttcaggcttctgcactgaaggcctggggcggtaagaaggagaacctgaaggccgcccaagaagaatatgtcaagagagcactggcaaattctctcgcgtgtcagggcaagtatactccctctgggcaagccggagccgctgcgtctgagtctctgtttgtgagcaatcacgcttat

SEQ ID NO: 5782 - DNA, 1092 bp, synthetic construct
  misc_feature 1..1092: note = source = /note="Description of Artificial Sequence: Synthetic coding sequence"
  source 1..1092: mol_type = other DNA
atgccttaccagtaccctgcccttacaccggagcagaaaaaggagttgtccgatatcgcccaccgaatcgtcgctcccggcaaaggcatccttgccgccgatgagtccacaggatcgatagcgaagcgtctccagtcgatcggcaccgagaacaccgaagagaataggcggttctatcgtcagctcctgctcaccgcagatgaccgcgtcaacccttgtattggaggcgtcatcctatttcatgaaacgttgtaccaaaaggccgatgacggtcgtccattccctcaggtgataaaatccaaggggggagttgttggtatcaaggtcgataagggggtggtcccgctggccggtaccaacggtgagacgaccacccaggggctggacggcctgtccgagcggtgtgctcagtacaagaaggatggggcggacttcgcgaagtggcggtgtgttctcaagatcggagagcatactccttccgcgttggcgatcatggagaatgccaatgttctcgctcgctatgcctccatatgtcagcaaaatggcattgtgcccattgtggagccagaaattctgcctgacggtgatcatgaccttaaaaggtgtcagtacgtaaccgaaaaagttttggctgcagtttataaggcactatctgaccatcacatttacctagaggggacactactgaagcctaacatggtgactcctggccacgcatgtacacaaaaattctcccatgaggagatcgctatggccacagtgacggccttgcgccgtaccgtcccgcctgctgtgactggcatcaccttcctgtccggtggccagagtgaggaagaagccagtatcaacctcaatgccattaataaatgcccactgttgaaaccatgggcgcttactttttcctacggacgcgccctccaagcgtctgcgcttaaagcatggggcgggaagaaggaaaatctaaaagctgcccaagaagaatatgttaagcgggctctagcaaacagtttggcatgtcaagggaagtacactccgagcggtcaggcaggcgcggccgcctcggagtcgttgtttgtctcaaatcacgcatat

SEQ ID NO: 5783 - DNA, 1092 bp, synthetic construct
  misc_feature 1..1092: note = source = /note="Description of Artificial Sequence: Synthetic coding sequence"
  source 1..1092: mol_type = other DNA
atgccgtatcaatatccagcgctgactccagagcaaaagaaagagctctcggatatcgcccaccggatcgtggcccctggaaagggaatcctcgctgctgatgagtccacgggatccatcgccaaacggctccagtccattggaactgaaaacacggaggagaatcgccggttctaccgccaactgctgctgaccgcggatgatcgggtcaatccttgcatcgggggagtgatcctgttccatgaaaccctctaccaaaaggcagatgacggtagaccgttcccgcaagtgatcaagagcaaggggggagtggtcggcatcaaggtcgataaaggagtggtcccgttggcaggcaccaacggggaaaccactactcaagggctcgatggactgtcggagcgctgtgcccaatacaagaaggacggggctgactttgctaagtggcggtgtgtgctgaagatcggcgaacacaccccctccgctctggcaatcatggaaaatgccaatgtgctggcccgctatgcttcgatctgccagcagaacggaatcgtgccaattgtcgaaccggaaatcctcccagacggggatcatgacctgaagagatgccagtacgtcaccgagaaggtccttgcggccgtctacaaagctctgtcggaccatcatatctaccttgagggcacccttttgaagccaaacatggtgacccccggccacgcgtgcacccagaagttctcacatgaagaaatcgctatggccaccgtcactgcactgcgccggactgtcccgccagcggtgactggaatcaccttcctgtccggcggccaatcggaggaagaagccagcataaatctgaatgctatcaacaagtgtccgctgctgaagccctgggcactgacttttagctacggacgggccctgcaggccagtgccctgaaagcgtggggtgggaaaaaggagaacttgaaggctgctcaggaggagtacgtgaagcgcgccttggccaactcccttgcatgtcagggaaagtacaccccgagcgggcaggccggagccgcggcaagcgaatcactgtttgtgagcaaccacgcatac

SEQ ID NO: 5784 - DNA, 1092 bp, synthetic construct
  misc_feature 1..1092: note = source = /note="Description of Artificial Sequence: Synthetic coding sequence"
  source 1..1092: mol_type = other DNA
atgccctaccaataccccgctcttaccccagagcagaagaaggaactcagtgatatcgcccatcggattgtcgccccaggtaaagggatccttgccgctgacgagtccactgggtccatcgctaagaggttgcagagcattgggacagagaataccgaggagaaccggcggttttacagacagctcctgctaaccgctgatgacagagtgaacccgtgcattggaggggtcatcctgttccacgaaactctgtatcagaaggccgacgacggcaggccctttcctcaggtcataaaaagcaagggtggggtcgttggcatcaaggtggataaaggagtagttcccttagccgggacgaacggtgaaacaaccactcagggactggacgggctgtcagaacgctgcgcgcagtacaaaaaagatggagctgactttgctaagtggagatgcgtgctaaaaatcggtgagcacaccccaagtgctttggccataatggagaacgccaatgtactggctcgatatgcatccatttgccagcaaaacggcatcgtgcctatcgtggaacctgagattctgcctgacggggaccatgaccttaaaagatgtcaatacgtgactgaaaaggtgctggcggcagtctacaaggccttgtctgatcaccatatctatctggagggcaccctcctcaaacccaacatggtgactccaggccacgcgtgtacacagaaattctctcatgaagagattgccatggcaacagtcactgccctgcggcggactgtgccgcctgcggtgaccgggataacctttctctctggcgggcaatcagaagaggaagcaagcatcaatctgaatgcaatcaacaaatgtccactgcttaagccctgggctctaacgtttagctatggtcgagccctccaggcaagtgcactcaaagcgtggggtgggaagaaggaaaatctgaaggccgcacaggaagaatatgtgaagagggcgctagccaacagcctcgcctgccaaggaaagtacactccaagtggccaggccggcgccgccgcatcagaaagcctattcgtgtctaaccacgcatac

SEQ ID NO: 5785 - DNA, 1092 bp, synthetic construct
  misc_feature 1..1092: note = source = /note="Description of Artificial Sequence: Synthetic coding sequence"
  source 1..1092: mol_type = other DNA
atgccttatcagtaccccgctctcactccagagcagaaaaaagagctttccgacatcgcacaccgcattgtggctccaggcaaaggcatcctggcagccgacgagagcacggggtcaatcgcgaagaggttacaaagtattggtacagagaataccgaggaaaacagacgcttttacagacagctgttactcaccgccgacgaccgcgttaacccatgcatcggaggcgtgatcttgttccacgaaactctgtaccagaaggccgacgacggacgacccttcccccaagtcattaaatccaaaggcggagtggttggtataaaggttgacaagggggtcgttccactggctggcaccaatggcgagacaaccactcagggtctcgatgggcttagcgagagatgcgctcagtataagaaggatggcgctgatttcgccaaatggcggtgcgtgctaaagatcggggaacacacaccttcagcactcgccatcatggagaacgctaacgtgctagcccgttacgcctccatctgtcaacagaacggaattgtccctattgtagaaccagagattctgcctgatggcgaccacgatctgaagagatgccagtacgtcacggaaaaagtgttggcagccgtgtacaaggcgctctccgaccaccacatataccttgaagggacgctgctgaaaccaaacatggtgacccccggccatgcctgtacacagaaattctctcacgaggaaattgccatggctacagtgacagccctcaggagaactgtaccacctgcagtaacaggcatcacatttctttctggcggccaatctgaagaggaggcctccataaacctcaacgccatcaacaagtgccccctgcttaaaccatgggccctaacattcagctacggacgggccttgcaagcgtcggccttaaaggcctgggggggcaaaaaagagaatctgaaagccgcgcaggaggagtatgtgaaaagggccctggctaactccctagcctgccagggaaaatacacgccttctggtcaggccggcgcggctgcctccgaaagtctgtttgtttccaaccacgcctac

SEQ ID NO: 5786 - DNA, 1092 bp, synthetic construct
  misc_feature 1..1092: note = source = /note="Description of Artificial Sequence: Synthetic coding sequence"
  source 1..1092: mol_type = other DNA
atgccttaccagtaccccgccctgacaccggagcagaagaaggaactgagcgatattgcccaccggattgttgccccgggcaaggggatattagctgccgacgagtctacagggagcattgcaaagaggctgcaaagtatcggtacagaaaataccgaggaaaatcgcaggttttaccgacagctgctgcttactgcagatgatcgtgttaacccatgtattggaggggtgattctgttccacgagacgctataccagaaggcggacgatgggaggccattcccccaggtcatcaagtcaaaaggaggtgtggtagggatcaaggtagataagggtgtggttcctctggctggaaccaacggggagaccactactcaagggttggacggcctgagcgagagatgcgcacagtataaaaaggatggagcagactttgccaaatggaggtgcgtgctgaagattggagagcacactccgtccgcattggccatcatggaaaacgcgaatgtcttagccagatacgcctccatctgtcagcagaatggtatcgtgccaatagtggagccagagatcttgccagacggcgatcatgatttaaagcgctgtcagtacgttacagagaaggtgctggcagctgtgtataaggccctctcagatcaccacatttatctggaggggaccctactgaaacccaatatggtcactcccgggcacgcatgcactcagaaattcagtcacgaggaaattgctatggcgacagtgaccgctctcagacgcaccgtgccacccgcagtgactggcatcaccttcttgtccggcggacagagtgaagaagaggcttccattaatctgaatgccattaataagtgcccactgctgaaaccctgggcgctcactttcagctatgggagggcgctgcaggcatctgcactcaaggcatggggaggaaagaaggaaaacctgaaggccgcccaagaggagtatgtgaagcgagccctggccaatagcctcgcctgccaaggcaagtatactcctagtgggcaagctggggctgctgcatccgagtccctgtttgtgtctaatcatgcttac

SEQ ID NO: 5787 - DNA, 1092 bp, synthetic construct
  misc_feature 1..1092: note = source = /note="Description of Artificial Sequence: Synthetic coding sequence"
  source 1..1092: mol_type = other DNA
atgccgtatcaatatcctgccctcactccagaacagaagaaagagctgtctgacattgctcatcggatcgttgctccaggcaagggtatcctcgccgctgatgaaagcacagggagtatcgcaaagcgattgcagagcatcggtactgagaacaccgaagaaaatagacgattctaccgacagctgctgctgaccgccgatgatcgagtaaatccttgcatagggggggtcatattgttccatgagacactgtatcagaaggccgacgacgggagacccttcccacaagtcataaaatcaaaaggaggtgtcgtggggattaaggtggataagggggttgttcctctggccgggaccaacggtgagactaccacccaagggctggacgggctgagcgagagatgcgcacagtacaagaaagacggcgcagactttgcgaagtggcgatgtgtactgaagatcggcgaacacaccccaagcgccctggcaatcatggagaacgcaaatgtgcttgctcgctacgctagtatatgccagcaaaacggtatcgtcccgattgtggagcctgagatactgccagacggagaccacgacctgaagagatgtcaatacgtgaccgagaaagtgctcgccgctgtgtataaggcactgtctgatcaccatatctatctcgaagggaccttgcttaaaccaaatatggtgactccagggcatgcttgtacgcagaaattttcacacgaggaaatcgctatggccacagtcaccgccctgcggaggaccgtgcctcctgccgtgacaggaataacattcctgtcaggggggcagtccgaggaggaggcaagcataaatctgaatgcaataaacaagtgccctttgctgaaaccatgggccctgaccttctcttacggacgcgctctgcaagcctcagccttgaaggcctggggtgggaaaaaagagaacctgaaggcagcccaggaggagtacgtgaaaagagcactggccaactctttggcgtgccaaggaaaatacacgcctagcggccaggcaggcgccgccgcttccgagtctctctttgtgagtaaccatgcctat

SEQ ID NO: 5788 - DNA, 1092 bp, synthetic construct
  misc_feature 1..1092: note = source = /note="Description of Artificial Sequence: Synthetic coding sequence"
  source 1..1092: mol_type = other DNA
atgccctaccagtatccagcattgactcctgaacaaaagaaagagctctccgacatagcacacagaattgtggcgccaggtaagggtattctggccgccgatgagtccaccggctcgatagcaaaacggctgcaatcgatcggcaccgaaaataccgaagaaaaccggagattctaccgtcaactgcttcttaccgctgatgatagggtgaatccatgtatcggtggagtcattctcttccatgaaaccctctaccaaaaggccgatgatggtcgcccatttcctcaagtgattaagtcaaaggggggtgtggtcgggatcaaagtggacaagggtgtggttccgctggcaggtaccaacggagaaactaccacccagggcctcgatggtctgtcggagaggtgcgcgcagtacaagaaagatggcgcggactttgcaaaatggcggtgtgtgttgaaaattggggaacatactccttctgcacttgcaataatggagaatgcgaacgtcctcgctcgttacgcctccatttgccagcagaatggtattgtgcctatcgtggaaccggaaattcttcccgacggtgaccatgatcttaagagatgccaatacgtgactgagaaggtcctggcggcagtctacaaggcgctttcggatcaccatatctacctcgaggggactcttctgaagcctaacatggtgacccccgggcatgcgtgtacccaaaagtttagccatgaagagatagctatggcaacggtgactgcacttcgtaggactgtgccgccagctgtcaccggtataacctttctgagcggcggacaatccgaagaagaagcctcaatcaatctgaatgcaatcaataagtgtccccttctgaagccctgggccctgacgttttcctacgggcgcgcactgcaagcgtcagcactcaaggcatggggaggaaaaaaggaaaacctcaaggcagcgcaggaagaatacgtcaagcgggcattggcaaactcactcgcctgtcaaggcaagtacacccccagcggacaggcaggagcggcggcatcggaatcactgttcgtgagcaatcacgcttac

SEQ ID NO: 5789 - DNA, 1092 bp, synthetic construct
  misc_feature 1..1092: note = source = /note="Description of Artificial Sequence: Synthetic coding sequence"
  source 1..1092: mol_type = other DNA
atgccctaccagtacccagccctgactcctgaacagaaaaaggaactctccgatattgcccataggatagtggccccaggcaagggcatcttagctgcagatgagtctactggctccatcgctaaaaggctgcagagcatcgggaccgagaacactgaagagaatagacggttttatcggcagttactgttaacagcggatgaccgtgttaatccctgtatcggtggagtgatactttttcatgaaacactgtatcaaaaagccgatgatggccgtcctttcccgcaggtgataaaatctaaaggcggcgtggtgggcattaaagtcgacaaaggggtcgtgcccctggccggcaccaacggagagactactacccagggactagatggtctgtcagagcggtgcgcccagtataaaaaggatggagcagacttcgctaagtggcgatgtgtactgaaaattggagaacacacaccaagtgcccttgccatcatggagaacgccaatgtgctggcccgctacgcttccatttgtcagcagaacggcatcgtcccgattgttgaacccgagatactgcctgacggggatcatgacttgaaaaggtgccaatacgtaacagagaaagtgctggccgctgtctacaaagctctttcagaccaccatatatacttggaagggaccctgctgaagccgaacatggtgactcctgggcatgcatgcacacaaaaattttcccatgaagagattgcaatggccacagttacggccctgaggcggactgtcccccccgctgtaaccggaattaccttcctgagtggcgggcaatccgaggaggaagcttccattaaccttaatgccatcaataagtgccccctactaaaaccatgggcacttacatttagctatggaagggcattgcaggcgagcgctctcaaagcatggggcggaaagaaggaaaacctgaaggctgcccaggaagagtatgtgaaaagggccttggccaacagcctggcttgccaaggaaagtacacaccctccggccaggccggtgccgctgcctcagagagtctgttcgtgagtaaccacgcatac

SEQ ID NO: 5790 - DNA, 1092 bp, synthetic construct
  misc_feature 1..1092: note = source = /note="Description of Artificial Sequence: Synthetic coding sequence"
  source 1..1092: mol_type = other DNA
atgccgtaccagtaccccgctttaacacccgaacagaaaaaggaactctcagacatcgcacatcggattgtggcgcccggtaaggggatcctggctgccgacgagtccacaggcagcatcgctaaaagattgcaatctataggcactgagaataccgaagagaatcggaggttctaccgccagctcctcctgacagccgacgatcgtgtgaacccttgcattgggggcgttatcctgtttcacgaaactctttaccagaaagccgatgacggacgtccattcccacaggtaatcaagtcaaaaggcggagtcgttgggattaaagtcgacaaaggcgtagtaccactggctggtacgaatggtgagactacaactcaggggctggacggattgtccgagaggtgcgctcaatataagaaggacggcgccgacttcgcgaagtggcggtgtgtattgaagataggcgaacatacaccaagcgcactcgctatcatggagaacgcaaatgtgcttgcacggtacgcaagcatttgccagcagaacggcatcgtgcccattgtggagccagagatccttcccgacggagaccacgatctgaaaagatgtcagtatgttaccgagaaggttcttgcagcagtgtacaaagcactctccgaccaccatatctaccttgaggggaccctcctgaaaccaaacatggttacccctgggcacgcttgcactcagaaattttcacacgaggagatcgcgatggcgacagtgacggcactgcgccggactgttccgccagctgtgacaggaatcacctttttatccggcggtcaaagtgaggaggaggcgtccattaatctcaatgccattaataaatgtcccctgcttaaaccgtgggctctgacctttagctacgggcgcgcgctgcaggctagtgcccttaaggcctgggggggtaagaaagagaatctaaaggcagctcaagaggagtatgtaaagcgtgcgttggccaactccttggcttgtcagggcaaatacaccccgtctggtcaagcgggagccgcagccagcgagagcctcttcgtgtcgaaccacgcctac

SEQ ID NO: 5791 - DNA, 1092 bp, synthetic construct
  misc_feature 1..1092: note = source = /note="Description of Artificial Sequence: Synthetic coding sequence"
  source 1..1092: mol_type = other DNA
atgccgtaccagtaccctgcactgactccggagcagaaaaaggaactgtccgacatagctcaccggatcgttgctccaggaaagggaatcctcgccgccgacgaatccactggcagcatcgccaaacgccttcagagtatcggaaccgagaacaccgaggaaaataggcgcttctatcgccagctgctgctcaccgcggacgatcgcgtcaacccttgcatcggcggtgtgatcctgtttcacgaaaccctttaccaaaaagctgacgatggccggccgttccctcaggtcatcaagtcgaagggtggcgtcgtgggaattaaggtggacaagggagtcgtcccactggctgggactaacggagaaaccactacccaaggactggacggcctgtcggaaaggtgcgcacaatacaagaaagatggcgccgattttgcaaagtggcggtgcgtgctgaagatcggagaacataccccgtcggccctcgcgatcatggagaacgcgaatgtgctcgcaagatacgcctcgatctgtcaacaaaatggtatcgtcccaattgtggaaccggaaatcctccctgatggcgatcacgacctgaagcggtgccagtacgtgacggaaaaagtgcttgccgcggtttacaaggccctgtccgaccaccatatctacttggaaggaaccctgctcaagccgaacatggtcaccccggggcacgcttgcacccagaaattctcccatgaggagatcgcgatggccactgtgacggcactccgaagaactgtgccacccgccgtgactgggatcaccttcctgtcaggaggacagtcagaagaggaggcctcaattaatttgaacgcaattaataagtgtccattgcttaagccctgggctctgactttcagctacgggagagcgctccaggctagcgccctcaaagcctggggagggaagaaggagaacctgaaagccgcacaggaggagtatgtgaagcgcgccctggcgaactcattggcctgccagggaaagtacactccgtcgggacaagcgggtgcagcggccagcgaatccctgttcgtgtctaaccatgcatac

SEQ ID NO: 5792 - DNA, 1092 bp, synthetic construct
  misc_feature 1..1092: note = source = /note="Description of Artificial Sequence: Synthetic coding sequence"
  source 1..1092: mol_type = other DNA
atgccgtaccagtacccggccctgacccccgaacagaagaaggagctctcggatattgcgcacagaatcgtcgccccaggaaagggaatcctggcagccgacgagtcgacgggtagcatcgccaagcggctgcagagcatcggaactgaaaacacggaagagaacagacggttctaccgccaactcttgctcaccgccgacgatcgggtgaacccatgcataggtggagtgatcctgttccatgagactctttatcagaaggccgatgatggccgcccgtttcctcaggtcatcaaatcgaaggggggagtcgttggaatcaaggtggataagggagtggtgcccttggcaggaaccaacggcgaaaccactacccagggcctcgatggtctgtcagagagatgcgctcaatacaaaaaggacggcgcggacttcgcaaagtggcgctgcgtcttgaaaatcggggaacacactcctagcgcgctggctatcatggaaaatgccaacgtgctggcgcggtatgcctcgatctgccagcagaacggcatagtgcctatcgtggagcccgaaatcctcccggacggcgaccacgaccttaagcggtgccagtacgtgaccgagaaggtgctggcggcggtctacaaggccctttccgaccatcatatctacctggagggcactctgctgaagccgaatatggtgaccccgggtcatgcctgcacgcaaaagttcagccacgaagagatcgccatggctactgtgactgccctgcgccgcactgttccgccagccgtgactggcatcactttcctctcgggcgggcaatcagaagaggaggcgtcgatcaacctcaatgcgatcaacaaatgcccgctgttgaaaccttgggcactgaccttttcgtacggacgggcgctgcaggccagcgctctcaaggcctggggcgggaagaaagagaatctgaaggccgcgcaagaagaatacgtcaaacgcgcactggcaaactccctggcttgccagggcaagtacactccctcgggccaggcgggagcagcggcctcagagtcgctgtttgtttcgaatcatgcatac

SEQ ID NO: 5793 - DNA, 1092 bp, synthetic construct
  misc_feature 1..1092: note = source = /note="Description of Artificial Sequence: Synthetic coding sequence"
  source 1..1092: mol_type = other DNA
atgccgtatcaatacccggcactgactcctgaacagaagaaggaactgtcggacatcgcccatcgcattgtggcaccgggcaagggaatcctcgcggcagacgaaagcaccggctccatcgccaagcggctccagtccatcggaactgagaacactgaagagaacagacgtttttaccgccagctcctgttgactgccgacgacagagtgaatccttgtatcggaggagtgatcctctttcatgagactctgtaccagaaggcggacgatggcaggcccttcccgcaagtcattaagagcaaggggggtgttgtgggaatcaaagtggataaaggagtggtgccgctggcgggtaccaacggagaaactactacccagggcctggatggactgagcgaacgctgcgctcaatacaaaaaggatggagccgacttcgcgaaatggcgctgtgttctcaaaatcggggaacatacgccttcggctctggccatcatggaaaatgccaatgtgcttgctagatacgcatcaatctgccaacagaacggtatcgtgccgatcgtggaaccagagatcctgccagatggagatcatgacctcaagaggtgccagtacgtcaccgagaaggtgctggctgccgtgtacaaagcgttgtccgaccatcacatttacctcgaaggaaccctgctgaaaccaaacatggtcaccccgggacacgcatgcacccaaaagttcagccatgaagagatcgcaatggccactgtgaccgcgttgagacgcaccgtgcctccggccgtgactggaattaccttcctcagcggagggcagtccgaggaagaagcctccatcaatctcaatgcgattaacaaatgtccgctgttgaagccttgggccttgactttctcgtacggacgggcgctgcaggccagcgcactgaaggcttggggaggaaagaaagagaacctgaaggcggcacaggaggagtacgtgaaacgggccctcgctaactccctggcctgtcagggaaagtacactccttcaggccaagcaggcgcggcagcctccgagagcctgttcgtttccaaccacgcttac

SEQ ID NO: 5794 - DNA, 1092 bp, synthetic construct
  misc_feature 1..1092: note = source = /note="Description of Artificial Sequence: Synthetic coding sequence"
  source 1..1092: mol_type = other DNA
atgccataccaataccccgcactgacgcctgagcaaaagaaggaactttccgatattgcacaccgcatcgtggcaccaggaaagggcatcctggcagccgacgaatcgacgggctcaatagccaagcgacttcagagcattggaaccgagaacaccgaagaaaaccgaaggttctaccgccaactgctcttgactgccgacgatcgggttaatccttgtataggtggagtgatactctttcacgaaacgctgtaccaaaaggcggatgatggccgcccgttcccccaagtgattaagagcaagggcggtgtggtgggaataaaggtggataagggcgtcgtcccactggcgggtactaatggtgagactaccacccagggactggatggtcttagcgagagatgtgcccaatacaaaaaggatggcgcagacttcgccaaatggaggtgtgtgctcaagattggtgaacataccccttcggctctggcgattatggaaaacgcaaacgtccttgcaagatacgcaagcatttgtcaacaaaacggcatcgtccctattgtcgagccagagattcttcctgatggcgatcatgatttgaagagatgccagtacgtgactgagaaagtgctcgcagcggtgtacaaggcactctcggatcatcatatctacttggaaggaactctgctgaaacccaacatggtgacccctggtcatgcatgtactcagaagttttcgcatgaggagattgctatggccactgtcactgcactgaggagaaccgtccctcctgcggtgaccggcattacttttctttcgggtggacagtcagaagaagaggcgagcatcaatctcaatgcaataaacaaatgtcctctgctcaagccttgggctctcaccttctcgtacggcagagcactgcaagcatcggccctgaaagcgtggggaggaaagaaagaaaacctgaaggcggcgcaagaagaatacgtgaaacgggctctggcaaacagcctggcctgtcaggggaaatacaccccatcgggacaggcgggagccgcagcctccgaaagcctcttcgtgtcaaatcatgcttac

SEQ ID NO: 5795 - DNA, 1092 bp, synthetic construct
  misc_feature 1..1092: note = source = /note="Description of Artificial Sequence: Synthetic coding sequence"
  source 1..1092: mol_type = other DNA
atgccgtaccaataccctgctcttactccggagcagaagaaggagttgtccgacattgctcataggattgttgcgcctggaaagggaatcctggcagccgatgaatccacggggtcgatcgcaaagaggctccaatccattgggacggaaaacactgaggaaaaccggagattctaccggcaacttcttcttaccgccgatgacagagtcaatccatgtattgggggcgtcattctttttcatgagactctgtaccagaaggccgacgacggacggccctttcctcaggtcattaagtcgaaagggggagtcgtgggtatcaaggtggataaaggcgtggtgcctctggccggaaccaatggagaaactactactcagggactcgatggtctgtccgaacggtgcgcacaatacaaaaaggacggagcagactttgcaaaatggcgatgcgtgcttaagattggtgagcataccccatcagccctggcaattatggaaaatgcgaacgtgctggcgagatatgcatccatttgccagcagaacgggattgtccccattgtcgagccagaaatactgcctgatggtgaccatgatctgaagcgatgtcagtacgtcaccgaaaaggtgctggcagcagtgtacaaggccctgtccgatcatcacatttacctcgaagggacccttcttaagcctaacatggtgacccccggacatgcatgtactcagaaattctcgcatgaagaaattgccatggccaccgtgaccgcgctgaggcgcaccgtgccacctgcagtcactggcataacgttcctgtcaggtggtcaatccgaggaagaagcatccattaaccttaatgccatcaacaagtgtcctcttctcaagccttgggctcttaccttttcgtatggacgtgcattgcaggcgtctgcactgaaggcctggggagggaaaaaggaaaaccttaaggcagcacaggaagaatacgtcaagcgtgcacttgcaaacagccttgcctgtcaaggcaagtacactccaagcgggcaggcgggcgctgccgcgtcagagtcgctctttgtctcaaatcacgcatat

SEQ ID NO: 5796 - DNA, 1092 bp, synthetic construct
  misc_feature 1..1092: note = source = /note="Description of Artificial Sequence: Synthetic coding sequence"
  source 1..1092: mol_type = other DNA
atgccctaccaatacccggctctcactccggagcagaagaaagaactctcagatatcgcccacaggatcgtggcgccgggcaaaggaatcctcgccgctgacgaatcgaccggttctattgccaaacggcttcagtccatcggcactgagaacaccgaggaaaatcgccgattctaccggcagctcctgctcaccgctgacgatagagtaaacccttgcatcggaggcgtgatcctgtttcacgaaaccctgtaccagaaggcggatgacggtcgcccgttcccgcaggtcattaagtcgaaaggtggagtcgtgggcattaaggtggataagggcgtcgtgccgctggcaggtactaatggcgaaactaccacccagggactggacggactgagcgagagatgcgcacagtacaaaaaggacggtgctgacttcgccaagtggcggtgcgtgctgaagatcggcgaacacaccccgtcagccctcgcgatcatggaaaatgccaacgtgctggcgaggtacgcctcaatctgccagcaaaacggcattgtgccgatcgtggaacccgaaatcctgcctgacggagatcacgacctcaagagatgccaatatgtgaccgagaaggtgctggccgcagtgtacaaagccttgagcgatcatcacatttacctggagggaactctcctgaaaccgaacatggtgactcctggtcatgcctgtacgcagaagttttcacatgaggaaattgctatggcgaccgtgactgcgctccggcgcactgtgccacctgcagtgaccgggatcaccttcctgtcggggggtcaatccgaggaggaagcatccatcaatctgaacgcgatcaacaaatgtccgctgctgaagccgtgggcactgaccttctcctatggccgggccctgcaggcctccgccctcaaggcatggggcggaaagaaggagaatttgaaggcggcacaggaggaatatgtcaagagagccctggctaatagcctcgcctgccagggcaagtacacgccttccggacaggcaggtgccgccgcttccgaatcgctgttcgtctcaaaccacgcatat

SEQ ID NO: 5797 - DNA, 1092 bp, synthetic construct
  misc_feature 1..1092: note = source = /note="Description of Artificial Sequence: Synthetic coding sequence"
  source 1..1092: mol_type = other DNA
atgccgtaccagtaccctgctctgactcctgagcagaaaaaggaattgagcgatattgcacacaggatagtggcaccgggcaaaggtattctcgcagcggacgaaagtactgggtcgattgctaagcgccttcagtccattggtacggaaaacaccgaggaaaacaggcgcttttacaggcagctcctgctgaccgcagacgatagagtgaacccatgtatcggaggagtgattctcttccatgaaactctgtatcaaaaggcggatgacggtcgtccttttcctcaagtgatcaaatccaagggcggagtcgtgggaatcaaggtggataaaggtgttgtgcccttggcagggactaacggagagactacgactcaagggctcgatggcctctccgaacggtgtgcacagtacaagaaggatggggcggattttgcaaagtggcgttgtgtactgaaaataggagagcatacgccaagcgcgctggccatcatggaaaacgccaacgtgttggccagatacgcatcgatatgccaacaaaacggcattgttccaattgttgaacctgagattttgccagatggtgaccacgaccttaagcggtgtcaatacgtcaccgaaaaggtgcttgcagctgtgtacaaggccctttccgaccatcacatctatctggagggcacccttctcaaacccaatatggtgactcctgggcatgcatgcacccagaagttcagccatgaggaaatagcaatggcaaccgtcactgcactcagaagaaccgtgccacccgcggtaactggaatcacttttctcagcggaggacaaagtgaagaagaggcttcgattaatcttaacgcaatcaataagtgccctttgttgaagccatgggcactgaccttctcctacggaagagcccttcaagcctcggcacttaaagcctggggtggcaagaaggaaaatcttaaagcagcacaagaggaatacgtcaagagggcccttgcgaattcacttgcatgtcagggtaagtataccccatcagggcaagcaggtgccgcagcttcggaatcactctttgtgtcgaaccatgcctac

SEQ ID NO: 5798 - DNA, 1092 bp, synthetic construct
  misc_feature 1..1092: note = source = /note="Description of Artificial Sequence: Synthetic coding sequence"
  source 1..1092: mol_type = other DNA
atgccataccagtacccggcgctgacacctgagcagaagaaggagttgtccgacatagcacaccgcatagtggctccaggtaaaggaatcctcgccgcagatgaatctaccggctcaatcgctaagagactgcagagtataggaacagagaacaccgaagagaacaggagattctataggcagctgctcctgactgcagatgacagagtcaatccttgtataggaggtgtgatcctcttccacgagaccctgtaccaaaaagccgacgacggaagacctttcccacaagtgatcaagagtaagggtggagtggtcggcatcaaggtggacaagggagtagtcccactcgccggcaccaacggcgagaccaccacacagggcctggacggcctgtcagaaaggtgcgcgcagtacaagaaagatggagctgacttcgcaaaatggaggtgcgtgctgaaaattggagagcacactcctagcgcattggcaataatggagaatgctaatgtcctggcgaggtacgcgagcatatgccagcaaaacggtattgtgccaattgtggagccggaaattttgcctgacggcgaccatgacttgaaacgctgccagtatgtcactgagaaagtgctggcagctgtgtacaaggcactgtccgaccaccacatctacttggaaggaactctgctgaaacccaatatggtcacgccaggacatgcatgtacgcagaagttctcccatgaggaaatcgctatggccactgtcacagccctgcgccgcactgtccctcccgcggttactggtattaccttcctgtctggcggtcagtccgaagaggaggcgagcataaatctgaatgcgatcaataagtgccctcttctgaaaccatgggctcttactttctcatacggtagggctctccaagcaagtgccctgaaggcatggggtggcaagaaggagaacctgaaggcagcgcaagaagagtacgtgaaacgcgctctggcaaattctctggcgtgccagggcaagtatacgccatctggccaggcaggcgctgcagcttctgaatctctctttgtctccaaccatgcatac

SEQ ID NO: 5799 - DNA, 1092 bp, synthetic construct
  misc_feature 1..1092: note = source = /note="Description of Artificial Sequence: Synthetic coding sequence"
  source 1..1092: mol_type = other DNA
atgccgtaccaatatccagcccttacccctgaacagaaaaaagagctttctgacattgcacaccgcattgtggcacccgggaaggggattctggccgctgacgaatcaacaggtagcatagcgaaaaggctccagagtattggaactgagaataccgaagaaaaccggagattttatcggcaactcctgttaaccgctgacgatagagtaaacccatgcattggcggcgtaatcctctttcatgaaactctgtatcagaaggctgatgacggccgtccgtttccccaggtgatcaaatctaagggcggcgtggtcggcatcaaagtggataagggcgtggtgccactcgccgggacaaatggggaaaccactacccaaggattggacggtctttctgagcgctgcgctcagtacaagaaagacggcgctgacttcgcaaagtggagatgcgtgctcaaaattggagagcatacaccatctgcactggcaatcatggaaaacgctaatgtcttggctcggtacgccagtatatgccaacagaacggaatcgtgccgatcgtcgagcccgaaatcctgcctgacggcgaccatgatctcaagcgatgccagtatgtgaccgagaaggtgctggctgcagtgtacaaggcactttcagaccaccacatctaccttgagggcacgctcctaaagcccaacatggtgacacctggacacgcgtgtacacagaagttctctcacgaagaaatcgctatggccacagtgaccgcactgagaaggacggtacctcctgcggttaccggcataaccttcctgagcggaggccaaagcgaagaagaagctagcatcaacctgaacgcaatcaacaaatgtccactgttgaaaccgtgggccttaacattttcctatgggcgcgccctgcaggctagcgctctgaaagcctggggcggaaaaaaggaaaacctcaaggccgctcaagaggaatacgtgaaacgcgctctggccaatagcctggcttgtcagggaaagtataccccttctggacaggctggggccgccgcttcggaaagccttttcgtgtcaaaccatgcctat

SEQ ID NO: 5800 - DNA, 1092 bp, synthetic construct
  misc_feature 1..1092: note = source = /note="Description of Artificial Sequence: Synthetic coding sequence"
  source 1..1092: mol_type = other DNA
atgccatatcagtatcccgcgttgacaccggagcagaagaaagaactgtctgatatagcacaccgcatcgtggccccgggcaaagggattcttgctgccgacgagtctacagggagtattgcgaagaggctgcaatctatcggcactgagaacacagaagagaataggcggttttatagacagctcctgttgactgctgatgatagagtcaacccatgcattggcggcgtcatccttttccacgaaaccctttaccagaaggctgacgatggccgaccattcccccaagtaataaaatccaaaggcggggtagtcggcattaaggtggataaaggggttgttcccttggctggcacaaatggagagacaactacacaaggtctggatggcctgagtgagcggtgtgcccagtacaaaaaggatggggcagatttcgcaaagtggaggtgtgtcctcaaaatcggagagcatacaccgagcgccctggctatcatggagaacgccaacgtcctggctaggtatgcctcaatttgccagcagaatggtattgtaccaatcgtggagccggagattttgcccgacggcgaccacgacctgaaaagatgtcagtacgttactgaaaaggtgctcgctgctgtttataaagccttgagcgatcatcacatatacctcgaaggcacccttctgaagccgaatatggtgacgcctggccatgcatgtactcaaaaattcagccacgaggagatcgccatggcgactgtgaccgcactgaggagaaccgtgccacccgctgtgactggaatcacgttcttgtccggcgggcagtctgaggaggaagcgtctatcaatctgaatgccattaataagtgccctctgctgaagccctgggctctgacattcagctacggcagggctttgcaggccagcgccttgaaggcctggggcgggaagaaagaaaacctgaaggcagcccaggaagaatatgtgaaaagagctctggctaattcactggcttgtcaggggaaatacaccccatctggacaggcaggtgccgccgcctccgagtctctgttcgttagtaatcacgcatat

SEQ ID NO: 5801 - DNA, 1092 bp, synthetic construct
  misc_feature 1..1092: note = source = /note="Description of Artificial Sequence: Synthetic coding sequence"
  source 1..1092: mol_type = other DNA
atgccttaccagtaccctgcccttaccccggagcaaaagaaggagctgtccgacatcgcacatcggatcgtcgcaccgggaaagggtatcctggcggcggatgagagcactggctctatcgcgaagcgcctccaatccattggcaccgagaacactgaggaaaaccggcggttctacagacaattgctgctgacggccgacgaccgcgtcaatccctgtatcggcggagtcatcctcttccatgagacgctttaccagaaagccgatgacggaaggccgtttccgcaagtgattaagagcaagggaggcgtggtcggcatcaaggtggataaaggtgtcgtgcctctcgccggaacgaatggcgaaactactacccagggacttgacggactgtccgaacggtgcgcccaatacaagaaagatggggcagacttcgcaaagtggcggtgcgtgctgaaaattggcgagcataccccgtccgcgctggcaattatggaaaatgccaacgtgctggccagatacgcatccatctgccaacaaaacggaatcgtccccatcgttgagcccgaaatcttgccggatggagatcacgatctgaaaagatgccagtacgtgactgaaaaagtgctggccgccgtgtacaaggccctctcggaccaccacatttatctggagggaactctcttgaagcctaacatggtgactccgggacacgcatgtactcaaaagttctctcacgaagaaattgccatggccactgtcacggcgctccgcagaaccgtgccacctgccgtgacgggaatcacttttctttccggcggccagtcagaagaagaggccagcattaacttgaacgcgatcaataagtgcccgctgctcaaaccatgggcccttaccttctcctatggtcgggctctgcaggcgtccgccctcaaggcctggggcggaaagaaggaaaacctgaaggcggcccaggaggagtacgtgaagagagccctggccaactcgctggcttgccagggaaaatacaccccgtcgggacaagcgggcgcagccgcaagcgaatcgctgtttgtgtcaaaccacgcctat

SEQ ID NO: 5802 - DNA, 1092 bp, synthetic construct
  misc_feature 1..1092: note = source = /note="Description of Artificial Sequence: Synthetic coding sequence"
  source 1..1092: mol_type = other DNA
atgccctaccagtaccctgctctgaccccggaacagaaaaaggagctgtcagacatagcccatcgcatagttgcccctggaaagggcatcttggccgccgacgagtctacaggcagcatcgccaaaaggctgcagtctatcggcacagagaatactgaagaaaataggaggttttacaggcaacttctccttacagccgacgacagggtgaatccgtgtatcggaggggtaatcttatttcatgaaaccctgtaccagaaagccgatgacggacgcccttttccccaggtgatcaagtctaagggcggcgtggtcggcattaaagtggataaaggagtggtgccactcgccgggacaaacggagagacaaccactcaaggcctcgacgggttgtctgagaggtgtgcgcagtataaaaaagatggcgccgactttgcaaaatggcggtgcgtgttgaagattggcgaacacacaccgtcagctctggccattatggaaaatgccaacgtgcttgcccgctatgcctccatttgccaacagaatgggatcgtccccattgtcgaacccgaaatcctgcctgacggcgaccacgatctgaaacgctgtcaatatgtgacggaaaaagtgctggccgcggtttacaaagcactctcagaccaccacatctacctcgaagggaccctgctgaaacccaacatggtcactccagggcacgcgtgcacccagaagttttctcatgaggagatcgcgatggccaccgttaccgccctcagacggacagtcccccccgctgtcacaggcatcacctttttgagtggggggcagtccgaagaagaggccagcatcaatttaaacgccattaataagtgcccactcctcaaaccttgggcgttaaccttttcctatggccgagccttgcaggcgtccgctctgaaggcttggggcggcaagaaggaaaacctgaaagctgcgcaggaagagtacgtgaagcgcgcgctggctaactctctcgcatgccagggtaagtatactccatccggccaggccggagccgctgcctccgagtcactgtttgtgtctaatcatgcctat

SEQ ID NO: 5803 - DNA, 1092 bp, synthetic construct
  misc_feature 1..1092: note = source = /note="Description of Artificial Sequence: Synthetic coding sequence"
  source 1..1092: mol_type = other DNA
atgccctaccagtatccagccttaacacccgaacagaaaaaggaactttccgatatcgcccatcgcattgttgcccctgggaaaggaatactcgcagccgatgaatctacaggatcaatcgccaaacggctgcagtctataggaacagaaaatactgaagagaaccgccgattctaccggcagctgttactgacagccgatgacagagtcaacccatgcatcgggggagtgatattatttcatgaaactctctatcagaaggcagatgatgggcggccctttcctcaggtgatcaaaagtaaagggggagtggtagggattaaagtagataaaggagtggtgccactcgccgggacaaatggagagactacaactcaggggttagatgggctatcggaacgatgtgcgcaatataagaaagacggagccgatttcgcgaaatggcggtgtgttcttaagataggggaacatacaccaagtgctttggccatcatggaaaacgccaacgtactcgcgcgatatgcttctatttgtcagcagaacgggatcgtcccaattgtggaacccgaaatcttaccagatggagatcacgatctcaaaagatgtcagtacgtgactgaaaaagtcttagccgctgtgtataaagccctctccgatcatcatatctatctcgaaggaacactactaaaaccaaatatggtgactcccggacatgcatgcacacagaaattctctcacgaagaaatagctatggctactgtaacagcccttaggcggacagtgcccccggccgtgacgggaatcacatttctgtctggagggcagtccgaagaagaagcctcaattaacttaaatgccataaataaatgtcctctcttgaaaccatgggccttaactttctcatatggacgggccctgcaggcaagtgcactgaaagcctggggggggaaaaaagaaaacctaaaagccgcccaggaagaatatgttaaaagagcccttgctaacagtctggcctgccaggggaaatatactccctctggacaggcaggagctgcagcctcagaaagtctctttgtatccaaccacgcgtat

SEQ ID NO: 5804 - DNA, 1092 bp, synthetic construct
  misc_feature 1..1092: note = source = /note="Description of Artificial Sequence: Synthetic coding sequence"
  source 1..1092: mol_type = other DNA
atgccataccaataccccgcacttactcctgaacagaagaaggagctgtcggacatcgcccatcgcatcgtcgcacctggaaagggtatactcgcagctgatgagtccacgggatccattgcaaaaagacttcaatccattggcaccgaaaataccgaagaaaacagaaggttctatcgacagctgctcctgactgcagatgacagagtgaacccatgtattggcggagtgattctttttcatgaaactctttaccaaaaggctgacgacggccgcccgttcccacaggtgataaagagcaaaggaggtgtcgtggggattaaagtggataagggtgtagtgcctctcgcaggcactaacggcgaaaccacgacccaggggctggatggtctttcagaaaggtgcgctcagtataagaaggatggcgccgattttgccaagtggcgctgcgtcctcaaaattggtgaacacactccttccgcgcttgctattatggaaaacgcaaatgtcctggcaagatacgcctcgatttgtcagcaaaatggaatcgtgccaatagtggaacccgagattcttccggacggcgatcatgacctgaaacgatgtcagtacgtgaccgaaaaagtgcttgccgcagtctacaaggccctcagcgatcatcacatttaccttgaaggaaccctccttaaaccgaacatggtgactcctggacacgcctgcacccaaaagttttcccatgaggagattgcaatggcgaccgtcacggcccttaggcgtactgtgcctccggcagtgacgggtattaccttcctctcaggcggccaatcagaagaagaggcatcgattaacctcaacgcaataaacaagtgtcctctcctgaaaccttgggcgcttacgtttagctacgggcgagcactccaagcatcggccttgaaagcgtggggtggaaagaaagagaatctgaaggcggcacaagaagaatacgtcaagcgtgcacttgcaaactcacttgcatgccaggggaaatacacgccctcgggacaagcaggagctgcagcctctgagagcctttttgtcagcaaccatgcatat

SEQ ID NO: 5805 - DNA, 1092 bp, synthetic construct
  misc_feature 1..1092: note = source = /note="Description of Artificial Sequence: Synthetic coding sequence"
  source 1..1092: mol_type = other DNA
atgccgtaccagtaccccgcactgactccagagcaaaagaaggaacttagcgacatcgcacatagaattgtggcccccggaaaaggaatacttgcggcagatgaatcgaccggatccattgcaaagcgcctgcaatccatcggcaccgagaatactgaagaaaacagacgcttctaccggcagctcctcttgactgcagatgatcgagtgaatccttgcatcggtggagttatcctgtttcacgagactctgtatcaaaaagcagacgacggtagacctttccctcaggtgatcaagagtaagggcggagtggtgggaatcaaggtcgataagggtgtggtgccactggccggcactaacggagaaactacgacccagggtttggatggcctgtcagaaaggtgtgcccagtacaagaaagatggtgcggattttgcaaagtggcgctgcgtgctcaagatcggtgagcatacccccagcgcccttgcaattatggagaacgcaaacgtccttgcaagatatgcgtcgatatgccaacaaaatggaattgtccctattgtggagcctgaaattctgcctgatggggatcatgatcttaagcggtgccaatacgtgacggaaaaggtcctggccgctgtgtataaggcgttgtcggaccatcacatatatcttgaaggaaccttgctgaagcccaacatggtgacccctggtcatgcttgcacccaaaagttttcgcacgaggaaattgcaatggcgaccgtgactgcacttagaaggaccgtccctcccgccgttacgggtatcacctttctctctggaggacaaagcgaggaagaagcctcgattaacttgaatgccataaacaaatgccccttgctgaaaccatgggcactgactttttcgtacggtagggcacttcaggccagcgcactgaaggcatggggtggaaaaaaggagaatttgaaggcggctcaagaagaatatgtgaagcgggctcttgcaaactcactggcatgtcagggtaaatacaccccgtcagggcaagcgggcgcagcagcatccgagtcactcttcgtctccaaccatgcgtac

SEQ ID NO: 5806 - DNA, 1092 bp, synthetic construct
  misc_feature 1..1092: note = source = /note="Description of Artificial Sequence: Synthetic coding sequence"
  source 1..1092: mol_type = other DNA
atgccgtaccaatacccggcactgactcccgaacaaaagaaggagctgtcggatatcgcacatcggatcgtggcacctggtaaaggtattctggcggctgatgagtccactgggagcattgccaaacgccttcagtccattggaaccgaaaacactgaggaaaaccgtcgtttctatcgccaacttctcctgaccgccgatgatagagtgaatccatgtatcggaggtgtgatcctcttccacgaaaccctgtaccagaaggcagatgatgggcgccctttcccccaggtgattaagtccaagggtggagtggtgggcataaaggtggataagggtgtggtccccctggcaggaactaacggagagactaccacccaaggactggacggactttccgaacgatgtgcacaatacaagaaagacggtgcagactttgcaaaatggagatgtgtgctgaagattggagaacataccccctctgcacttgcaattatggaaaacgcaaatgtgttggcccggtacgcctctatttgtcagcaaaacggcatcgtccctattgtcgagcctgaaatccttcctgacggcgatcacgacctcaaacgctgccaatacgtcacggaaaaggtgcttgccgccgtgtacaaggcactgtctgaccatcacatataccttgaaggtaccctgttgaagccaaatatggttactccagggcatgcatgtacgcaaaagttttcacatgaagaaatcgcaatggcaaccgtgaccgcgctccgccggaccgtgcctccagcagtcaccggtatcaccttcctttcgggaggtcagtcggaagaagaagcctcaatcaatttgaacgccatcaataagtgccctcttctgaagccatgggctctgactttttcatacggaagggcactgcaggcatcggcactgaaagcatggggcggaaagaaggaaaaccttaaggccgcacaggaggaatacgtcaagcgggcgcttgccaactcacttgcctgtcagggcaagtacactccgtccggccaagctggagccgcagcatcggaatccctgttcgtgtcaaaccatgcatac

SEQ ID NO: 5807 - DNA, 1092 bp, synthetic construct
  misc_feature 1..1092: note = source = /note="Description of Artificial Sequence: Synthetic coding sequence"
  source 1..1092: mol_type = other DNA
atgccctatcagtatccggcgctgacgcccgagcagaagaaagaactgagtgatatcgctcacagaattgttgctccaggcaaaggaattctagccgcagacgaatcaaccggctcaatcgccaagaggctccagtccatcggaacagagaacacagaagagaaccgccggttctatcggcagctgttactgacggccgatgatagagtgaatccatgcatcggaggcgtaatcctttttcacgaaacattgtatcagaaagccgacgatggtcggcccttcccccaggtgattaagagcaaagggggggtagtgggcatcaaagtggataagggcgtggtgcccctggccggaaccaacggtgagactacaacccaagggttggatggtctgtctgagaggtgcgcacaatataaaaaagacggtgccgatttcgcgaagtggcgctgtgtgctgaagatcggagaacacaccccatctgcacttgccattatggagaacgctaatgtgttagcccgatacgcatctatctgtcagcaaaacggcatcgttcccatcgtcgagcctgagatactacccgacggcgatcatgacctgaaacgttgtcagtatgtgacagagaaagtgctggctgcagtctacaaggccctttctgatcatcacatttatttggaaggaactctccttaaaccaaacatggtgacccctgggcatgcctgtacacagaaattctcccatgaagaaattgccatggccaccgtaaccgccttgcggagaacagttccgccggcagtaaccggtatcacattcctcagtggagggcaatctgaggaagaggctagtatcaacctaaatgctataaataagtgtcccctgttgaagccgtgggcactgaccttcagttatgggcgagcactgcaagcttccgccttaaaagcttggggcgggaagaaggagaatcttaaggctgctcaggaagagtatgtcaagcgagcgctggccaactcgttggcgtgccagggaaaatacacaccctcagggcaagctggggctgcagcatctgaatcccttttcgtgtctaatcatgcttat

SEQ ID NO: 5808 - DNA, 1092 bp, synthetic construct
  misc_feature 1..1092: note = source = /note="Description of Artificial Sequence: Synthetic coding sequence"
  source 1..1092: mol_type = other DNA
atgccttatcagtacccagcactgacaccagaacaaaaaaaagaactgagtgacatagcccacagaatcgtagcaccagggaagggtatcctggccgccgatgaaagcacaggctccatagccaaaaggctgcagtctattggaactgaaaacacagaggaaaaccgacgtttctataggcagctcctgttgaccgcagacgatcgagtcaatccatgcatcggaggtgtgatcctttttcatgagacactgtaccaaaaggctgacgacgggaggcctttccctcaagtgatcaagagcaaagggggcgtagtgggaataaaggtggataaaggagtagtgcctttagcggggacaaatggcgagacgaccactcagggactggatgggctcagtgagcgctgtgctcagtataagaaggatggagccgatttcgccaagtggagatgcgtgctgaaaatcggagagcacacaccttcggctctagccataatggagaacgctaacgtcctggcgcgatacgccagtatctgtcagcagaacgggattgttcccattgtagaaccggaaattttgcctgatggggatcacgacttaaagcgctgccagtatgtgacagaaaaggtgttggcagcagtttacaaggcactaagtgatcaccatatctaccttgagggaaccctccttaagcccaacatggtgactcctggacacgcgtgtacccagaagttctcacacgaagaaattgccatggccactgtgaccgcacttagacggaccgtgccacccgctgtgactggcatcaccttcctgtcaggcgggcagtctgaagaagaggcctcaataaatctgaatgccataaacaagtgtcccctcctcaagccttgggccctgaccttctcttacggtagggcactgcaggctagtgcacttaaggcctggggaggtaagaaagagaatctaaaggccgcccaggaggagtacgtgaaaagggccctagctaactctctggcctgtcagggaaagtacactccctcagggcaggcaggcgcggcagcctcagagagtctttttgtctctaatcacgcttac

SEQ ID NO: 5809 - DNA, 1092 bp, synthetic construct
  misc_feature 1..1092: note = source = /note="Description of Artificial Sequence: Synthetic coding sequence"
  source 1..1092: mol_type = other DNA
atgccctatcagtatcccgcactgacaccagaacaaaaaaaggaactgagcgatatcgcacatcggattgtggccccaggtaaggggatcttggcggccgacgagagtaccgggtctattgccaagcggcttcaaagcataggcacagagaatacggaggagaaccgaagattctaccgccagctgctacttaccgcagatgaccgggtgaacccctgcatcggaggcgtgatcctctttcacgagaccctgtaccaaaaagccgatgatggtaggccctttccgcaggtgataaagagtaagggaggagtggtgggaataaaggtggacaagggggtcgttcctctggcaggcacaaacggtgaaactacaacacaagggctggatgggttgagcgaaagatgcgcccaatataagaaggacggcgctgattttgccaagtggaggtgtgtactgaaaatcggcgaacataccccttctgccttggcaatcatggagaatgctaacgttctggcgcgttacgcttcaatatgtcagcagaatgggattgttccgattgtggagccggaaattttgcccgacggcgatcacgatctgaaacggtgccagtacgtgacagaaaaggtgctggccgccgtctataaggccctgtctgatcatcatatctatctggaaggaaccttgctgaaacctaacatggtcacccccggccacgcttgcacccaaaagtttagccatgaagaaattgcgatggcaaccgtaaccgccctgaggcggaccgtgcctcccgcagtaacaggaatcaccttcctgagcggggggcagtctgaagaggaggcctcaatcaatctaaatgctataaataagtgtcccttgctgaaaccctgggcccttaccttttcgtacggaagagctcttcaggcctcagcccttaaagcatggggtgggaaaaaggagaatttgaaagcggcccaggaggagtatgtgaagcgtgctctagctaactcactcgcctgtcagggcaaatatacaccatcagggcaagctggggccgccgctagtgaatctctgtttgtgtccaaccatgcttat

SEQ ID NO: 5810 - DNA, 1092 bp, synthetic construct
  misc_feature 1..1092: note = source = /note="Description of Artificial Sequence: Synthetic coding sequence"
  source 1..1092: mol_type = other DNA
atgccttaccagtaccctgccctgacgcctgaacaaaagaaggaactgtctgacatagcgcatcgtatagtagctcccggcaaaggaatcctcgcggccgacgagtcaaccggctctattgcaaagcgactccagagcatcggcacggagaatactgaggagaaccggcggttttatagacagctcctgctgaccgcagacgaccgcgtgaatccgtgcattggaggtgtgattctttttcacgagactttgtaccagaaggcggatgatggtcgtccattccctcaggttatcaagtctaagggaggtgtagttggaataaaggttgacaaaggagtggtgccgttagctggtacaaacggcgaaaccactactcaaggccttgacgggctgagcgaacgctgtgcccagtataagaaagatggcgccgacttcgcgaagtggcgctgtgtgcttaaaataggggaacatacaccctccgcactcgccattatggagaacgccaacgtgttagcccgttacgcttcgatctgccagcagaatggtatcgtgcctatcgtggagcctgagattctcccggatggggaccacgacctgaagcggtgtcagtacgtgacagaaaaggttctggctgcagtgtacaaggccctctcggaccatcacatctatctggaagggaccctactgaaacccaacatggtgacgcccggccacgcctgcacccagaaattttcacacgaggaaatcgccatggctactgtgacggcattaagaaggactgtccctcccgctgtcactgggattaccttcctgtcggggggtcaatctgaggaggaggcctccatcaatctgaacgccatcaataagtgccccttattaaaaccctgggcgctaaccttctcgtacggcagagcactccaagcttctgcactgaaggcttggggtggcaaaaaggagaacctaaaggccgctcaggaggaatatgtgaagagagcactggccaattcactggcctgtcaagggaagtacaccccttccgggcaggcaggtgccgctgcctccgagtctctgttcgtgtcaaatcacgcctat

SEQ ID NO: 5811 - DNA, 1092 bp, synthetic construct
  misc_feature 1..1092: note = source = /note="Description of Artificial Sequence: Synthetic coding sequence"
  source 1..1092: mol_type = other DNA
atgccttaccagtaccctgcactgactcctgagcagaaaaaggaactctccgacatcgcgcaccgcatcgtggcaccgggaaagggcatcttggcggcggatgagtccactgggtccatcgcaaagcggttgcagtccatcggtaccgagaacaccgaagaaaacagacggttctaccgccaactgcttctgaccgccgatgatcgcgtcaatccttgcatcggaggagtcatcctgttccatgaaaccctgtaccagaaggcggacgatggccggccgtttcctcaggtgatcaaatccaaagggggcgtggtggggatcaaagtcgataaaggtgtcgtgccgctggctggaaccaatggagaaaccactacccagggtctggacggactctcagagcgctgcgctcagtacaaaaaggacggcgctgatttcgccaaatggcgctgtgtgctcaagatcggagaacacacgccatcggccctggctatcatggagaatgctaacgtcctcgctcgctacgcttcaatctgccaacagaacggaatcgtgccaatcgtcgagccggaaatcctgccggatggcgaccacgatctgaaacggtgtcaatacgtcaccgaaaaagtgctcgctgccgtgtacaaggcactgagcgaccatcacatctacctggagggtactctgctgaagccaaatatggtgacgccgggacacgcctgcactcagaagttctcccacgaagaaatcgccatggcaactgtgactgccctcagacgcaccgtgccgcccgcagtgaccgggatcacctttctgtcgggaggacaatcggaagaagaagcctccatcaatctcaacgcgatcaacaagtgcccgctgcttaagccatgggccctgactttctcctacggaagagcgctgcaggcttcggcgctgaaagcatggggtggtaagaaggaaaacctcaaggccgcgcaggaagagtacgtgaagagagcccttgctaatagccttgcttgccaagggaagtacactccttcggggcaagctggagcggctgcgagcgagtccttgttcgtgagcaaccacgcatat

SEQ ID NO: 5812 - DNA, 1092 bp, synthetic construct
  misc_feature 1..1092: note = source = /note="Description of Artificial Sequence: Synthetic coding sequence"
  source 1..1092: mol_type = other DNA
atgccataccaataccctgccctgacccctgaacagaagaaggaactgtcagatatcgcacaccgcattgtggcaccggggaaaggtattctggctgcggatgaatcgactggaagcattgccaaacggcttcagagcatcggcactgagaacaccgaagaaaatcgcagattctaccggcagctcctgcttaccgcggacgatagagtcaatccgtgtattggcggcgtgatcttgttccatgaaaccctttaccagaaggccgatgatggtcggcctttcccgcaggtgatcaagagcaaaggaggagtggtgggcatcaaggtggacaaaggtgtggtgccgctcgcgggaactaacggagaaaccaccactcagggtctggatggcctgtcggagcgctgcgctcaatacaagaaggatggagcggacttcgccaagtggagatgcgtgttgaaaatcggagagcacaccccatcagcgctcgccatcatggagaacgcaaacgtgctggctagatatgcctcgatctgccaacaaaacggcatcgtgccaatcgtggaacccgaaattctgccggatggtgaccatgacctgaaaaggtgccagtacgtcactgagaaggtcctggcagccgtctacaaggccctcagcgatcaccacatctatctggagggcactctgctcaagcccaacatggtgactccgggacatgcttgtactcaaaagttcagtcacgaagaaatcgctatggccactgtcactgccctgaggcgcacggtgccgccggccgtgactgggatcactttcctgtcaggaggacagtctgaggaggaggcttccatcaatcttaacgcgataaacaaatgcccgttgctcaaaccgtgggctctgactttttcgtacggccgcgccttgcaggcgagcgcacttaaggcgtggggaggaaagaaggagaacctgaaagcggcacaggaagagtacgttaaacgcgccctggctaactcattggcgtgccaaggaaagtacaccccgtcgggtcaggcgggagcggcggcctcggagtcgctgttcgtgtccaaccacgcctac

SEQ ID NO: 5813 - DNA, 1092 bp, synthetic construct
  misc_feature 1..1092: note = source = /note="Description of Artificial Sequence: Synthetic coding sequence"
  source 1..1092: mol_type = other DNA
atgccgtaccagtatccagctttgacacccgagcagaaaaaggagctttccgatattgctcacagaatcgttgccccaggtaaggggattctggcagccgacgagagcaccggttcaattgctaagcgcctgcaatctataggcacggagaatacagaggagaacagacgcttctacaggcagttgctgctcacggcggatgatcgcgttaacccgtgtatcggcggggtgatcctgtttcatgagactctgtaccagaaggccgacgacgggcggccgtttccgcaggtgatcaaatcaaagggcggggtggtcgggatcaaggtggacaaaggcgtggtacctctggctggtacaaatggcgagactactacacagggcctggacggattgtcagagcgctgtgctcaatataaaaaggatggggctgacttcgccaagtggcgctgtgtcctcaagataggagagcacaccccaagtgctctggctatcatggaaaacgccaatgtactcgctagatatgcttctatttgtcagcagaatgggatcgttcccatcgtcgaacccgagatccttcccgatggagaccatgacctgaagaggtgccagtacgtgaccgagaaggtcttggccgcggtgtataaggcgcttagcgatcaccacatctatctggagggaacactccttaaaccaaatatggtcactccgggccacgcatgcactcagaagttcagccacgaagaaatcgctatggccactgttaccgcactgcgtcgtaccgttccgcctgccgtgacaggtatcacctttctgagtgggggccagagcgaagaggaggctagcattaacttaaatgcaatcaacaagtgcccactactgaaaccctgggccttgactttttcatacgggcgtgcgcttcaggctagcgccttaaaggcctggggaggtaaaaaggaaaacctgaaggctgctcaggaggaatatgtgaagcgcgcactggccaattcgttggcatgccagggcaaatatactcccagcggtcaagcaggtgctgcagccagtgaaagcctattcgtttccaaccacgcctat

SEQ ID NO: 5814 - DNA, 1092 bp, synthetic construct
  misc_feature 1..1092: note = source = /note="Description of Artificial Sequence: Synthetic coding sequence"
  source 1..1092: mol_type = other DNA
atgccataccaatatcccgccctgacgcctgaacagaagaaggaactttctgacattgctcaccgcatagtcgcgccaggaaagggcatccttgccgccgatgaatccacaggtagtatcgcaaagcggctgcagtcaatcgggacagaaaacacagaggagaaccggagattctacaggcaactgctgctgaccgcggatgaccgggtcaatccctgcatcggcggcgtgatactgtttcacgagaccctctatcaaaaagcagacgatggccgaccctttccacaggtaattaaatccaagggcggggtggtggggatcaaggttgataaaggtgtcgtgcctctggctgggaccaacggggagacaacaacccagggcctcgacgggctgtccgagcgctgcgctcagtataaaaaagacggtgccgacttcgcaaagtggcggtgtgtcctgaaaatcggcgagcacacgccctcagctctggccatcatggaaaacgcgaacgtgctggcccggtatgcatctatatgccagcagaacggcatagtgcccatcgtagaaccagaaatacttcccgatggagatcacgatctgaaaaggtgtcaatacgtgactgaaaaggtcctcgctgccgtctacaaggcactgagtgaccaccatatctatttggaaggaaccctcctcaaacccaatatggttaccccaggccacgcatgtacgcagaagttctctcatgaagagatcgcgatggcaacagtgacagcgttgagaagaactgtgccccccgcagttaccggcatcacctttctctccggagggcaaagtgaagaggaggccagcatcaacttgaatgcaataaacaaatgtccccttctgaagccttgggcactcaccttctcctacgggagagccctgcaggccagcgccctgaaggcgtggggaggcaaaaaggagaaccttaaggctgcccaggaagagtacgtgaagcgagcacttgctaatagtttggcttgtcaggggaaatacacaccaagtggccaggccggagctgctgcttccgagtctctttttgtgtcaaaccatgcctat

SEQ ID NO: 5815 - DNA, 1092 bp, synthetic construct
  misc_feature 1..1092: note = source = /note="Description of Artificial Sequence: Synthetic coding sequence"
  source 1..1092: mol_type = other DNA
atgccataccaataccctgcgctgacgccggagcagaagaaggaactgtcagatatagcgcacagaattgtggcaccaggaaaagggattctcgccgcagatgaatcgaccgggtccattgccaaacgtctgcaatcgatcggtaccgaaaacaccgaagagaacaggaggttctaccgccagcttcttctcactgcagacgaccgggtcaacccctgcattgggggagtgatcctgtttcacgaaaccctttaccaaaaggcagatgatggcagacctttcccacaagtgattaagtcaaagggtggcgtggtgggcattaaagtggataagggcgtggtgcctctcgccggaacgaatggtgagactactacccaagggctcgatggcctctcggagcgctgtgcacaatacaaaaaggacggagcagattttgccaaatggagatgcgtgcttaagatcggcgaacataccccatcagccctcgcaataatggaaaacgcaaacgtgctggcaagatacgcgtccatctgtcagcagaatggtatagtgcccatcgtggaaccggagattctcccggacggtgatcatgatcttaaaagatgccagtacgtcactgaaaaggtgttggcagccgtctacaaggcgttgtccgaccatcacatatacttggaaggaacccttctgaagccaaacatggttaccccgggtcatgcgtgtacccaaaagttttcgcacgaggagatagccatggccacggtgaccgcgctcagacgaaccgtcccacctgccgtcaccggaatcactttcctgagcggcggccagtcggaggaagaggcaagtatcaacctgaatgcaatcaataagtgtccgcttcttaagccatgggcactcactttttcctacggaagagcgttgcaagcatcggctcttaaagcatggggcggaaagaaggaaaaccttaaggcggcacaggaagaatacgtgaagagagccctcgcaaattcactcgcctgtcagggaaagtacacgccttccggccaagcgggtgcagccgctagcgaatcactcttcgtgtccaaccatgcatac

SEQ ID NO: 5816 - DNA, 1092 bp, synthetic construct
  misc_feature 1..1092: note = source = /note="Description of Artificial Sequence: Synthetic coding sequence"
  source 1..1092: mol_type = other DNA
atgccgtaccagtaccccgcgcttactcctgaacaaaagaaggagctctcggatatcgcccatcggattgtcgccccgggcaagggaattctcgcggcagatgagtcaaccggaagcattgccaaacggctccagtcaatcggcaccgaaaataccgaggaaaatcggaggttttatcgccaactgctgttgaccgctgacgatcgggtgaacccatgcatcggaggtgtgatcctgttccacgagacgctgtaccagaaagccgatgacggtcgcccattcccgcaagtcattaagtcaaagggaggcgtggttggaatcaaggttgacaaaggagtggtgccgcttgctggcaccaatggtgaaactaccactcagggattggatggactctccgaacggtgcgcgcaatacaagaaagacggtgcagacttcgcaaagtggcgctgcgtgctgaagatcggcgagcacaccccctcggcactggcaattatggaaaacgcgaacgtgctggcacgttacgccagcatctgccagcagaacggaattgtcccgatcgtggaaccggaaatcttgccggatggagatcacgacctcaagcggtgccagtacgtgaccgagaaagtgctggcagccgtctacaaagctctgtcggaccaccacatctacttggagggtaccttgctcaagccgaacatggtgactccgggacatgcgtgcacccaaaagttctcgcacgaggaaatcgctatggccaccgtgactgcgctgagaaggacggtcccgcctgcggtgaccggtatcactttcctttcagggggccagtcagaggaggaagcatccatcaatctgaatgcaatcaacaaatgccccctcctcaagccatgggccctgaccttttcttacggaagggcgcttcaggccagcgccttgaaagcgtggggaggaaagaaggaaaatctgaaagccgcacaagaagaatacgtgaaacgcgccctggccaactctctggcttgtcagggaaagtacaccccatccgggcaggctggtgcagctgcttccgagtcattgtttgtctctaaccatgcatac

SEQ ID NO: 5817 - DNA, 1092 bp, synthetic construct
  misc_feature 1..1092: note = source = /note="Description of Artificial Sequence: Synthetic coding sequence"
  source 1..1092: mol_type = other DNA
atgccatatcaatatccagcacttactcctgaacaaaagaaagaattaagtgatattgcacatcgtattgttgcacctggaaagggaattttggcagctgatgaatctactggatctattgcaaaaagattacaatcaattggaactgaaaatactgaagaaaatagaaggttttatcgacaacttcttttgacagcagatgatcgtgttaatccatgtattggaggagttatattattccatgaaactctttatcaaaaggctgatgatggtcgtccatttccacaagttattaaatcaaaaggtggagttgttggaattaaagttgataaaggagttgttccacttgctgggactaatggagaaacaactactcaaggattagatgggttatcagaaagatgtgcacaatataaaaaagatggagcagattttgctaaatggagatgtgttttaaaaattggagaacatacaccatctgctcttgctattatggaaaatgccaatgttcttgctagatatgcttctatttgtcaacaaaatggaattgttcctattgtagaaccagaaattcttcctgatggagatcacgatttaaaacgttgtcagtatgtaacagagaaagtacttgctgcagtatataaggctctttctgaccatcatatttatcttgaaggaactttacttaaaccaaatatggtaactccaggacatgcttgtacacaaaaattcagtcatgaagaaattgcaatggctacagttacagcccttagacgaacagtacctccagctgttacaggtattacattcttgagtggaggacaaagtgaggaagaagcttctataaatttaaatgctataaataaatgtccattacttaaaccatgggcacttactttttcatatggaagagcattacaagcctcggcattaaaagcatggggtggaaagaaggaaaacttaaaagctgcacaagaagaatatgtgaaaagagcattagctaattcattagcatgtcaaggaaaatatacaccttcaggtcaagcaggagcagctgcttctgaatcattatttgtttcaaatcatgcttat

SEQ ID NO: 5818 - DNA, 1092 bp, synthetic construct
  misc_feature 1..1092: note = source = /note="Description of Artificial Sequence: Synthetic coding sequence"
  source 1..1092: mol_type = other DNA
atgccgtaccaatacccagccctcaccccggaacagaagaaagagctttcagacatcgctcatcgaattgtggcacctggaaagggaatcctggcggccgatgaaagcactggttcgatcgcaaagcgcctgcagtccataggaacggaaaacactgaggagaacagacggttttaccgccagctgctgctcaccgcagatgaccgggtgaacccgtgtatcgggggagtgattctgttccatgaaactctgtaccaaaaggccgacgacggacgccctttcccgcaagtcattaagagcaagggaggtgtcgtgggaatcaaggtggacaagggtgtagtgccactcgccggaaccaacggagaaaccacgacccagggattggatggcctgtcggaacggtgtgcgcagtacaaaaaggacggtgcagacttcgctaaatggcgctgcgtcctgaagatcggtgaacataccccttcggctctggcaatcatggaaaatgccaacgtgctggctagatacgcgtcaatctgccaacagaacggaatcgtcccgatcgtggaacccgaaatcctcccagatggcgatcatgatctcaaacggtgccaatatgtgaccgaaaaagtgctggcagctgtgtacaaagccctgagcgaccatcacatatacctggaggggaccctcctcaaaccgaacatggtaactccagggcacgcttgcacccagaagttttcgcacgaagagatcgcgatggcgactgtcactgcacttaggcgtaccgtcccgcccgctgtgacggggatcaccttcttgtcgggaggccagtcagaagaggaggcctcgattaatctcaatgccatcaataagtgcccactgctgaagccttgggcactgactttctcttacggacgggccctccaagcaagcgcgctcaaggcctggggcggtaagaaggaaaaccttaaggcggctcaggaggaatacgtcaagcgggccctggcgaattcccttgcttgtcaaggaaagtacactccatcgggacaagccggggcagcggcttccgagtccctgttcgtgtccaaccacgcatat

SEQ ID NO: 5819 - DNA, 1092 bp, synthetic construct
  misc_feature 1..1092: note = source = /note="Description of Artificial Sequence: Synthetic coding sequence"
  source 1..1092: mol_type = other DNA
atgccatatcagtatccagcactgaccccagagcaaaaaaaagagcttagtgatattgcacaccgaattgtggcacccggcaagggcatcctggctgctgacgaaagcactggaagtatcgctaaaaggctccagtcgattggtacagagaatactgaggaaaacaggagattttacaggcaactgctcttgactgctgacgaccgagtaaacccctgcatcggcggcgttatcttattccatgagacgctctaccagaaagccgatgacggacgacccttcccgcaggtcatcaagagtaaggggggagttgtaggtattaaagttgataagggcgtcgtgcccctggccggaacaaacggtgagaccacaacacagggcctggatggcctgtccgaaaggtgtgcgcagtataaaaaggatggcgcggactttgccaaatggcgatgtgttcttaaaataggcgagcacacgccaagcgctctagctattatggagaatgccaatgtacttgccaggtatgcatctatatgtcagcagaatggtatcgttccgatcgtggaacccgaaattcttcctgacggcgaccacgatttaaagcgatgccagtacgttactgagaaggtactggctgctgtgtacaaagcgctgagcgatcaccacatctatctggaaggaacattattgaagccaaatatggtgaccccgggacacgcctgtactcagaagttctcccatgaggagattgcaatggcgaccgtgacagctctgcgacgtaccgttccccccgcagtgactggtataaccttcctcagtggcggacagtccgaggaggaagcttccatcaatctgaatgccattaataagtgtccactcctcaaaccgtgggccctgaccttctcatacggccgcgccctgcaggctagcgccttgaaggcctgggggggcaagaaggaaaacctgaaggctgctcaagaggaatacgtgaaaagggccctggcaaattctctagcctgccagggcaaatacacgcctagcgggcaggcaggggctgccgcctccgagtcactgttcgtgtctaaccacgcctac

SEQ ID NO: 5820 - DNA, 1092 bp, synthetic construct
  misc_feature 1..1092: note = source = /note="Description of Artificial Sequence: Synthetic coding sequence"
  source 1..1092: mol_type = other DNA
atgccataccagtatccagcgttgacacctgagcagaagaaagagctcagcgatatcgcgcatcgcatcgttgcgccgggtaagggcattctggcagcggacgaatctacaggtagcatagcgaaacgactgcaaagcatcggcacggagaacactgaggagaatagaagattttatcgtcagctgcttttgacagctgatgaccgcgtgaacccgtgcatcggtggtgtgatcctgtttcatgaaaccctgtatcagaaggctgacgacgggcgtccattccctcaggtgattaaaagcaaggggggcgtggtgggtatcaaagtcgataaaggtgtggtccctttggcaggcactaatggcgaaactaccacgcagggactggatggtttgtctgagcgatgtgcgcagtacaagaaagatggtgcggatttcgctaagtggaggtgtgtgctgaagattggagagcacactcctagcgcgcttgcgattatggagaacgcaaacgttctggcacgctacgccagcatttgccagcagaacggtatcgttccgattgtggagccagaaattttgccagacggtgaccacgacctaaagcgctgtcagtatgtcactgagaaggttctagcagcagtctacaaagcgctgagcgatcatcatatctacctggagggcaccctgctgaagcctaatatggtaactccgggccatgcgtgcacccagaaattctctcacgaggagattgccatggcgaccgtcaccgcgctgcgccgcaccgtgcccccggccgtgaccggcatcacctttctgtctgggggccagagcgaggaagaggctagcataaatctgaacgcgatcaacaaatgcccattgttaaagccctgggcattaacattcagctatggtcgcgcactgcaggcttccgcgctgaaggcctggggggggaagaaagaaaatttgaaagcagcccaggaagaatatgtgaagcgcgcgctcgcgaatagcctggcatgtcaaggcaaatatactccgtcgggacaggcgggcgccgctgcctcagagtcactattcgtgtccaatcacgcttac

SEQ ID NO: 5821 - DNA, 1092 bp, synthetic construct
  misc_feature 1..1092: note = source = /note="Description of Artificial Sequence: Synthetic coding sequence"
  source 1..1092: mol_type = other DNA
atgccttatcagtatcctgccctcacccctgaacaaaagaaagagctgagtgatatagcccatcggatcgttgcccctggtaagggcattctggctgccgacgagagcacgggatctatcgccaagcgactgcagtctatcgggactgagaacactgaggaaaacagaagattctatcgccagcttctcctgactgccgacgatcgcgtcaatccatgcattggcggagtgatccttttccatgaaacactctatcagaaggctgacgacggccgcccatttccacaggtcattaagagcaaaggaggggtggtcggcattaaggtggacaagggcgtcgtgcctttagccggcactaatggtgagacaaccactcagggcctcgacgggctctctgaacggtgtgctcagtacaagaaagacggtgcggacttcgcaaagtggagatgtgtgctgaaaattggcgagcatacgccttccgctctcgccattatggaaaacgccaatgttctggcaagatacgcctccatctgccagcaaaacgggattgtccctatcgtggagccggagatcctgccggacggcgaccatgacctaaagaggtgccaatacgttactgagaaggtacttgcagccgtctacaaagccttgtctgatcaccacatttatctggagggtaccctgctgaagcctaatatggtcaccccagggcatgcctgcacccaaaaattcagccacgaagaaatcgccatggctaccgtgaccgccttaagaaggaccgtgcctccagctgttaccgggataaccttcctgtctggaggccagtccgaggaagaggcgtctatcaatctcaacgccatcaataagtgccccttactgaaaccctgggcactcacattcagctatggaagagctttgcaggcctccgctctgaaagcgtggggaggcaagaaggagaacctgaaggctgctcaggaggagtacgttaagcgtgccctcgccaactcacttgcttgccaaggcaagtacacacctagtggacaggccggagcagcagccagcgaaagtctgttcgtgtctaatcacgcctat

SEQ ID NO: 5822 - DNA, 1092 bp, synthetic construct
  misc_feature 1..1092: note = source = /note="Description of Artificial Sequence: Synthetic coding sequence"
  source 1..1092: mol_type = other DNA
atgccttatcaatacccggccctgactcctgagcaaaagaaggaactctcagatatcgcgcatagaatcgtcgcccctggcaagggaatcctggcagcagacgagtccactggatcaatcgcaaaacggcttcaaagcatcggtaccgaaaacactgaagagaataggcgcttttatcgccagcttttgctgaccgcagacgatcgggtgaacccctgcatcggcggagttatcctgttccatgagactctttaccaaaaggccgacgacggacgccccttccctcaagtgatcaagagcaaagggggcgtcgtcggaatcaaggtcgacaagggagtggtgcccttggctggtaccaacggagagactactacccaggggctcgacggtttgtcggagcgctgtgcgcagtacaagaaagacggtgccgatttcgctaagtggaggtgtgtgttgaagattggagaacatactccgtctgccctcgccatcatggaaaacgccaatgtgctcgcgcgctacgcctcgatctgtcagcaaaacggcatcgtcccgatcgtggaacctgagattttgccagacggcgaccacgatcttaagagatgccagtacgtgactgagaaggtgctggccgcagtgtacaaggccctgtcagatcaccacatttacttggagggaacccttctcaaaccgaacatggtgacgccggggcatgcgtgtacgcagaagttctcgcacgaagagatcgcgatggcgactgtgaccgcccttcgccgcaccgtcccgccggcagttaccggcattacctttctgagcggaggccagtccgaagaagaagcaagcattaatctcaacgccatcaataagtgcccactgctcaagccgtgggccctcacgttctcatacggccgggcgctgcaggcatccgcactcaaagcatggggtggtaagaaggaaaatctgaaagcagcccaagaggagtacgtgaaacgtgctctcgccaactcactcgcgtgccaaggaaagtacaccccatcggggcaggccggagcagctgcctccgaatctttgtttgtgtccaaccacgcgtac

SEQ ID NO: 5823 - DNA, 1092 bp, synthetic construct
  misc_feature 1..1092: note = source = /note="Description of Artificial Sequence: Synthetic coding sequence"
  source 1..1092: mol_type = other DNA
atgccgtatcaataccctgctctgactccagaacaaaagaaggaactcagcgacattgcccaccggattgtcgcaccgggaaagggtatcctggcagccgatgagagcacgggttcgatcgcgaaaaggctgcaatccatcgggactgaaaacactgaagaaaaccgcagattctaccgccaactgcttctgaccgctgatgaccgggtgaatccatgtatcggaggagtgatactgtttcacgaaaccctttaccagaaagctgacgacgggcggccatttccgcaggtgatcaagtcgaaaggtggcgtggtgggaatcaaggtggacaaaggggtggtcccgctggcggggaccaacggcgagacgaccactcagggcctcgacggcctgtccgagcggtgcgctcagtataagaaggatggagccgacttcgccaagtggcggtgcgtcttgaagatcggggagcacaccccatcagcgcttgcaatcatggaaaacgccaatgtcctggcaagatacgctagcatctgccagcagaatggtatcgtccctatcgtggaaccggaaattcttcccgatggtgaccacgaccttaagcgttgtcagtacgtgactgaaaaggtgctggctgctgtgtacaaggccttgagcgaccaccatatctaccttgagggcactctcctcaagcccaacatggtgaccccgggacacgcctgcactcagaaattctcacatgaggagatcgccatggccaccgtgactgcgctgagacggactgtgccgcctgctgtgaccggaattaccttcctctcaggaggacagtcagaagaagaagcgtcgattaacttgaatgcgatcaacaagtgtcccctgctcaaaccgtgggccctcaccttctcgtacggccgggcgctgcaagcgtcagccctgaaggcttggggagggaagaaagaaaatctgaaggccgcgcaggaagaatacgtcaagcgggcgctggctaactcgctggcttgccaagggaagtacactcctagcggccaggccggagccgctgcatcggaatcgctcttcgtgagcaaccacgcttat

SEQ ID NO: 5824 - DNA, 1092 bp, synthetic construct
  misc_feature 1..1092: note = source = /note="Description of Artificial Sequence: Synthetic coding sequence"
  source 1..1092: mol_type = other DNA
atgccgtaccagtacccagccctgacccctgagcagaaaaaagagctgtctgatattgcgcatcggatcgtcgcaccaggaaagggaatcctcgctgcagatgaatcgaccggaagcatagccaagcgattgcaatcaataggtactgagaatacggaagaaaataggcggttctaccggcagctcctgcttaccgcagatgatagagtgaacccatgtataggcggtgtgattctgtttcacgaaaccctgtaccaaaaggcagatgatggacggccttttccacaagtgatcaaatcgaagggtggcgtcgtcggcatcaaggtggacaagggtgttgtgcctctcgcaggaaccaatggggaaactactacccagggactggatgggttgtcggaacggtgcgcacaatacaagaaggatggggccgattttgccaagtggcgatgcgtgcttaagatcggagagcacacgccctccgctctggctattatggaaaatgcaaatgtcctggcgcgttacgcaagcatttgtcaacagaacggaatcgtccctatagtggaaccagaaatccttcccgacggggaccatgatttgaagcgctgccaatacgtaaccgaaaaggtgcttgccgcggtgtacaaggctctttcggaccaccacatatatcttgaggggaccctcttgaagccaaacatggtgacgcccggtcacgcatgtactcaaaagttctcgcatgaggagatcgccatggcaactgtcacggcgctgaggaggactgtcccccctgcagtgactggcatcacgtttctctcaggtggacagtccgaagaggaagcaagcataaatctcaacgctatcaacaagtgtcctcttctgaaaccatgggcacttactttctcctacggccgagctctgcaggcatccgcccttaaggcttggggtggcaagaaagagaacctgaaggcagcacaagaagagtacgtgaagcgtgcactcgcaaactcccttgcatgtcaaggtaaatacaccccctccgggcaagcaggcgccgcagcatctgaatcgctgtttgtgtccaaccacgcctac

SEQ ID NO: 5825 - DNA, 1092 bp, synthetic construct
  misc_feature 1..1092: note = source = /note="Description of Artificial Sequence: Synthetic coding sequence"
  source 1..1092: mol_type = other DNA
atgccctatcagtatcctgcgttgactcctgaacaaaaaaaagagctgtccgatatcgcacatagaatcgtggcacccggcaaaggaatcctggctgccgacgagtccacgggatcaatcgcgaagcgcctgcagtcgatcggtactgagaatacagaagaaaacagacgcttttaccgtcagctgctgctaaccgctgatgacagagtgaacccgtgcataggtggggtcattctgtttcacgagaccctgtatcaaaaggcagacgacggtcgccccttcccgcaagtgataaagagcaagggaggggtggtaggtatcaaggtggataaaggggtcgtgccccttgccggaaccaatggtgaaactactactcagggtttggacggtctgtcggaacgatgtgcacagtataagaaagatggagccgactttgctaaatggaggtgcgtgctgaagatcggtgaacatacccctagtgccttggccatcatggagaatgcaaacgtgctggcccggtacgcctcgatatgccagcagaacggtattgtacccattgtcgagccggagattttaccggatggggatcatgatttgaagagatgtcaatacgtgaccgagaaggttctggccgccgtctacaaggctctgagcgaccatcacatctacctggagggcacccttctgaagcccaacatggtcacacccggacacgcatgcacccagaaattttctcatgaggaaattgccatggctacggttaccgctctgcgacgaacagtacccccagccgtgaccggaattactttcctgtctggcgggcagtctgaagaagaggcctctatcaacctaaacgctatcaataaatgtccgctacttaagccctgggccctgacattctcctatggaagggctctgcaagcctcggccttgaaggcttggggggggaagaaagagaacctcaaggccgcccaggaagagtatgtcaagcgcgctttagccaattcactggcctgtcaagggaaatacacccctagcggacaggcgggggctgcagcttctgaaagcctgttcgtgagcaaccacgcatac

SEQ ID NO: 5826 - DNA, 1092 bp, synthetic construct
  misc_feature 1..1092: note = source = /note="Description of Artificial Sequence: Synthetic coding sequence"
  source 1..1092: mol_type = other DNA
atgccctaccagtaccctgccctcacccctgaacagaaaaaagagctctccgatatcgcacacaggattgtggctccaggcaagggcatccttgctgcggacgagtctaccggatccatagctaagagactgcagtcgattggaaccgaaaacaccgaggaaaatagacgtttttaccgtcaattgcttctgaccgcagatgatagagtcaatccatgtatcggaggagtgattctttttcacgaaaccctttaccaaaaggcagatgacggcaggccatttccccaggtgatcaaaagtaaaggaggtgtggtgggaatcaaggtcgataaaggtgtggtgcctcttgcgggaactaacggagaaactactacgcagggtcttgatggtctgtcggagagatgtgcacaatacaagaaggacggcgccgatttcgcaaagtggcgctgtgtgctgaagataggtgaacatactccctccgcactcgcaataatggaaaatgcaaatgtgcttgccagatacgcttccatatgtcagcaaaacggtatagttccgattgtcgagcctgaaattctgcccgatggtgaccacgatctgaagcgatgccaatacgtcactgaaaaggtgcttgcagcagtgtataaagcactctcggaccatcatatctacctcgaaggtaccctgctcaaacctaacatggtgacccctggtcacgcatgcacgcagaagttttcccacgaagaaattgctatggccaccgtgaccgccctgcggcggactgtgcctccagcagtgactggcatcaccttcctgtcaggaggtcaatcggaagaagaagcatccattaatctcaacgcaatcaataagtgtcctctgctgaaaccttgggcactcacttttagctacggtagagcgctgcaggcgtcagcacttaaggcttggggaggcaaaaaagagaaccttaaggccgcccaggaagaatacgtgaagcgagcgctggcgaattccctcgcctgtcaaggaaagtacactccatccggacaagccggagccgcagcatcggagtcgttgttcgtgtccaatcacgcatac

SEQ ID NO: 5827 - DNA, 1092 bp, synthetic construct
  misc_feature 1..1092: note = source = /note="Description of Artificial Sequence: Synthetic coding sequence"
  source 1..1092: mol_type = other DNA
atgccctatcagtatccagccttgactccagagcagaaaaaggagctctcagacattgctcacaggatagtggcgcctggtaagggtatcctggctgcggacgaaagcacgggtagcatcgccaaacgcctacagagtattggcacggaaaacaccgaggagaacaggcgattctaccgccagctgctgctaacagcagacgatcgggttaatccctgcattggaggagtgatcctgttccatgagactctttaccaaaaagccgacgacggccgcccatttccacaggtaatcaagtccaagggaggtgttgtgggcattaaagtggataaaggcgtcgtgcctcttgcagggacaaacggagagactacaacacaggggctggatggcctgagtgagcgatgcgcccagtataagaaagatggcgctgatttcgccaagtggagatgcgtacttaagatcggcgagcataccccctctgctctcgccattatggagaacgccaacgtcctggcccgctacgcttctatctgtcagcagaacgggatcgtgcctatcgtcgagccagagatcctgccagatggcgaccacgatctgaagaggtgccagtatgtaacagaaaaggtacttgctgctgtctacaaagcactgtctgaccatcacatctacctcgaagggactcttcttaaaccaaacatggtgaccccgggacacgcttgcacccagaagttttcacatgaagagatagccatggccaccgttacagccctaagacgcacggtgccacccgcggtaacaggcattacatttttgtccggcggacaatctgaagaagaagcgagtatcaatctgaacgcaatcaacaaatgcccactgcttaagccctgggcactaaccttttcctacgggcgtgcactgcaggcatcggccttgaaggcatggggtggtaagaaagagaatctaaaagctgcacaggaagagtacgtgaaacgggctctggctaacagcctggcttgtcagggaaaatatacccccagtgggcaagctggtgcagcagcatctgaatccctgttcgtttctaaccacgcctac

SEQ ID NO: 5828 - DNA, 1092 bp, synthetic construct
  misc_feature 1..1092: note = source = /note="Description of Artificial Sequence: Synthetic coding sequence"
  source 1..1092: mol_type = other DNA
atgccatatcagtatcccgccctgacccccgagcagaaaaaggagctgtccgacattgcgcaccggatcgttgcccctggcaaaggcatactggctgcagacgagagcacaggatctatcgctaagcgcttgcaaagcatcggtacagagaacacggaggagaatagacgtttttatcggcaacttttgctgaccgctgatgatcgagttaatccctgcataggtggcgttattctattccatgagactctctaccagaaggctgacgacggacgtcctttcccccaggtcattaagagcaaaggaggcgtagtcggaattaaagttgataaaggcgttgtcccacttgccggaaccaacggtgagacaaccacccaaggccttgatgggttgtcagagcgctgcgctcagtacaagaaggacggcgcagacttcgccaaatggcggtgcgtcctgaagatcggcgagcacacccccagcgcattggccatcatggagaatgccaatgttctggcgcggtacgcttccatatgtcagcagaatggaatcgttcctattgtggagcccgaaatcctcccagacggtgaccatgacctaaagcgatgccagtacgtcactgaaaaagtgctcgccgcggtttacaaagctctgagcgaccaccacatctacctagagggcactctgctgaagccgaacatggtcacccccggccacgcatgcacacagaagttcagccacgaagaaattgctatggccactgtgacggcactacgaaggaccgttccaccagccgtgactggcatcactttcctgtccggcggacagagcgaggaagaggcatccattaatctgaatgctattaacaaatgcccactgctgaaaccctgggctctgaccttttcttacggtcgcgcgcttcaggcatctgccctgaaagcttggggcggcaagaaggagaacctgaaagcagcccaggaagagtacgtgaagcgggcgttagccaattctctggcctgccagggaaaatacaccccatccgggcaggcgggcgccgccgcgtctgaaagcttgttcgtttcaaatcacgcatac

SEQ ID NO: 5829 - DNA, 1092 bp, synthetic construct
  misc_feature 1..1092: note = source = /note="Description of Artificial Sequence: Synthetic coding sequence"
  source 1..1092: mol_type = other DNA
atgccttatcagtaccccgctttgacgccagaacagaagaaagaactctctgatatcgcccacagaatagtggccccagggaaaggaatccttgctgcggatgaatcaacaggatctatcgcaaagaggctgcagtctatcggaactgaaaatactgaggaaaatcgcaggttttatcgacagttattactcacagccgatgaccgtgtgaacccttgtattggaggggttatattgtttcacgaaacactgtatcagaaagcggatgacgggcggccctttcctcaggtaatcaagtcaaaagggggggtggtggggatcaaagtggacaaaggagttgtaccactagccgggacaaatggggagacaacgactcaagggctggacgggctgtcagaacggtgtgcccaatataaaaaagatggggcagatttcgctaagtggcggtgtgtacttaaaataggggagcacactccctccgcgctggccatcatggaaaatgctaacgtccttgcaaggtatgcatctatctgccagcagaatggaatcgtacccatcgtggaacctgagatcctgcccgatggagatcatgacctcaaaagatgccagtatgttacagaaaaagtcctggccgcagtatataaagctctgtctgatcatcacatatacctagaagggacactgctgaaacccaatatggtgacacctgggcacgcctgcactcaaaaattttcccatgaagagattgccatggccacagtaacagctctgcgacggactgtgccacccgccgtgacaggaatcacatttttgtcaggggggcagtcagaagaagaagcatctatcaatctgaatgcaatcaataaatgtccccttctcaaaccctgggcactgacattttcctacgggagggctcttcaggcttcagctttgaaagcctggggaggaaaaaaagaaaatcttaaggctgcccaggaagaatatgtcaaaagggcgctcgcgaactccctggcatgtcagggaaaatatactccctccggacaggccggggctgccgcctccgaatctctctttgtttctaatcacgcttac

SEQ ID NO: 5830 - DNA, 1092 bp, synthetic construct
  misc_feature 1..1092: note = source = /note="Description of Artificial Sequence: Synthetic coding sequence"
  source 1..1092: mol_type = other DNA
atgccgtatcaatatccggcgctaacgccggaacaaaaaaaagaactatcggatatagcgcatcgaatagtagcgccgggtaaaggtatattagcggcggatgaatcgacgggttcgatagcgaaacgattacaatcgataggtacggaaaatacggaagaaaatcgacgattttatcgtcaattattattaacggcggatgatcgtgtaaatccgtgtataggtggtgttatattatttcatgaaacgctatatcaaaaagcggatgatggtcgtccgtttccgcaagtaataaaatcgaaaggtggtgtagtaggtataaaagtagataaaggtgtagtaccgttagcgggtacgaatggtgaaacgacgacgcaaggtctagatggtttatcggaacgttgtgcgcaatataaaaaagatggtgcggattttgcgaaatggcgatgtgtattaaaaataggtgaacatacgccgtcggcgctagcgataatggaaaatgcgaatgttctagcgcgatatgcgtcgatatgtcaacaaaatggtatagtaccgatagttgaaccggaaatactaccggatggtgatcatgatttaaaacgttgtcaatatgttacggaaaaagtattagcggcggtatataaagcgttatcggatcatcatatatatctagaaggtacgttattaaaaccgaatatggtaacgccgggtcatgcgtgtacgcaaaaattttcgcatgaagaaatagcgatggcgacggtaacggcgttacgacgtacggttccgccggcggttacgggtataacgtttctatcgggtggtcaatcggaagaagaagcgtcgataaatttaaatgcgataaataaatgtccgttattaaaaccgtgggcgctaacgttttcgtatggtcgagcgttacaagcgtcggcgttaaaagcgtggggtggtaaaaaagaaaatttaaaagcggcgcaagaagaatatgtaaaacgtgcgttagcgaattcgttagcgtgtcaaggtaaatatacgccgtcgggtcaagcgggtgcggcggcgtcggaatcgttatttgtatcgaatcatgcgtat

SEQ ID NO: 5831 - DNA, 1092 bp, synthetic construct
  misc_feature 1..1092: note = source = /note="Description of Artificial Sequence: Synthetic coding sequence"
  source 1..1092: mol_type = other DNA
atgccatatcagtaccctgcactcaccccagagcaaaaaaaggagctgagcgatatcgcccaccgcatcgtagctcccggcaaggggattctggctgccgacgagagcactggcagcatagccaaaagactccagtccatcggaaccgagaacaccgaagagaacaggaggttctaccggcaactgttgctaaccgcagacgaccgcgtgaacccatgcatcggcggagtcatactgttccatgagactctgtaccagaaagccgatgatggacgcccttttcctcaagtgatcaaaagtaaagggggcgtggtgggcatcaaggttgacaagggcgtggttcctctggctggcacaaatggcgagacaaccactcaaggcctcgatggcctgagcgaacggtgcgcacagtacaagaaagatggcgcagacttcgcaaagtggagatgcgttcttaagatcggagagcacaccccaagtgcactggctattatggagaacgccaatgtgctggcaagatacgcctccatatgccaacagaacgggatagttccaatcgtcgagccagaaatccttccagacggagaccacgacctgaagcgatgccagtacgtcaccgagaaagtccttgcagctgtgtacaaagctctgagcgaccaccatatatacctggagggcacgctgctgaaacccaacatggtgaccccaggccacgcctgcacccagaaattttcgcatgaggaaatcgctatggctacagtaaccgctcttaggcggactgttccccctgcagtcactggcatcactttcctgtccggcggtcagtctgaagaggaagcctccataaacctgaacgctatcaacaagtgcccactgttgaagccttgggcacttacattcagttacggccgggctctccaggccagcgctttgaaagcatggggaggcaaaaaagaaaacttaaaggccgcacaagaagaatacgtcaagagagccctggctaactccctggcgtgccaagggaagtataccccaagcggacaagcaggggcggcagcctcggaaagtctcttcgtaagtaatcacgcttac

SEQ ID NO: 5832 - DNA, 1092 bp, synthetic construct
  misc_feature 1..1092: note = source = /note="Description of Artificial Sequence: Synthetic coding sequence"
  source 1..1092: mol_type = other DNA
atgccttatcagtatcctgctctgactcctgagcaaaagaaagaactgtccgacatcgcccacaggattgtagccccgggcaagggcatccttgcggccgatgagagcaccggaagtatcgccaagagacttcagagcatcggaaccgagaatacagaagagaatcgccgcttctaccgacagctcctcttaaccgctgacgatcgggtcaatccctgtatcggaggagtcattctctttcatgaaacgctgtaccagaaagccgatgacggccgccccttcccccaagtgatcaagtctaagggcggagtggtgggcatcaaggtagacaaaggggtagtgcctttagccggcacaaatggagagactaccacacagggtttggatggacttagcgagcgttgcgcacaatacaagaaagacggcgcggactttgctaaatggcgctgcgtcctaaagatcggagaacacaccccgtcagctttagccatcatggagaacgccaacgtgctggctcggtatgccagcatctgccagcagaatggtattgtacctattgtcgaacctgagatattacctgacggcgaccacgaccttaagcgttgccaatatgttacagagaaggtgttggcggccgtttacaaggctttgtctgaccaccacatctaccttgagggcacattactgaaacccaacatggtgacacccggccatgcttgtacccagaagttttctcacgaagagatagcaatggctactgtgaccgctctgagaagaactgtcccccctgcagtgaccggtattactttcctgagtggtggccagtctgaggaagaggcgtcgattaatctgaacgcgatcaataagtgtccgctgctcaaaccctgggcactgacattttcttacggccgagcgttgcaagcaagtgccttaaaggcctggggtgggaaaaaggaaaaccttaaagcagctcaggaagagtacgtgaagagagccttggcaaactctctggcatgtcaagggaaatacacacccagcggccaagctggagcagcagcttctgaaagcctgtttgtcagcaaccacgcatac

SEQ ID NO: 5833 - DNA, 1092 bp, synthetic construct
  misc_feature 1..1092: note = source = /note="Description of Artificial Sequence: Synthetic coding sequence"
  source 1..1092: mol_type = other DNA
atgccgtaccaatatccggccctcactccagaacaaaagaaagaactgtcggatatcgcccacaggattgtagcaccgggtaaaggaattttggcagcagacgagtcgaccggttccattgccaaacggctgcagtctatcggaactgagaataccgaagaaaacaggaggttctacaggcaacttctcctgaccgccgatgaccgcgtgaacccatgcattggcggagtcatcctctttcacgaaactctttaccagaaggcagatgacggacggcccttcccacaagtgatcaagtcgaaggggggcgtggttgggatcaaagtcgataagggggttgtccccctggccggcactaatggagaaaccaccacgcaagggcttgacggtttgtccgaaagatgcgcccagtacaagaaagacggagccgattttgccaagtggcgctgcgtgctcaagatcggagaacataccccttcggcgctggctatcatggagaacgcaaatgtgctggcacgctatgccagcatatgtcaacaaaacgggatcgtgccaatcgtggagccggaaattcttccagacggagatcacgacctcaagagatgtcagtacgtcaccgagaaggtgctggccgccgtgtataaagcgctctcggaccaccacatctacctggaaggaactctgcttaagccgaacatggtcaccccaggacatgcctgtactcagaagttcagccatgaagaaatcgcgatggccactgtgactgccctcagacggacggtgccgccagccgtgacgggaatcactttcctgtcaggaggccagtcggaggaggaagcatcaatcaatctcaatgccatcaacaaatgcccacttctgaagccttgggctctgaccttctcctacggacgtgccctccaggcttcagcactgaaagcctggggagggaagaaggagaaccttaaggccgctcaggaagaatacgtgaaacgcgccctcgcgaatagcctcgcatgtcaaggaaagtacaccccgtcgggacaggccggagctgcggcgtccgaatcactcttcgtgtcgaatcacgcctac

SEQ ID NO: 5834 - DNA, 1092 bp, synthetic construct
  misc_feature 1..1092: note = source = /note="Description of Artificial Sequence: Synthetic coding sequence"
  source 1..1092: mol_type = other DNA
atgccgtaccagtacccggcgctgaccccggaacagaaaaaggagctgtccgacatcgcccatcggatcgtcgcaccggggaagggaatcctggcggccgatgagtcaactggaagcatcgccaaacggctgcagtccatcggcaccgaaaatactgaagagaatcgccgcttttaccgccagctgcttctcactgctgatgatcgcgtgaacccctgtatcggtggagtgattctgtttcacgagacgctctaccaaaaggccgatgacggacggccatttccccaggtgatcaaatcaaaggggggagtcgtgggcatcaaagtggacaaaggtgtcgtgccgctggcgggaacgaacggcgaaaccactacccaaggtcttgacggactgtccgaacgctgcgcccagtacaagaaggacggggctgatttcgcgaagtggcgctgtgtgctgaagatcggcgagcacaccccttccgcattggcaatcatggaaaatgctaacgtgctggcgcggtacgcatcgatctgtcaacagaatggaatcgtgccgattgtggaaccggagatccttccagatggagatcacgatttgaagcggtgccagtacgtgaccgaaaaagtgctcgctgcagtgtacaaggcactgtccgaccatcatatctacctcgaggggactctcctgaaaccaaatatggtgactccggggcacgcatgcacccagaagttctcgcatgaggagattgctatggccactgtgaccgcgttgcgccgcaccgtgccgccggcggtcactggaatcactttcctctcaggaggacagtcggaggaagaggcatccatcaacctgaatgccatcaataagtgcccgctcctgaagccttgggccctcactttctcctatggacgggctctccaggcctcggcgctgaaggcatggggaggcaagaaggaaaacctgaaggcagcccaggaggaatacgtcaaacgagccctcgccaactccctggcttgccagggaaaatacaccccgtcgggccaggccggagcagccgcgtcagagtccctgttcgtatccaaccacgcttac

SEQ ID NO: 5835 - DNA, 1092 bp, synthetic construct
  misc_feature 1..1092: note = source = /note="Description of Artificial Sequence: Synthetic coding sequence"
  source 1..1092: mol_type = other DNA
atgccataccaatacccagccctgaccccagagcaaaagaaggaactctcggacatcgcacacagaattgtggccccaggaaaaggtatcctggccgctgatgaatccactggctccatcgcgaagcggctgcagagcattggcaccgaaaataccgaagagaatcggcggttctataggcagctcctcctcactgccgacgaccgcgtgaatccgtgtatcggaggagtcattctttttcatgaaaccctgtaccaaaaagccgacgatggacggccttttcctcaagtgataaagtcaaaaggaggagtcgttgggatcaaggtcgataagggcgtggtccctctggcagggaccaacggagaaacgaccacccaagggctggacggactttcagaacgttgcgcccagtacaaaaaggatggtgccgatttcgccaagtggcgatgcgttttgaaaatcggagaacacaccccgtcggcactggccatcatggaaaacgccaatgtgctggccagatacgcgtcgatctgccagcagaacggcattgtgccaatcgtcgagccggagatcttgccggacggtgatcacgatctgaagagatgccaatatgtgactgaaaaagtcctcgcggcggtgtacaaagcgctctcagaccatcatatctatctggagggaacgctgttgaagccgaacatggtgacccccggacacgcttgcacccagaagttctcccacgaagagattgcaatggcaactgtgaccgctctgcgtcgcaccgtgccacccgccgtgaccggaatcacgtttctgtccggcgggcaaagcgaagaggaagcatcgatcaacttgaatgccattaacaaatgccctctcttgaaaccttgggcccttactttctcatacggacgggcactccaggcgtctgccctcaaggcgtggggtgggaagaaggaaaacctcaaggcggcacaggaggagtacgtgaagcgcgccctcgcgaactctctggcctgtcagggcaagtacactccgtctggacaggctggtgcagcggcttcggaaagccttttcgtgagcaatcacgcttac

SEQ ID NO: 5836 - DNA, 1092 bp, synthetic construct
  misc_feature 1..1092: note = source = /note="Description of Artificial Sequence: Synthetic coding sequence"
  source 1..1092: mol_type = other DNA
atgccataccaataccccgcacttacccctgagcaaaagaaggaactctccgacattgcacatagaattgtggcacctggaaaaggaatccttgcagcagacgaatccaccggaagcattgctaaaagactccagtcgatcggaaccgagaacaccgaagaaaacaggagattctaccggcaacttctgttgactgcagacgaccgtgtcaacccttgtatcggcggagtgattctgttccatgagactctgtaccagaaggcagacgatggccggcctttccctcaagtgattaagtcgaagggtggagttgtaggtattaaggtggataagggggtcgtgccccttgcaggcactaatggtgaaactaccactcagggactcgatggactttcagaaaggtgtgcgcaatacaaaaaggacggggcggacttcgcaaaatggcgatgtgttctcaagatcggagaacatactccctccgccctggcaattatggaaaacgctaatgtgctggcgcgatatgcatcaatttgccagcagaacggtattgtgcccatcgttgaaccagagattctgccagatggcgaccatgatcttaaaaggtgtcagtacgtgactgaaaaagtgctggcggcagtctacaaggccctctcggaccaccatatctatcttgaaggaacccttctcaagcctaatatggtgaccccggggcatgcttgcactcagaagtttagccacgaagaaatcgcaatggctactgttacggcactgcggcggaccgtccctcctgcagtgactggaataaccttcctgtccggtggacaatcggaggaagaggcatcgataaatctgaacgccattaacaaatgtcctctgctgaaaccatgggccctgacttttagctatgggagggcactgcaagcaagcgcccttaaggcatggggaggtaagaaggaaaatctgaaggccgcccaggaagagtacgtcaagagggcacttgcgaatagcctggcgtgccagggaaaatacacgcctagcggtcaggcaggtgcagcagcctccgaatcgctgtttgtgtcgaaccacgcatat

SEQ ID NO: 5837 - DNA, 1092 bp, synthetic construct
  misc_feature 1..1092: note = source = /note="Description of Artificial Sequence: Synthetic coding sequence"
  source 1..1092: mol_type = other DNA
atgccataccagtaccctgccctgactccggaacagaagaaggagctcagcgacatcgcgcatcgcatcgtcgccccagggaaaggaatcctggcagctgacgaatcaaccggatcgatcgctaaacgcctgcaatccatcgggaccgagaacaccgaggagaaccggcgcttttacaggcagctgctcctcaccgcagacgatagagtgaatccctgcatcggaggtgtcatcttgttccatgaaaccttgtatcaaaaagcagacgatggacgacctttcccgcaggtgatcaagagcaagggaggcgtcgtgggaatcaaggtggataaaggggtggtgccattggctggtaccaacggcgagacgaccactcaagggctggacggactgagcgaacggtgcgcccaatacaagaaggacggtgccgattttgccaaatggcgctgcgtgctgaagatcggggaacacaccccgtcggcccttgcgatcatggagaacgcaaacgtcctggcccggtacgcttcaatctgccaacaaaatggtatcgtcccgattgtggagccagagattctcccggatggggatcatgacttgaaacgatgtcagtacgtcaccgagaaggtgctcgcggcggtgtacaaggccctctccgaccaccacatctaccttgagggaaccctgctgaaaccgaacatggtcactccaggacacgcttgcacccaaaagttcagccatgaagagatcgcgatggctaccgtgaccgctcttcgccgcactgtgcctccagctgtaactggaatcacgtttctgtcagggggccagtcagaagaagaggcatccatcaatcttaacgcgatcaacaaatgtccactgctgaagccgtgggcgctgaccttttcatacgggcgggcgctgcaggcgtcggccctcaaggcttggggaggcaagaaggaaaatctgaaagcggcgcaggaggaatatgtgaagcgcgccctggccaactcgctcgcctgccaaggaaagtacacccctagcggacaggcaggcgcagctgccagcgagtcacttttcgtgagcaatcatgcgtac

SEQ ID NO: 5838 - DNA, 1092 bp, synthetic construct
  misc_feature 1..1092: note = source = /note="Description of Artificial Sequence: Synthetic coding sequence"
  source 1..1092: mol_type = other DNA
atgccttaccagtacccagctctgaccccagaacagaagaaagagctttccgatatcgcccatcggatcgtagcacccggcaaaggaatactagcggctgacgaaagcacggggagtatcgccaagcgactccagtctatcggcactgagaacacggaagagaataggaggttctataggcagctcttacttaccgccgatgatcgggtcaatccgtgtatcgggggtgtgatcctttttcacgaaacactgtatcagaaggcagatgacgggcgacctttccctcaagttatcaagagcaaaggtggcgtcgtaggcattaaagttgacaaaggagttgttcccctcgctggcactaatggcgagaccacaacacagggactggatggcctgtcagagcgctgcgctcagtacaaaaaagacggagccgacttcgcgaagtggcggtgcgtcttaaagatcggtgaacacaccccatctgccctggctattatggaaaacgcaaatgtcctggccagatacgcctcgatctgccagcagaacggcattgtgcccatcgttgaaccagagattctccccgacggggatcacgaccttaagcgttgtcagtacgttactgaaaaagttctggctgccgtctacaaagccttgtccgatcaccatatttaccttgaaggaacacttctgaagccaaatatggtgacgccaggtcacgcctgtacccagaaatttagccatgaagagattgccatggctaccgttaccgctctaagacgtactgttccacccgcagtgacaggcattaccttcctcagcggtggacagagcgaggaggaggccagcatcaacttgaacgcgattaacaagtgcccattgctgaagccttgggctctcactttctcgtacgggcgagccctccaggcttctgccctgaaggcgtggggtggtaagaaagaaaatttgaaggcggcacaggaggagtacgtgaaacgtgccctcgccaactcactcgcctgtcagggcaagtacactccatcgggccaggccggagccgcagcttcggaatctctcttcgtgtccaaccacgcttat

SEQ ID NO: 5839 - DNA, 1092 bp, synthetic construct
  misc_feature 1..1092: note = source = /note="Description of Artificial Sequence: Synthetic coding sequence"
  source 1..1092: mol_type = other DNA
atgccttatcaatatccggctttgactccagaacaaaagaaggagctgagcgatatcgctcacaggatcgtggcccccgggaagggtattctggccgccgatgagagtaccggatcgatcgcaaagaggcttcaatcaatcgggactgagaacacagaggagaaccgacgcttctaccggcagctgctgctgaccgcggatgatcgagtcaatccatgcatcgggggtgttatattgtttcacgaaacactctatcagaaggccgatgatggacgtccattccctcaggtgataaagtcaaagggcggggttgtagggatcaaggtcgacaagggagtagtaccactggctggtacaaatggcgagacaacaacccaaggtctggacgggctgtccgaacggtgtgcccaatacaagaaagacggagccgactttgccaaatggaggtgcgtgctcaagattggtgagcacactccgagcgctctggctatcatggaaaacgctaacgtcctggctaggtatgcctctatttgtcagcagaacgggattgtacctatcgtggagccggaaatactgccagacggtgaccacgacttaaagcggtgtcagtatgtcactgaaaaggtgttagccgccgtgtacaaggcattgtcagatcaccacatttacctggaggggacccttctgaagcctaatatggtgaccccgggccacgcctgtactcagaagttctctcacgaagagattgccatggccaccgtcacagctctgcggcgcacggtccctccagcggtaaccgggatcaccttcttatcgggcgggcaatctgaagaagaagccagtattaacctgaacgctatcaataaatgccccctgttgaagccttgggcgctgacgtttagttatggccgggccctgcaggcctctgcattgaaggcttggggcggaaagaaggaaaatctcaaagccgcgcaggaggaatatgttaaacgagctcttgctaactctctggcctgtcagggaaagtatactcccagtggccaggcaggtgccgccgcctctgaatcactgttcgtgtcaaatcacgcctat

SEQ ID NO: 5840 - DNA, 1092 bp, synthetic construct
  misc_feature 1..1092: note = source = /note="Description of Artificial Sequence: Synthetic coding sequence"
  source 1..1092: mol_type = other DNA
atgccctaccaatacccagccctgactcccgagcagaaaaaagagctgagcgatatcgcacaccggattgtggccccaggaaaaggcattttagctgccgatgaatctaccgggtcaattgccaagcgactccagagcattgggaccgagaatactgaggagaacaggaggttctacagacagctgctcctgactgctgatgaccgggtgaacccctgtattggtggggtcattctgtttcacgagaccctctatcagaaagccgacgacggcaggcccttcccccaagtgatcaaatctaaaggtggggtcgtggggattaaggtggacaagggggtggtgcctttagcagggactaacggagagaccacaactcagggcctcgatggtctctccgagagatgtgcccagtacaagaaggatggagccgacttcgccaagtggcggtgcgtgctaaaaatcggtgaacatacgccctccgccctcgctattatggagaacgctaatgtgttggccagatatgcgtctatctgccagcagaacggtattgtcccaattgtggagcccgaaattcttcctgacggtgatcacgatctgaagagatgtcagtacgtcacggagaaggtgctggccgctgtatacaaagccctcagcgaccaccacatttaccttgaaggaactctgctcaagccgaatatggtgaccccaggccatgcgtgcacgcagaaattctctcacgaggaaatcgcgatggcgacagtgaccgccctgcgtcgaacagtaccaccagctgtgacgggaataacctttctcagtggtgggcagagtgaagaggaggcgagtatcaatctcaatgctatcaacaaatgcccgctcttgaagccctgggccctgaccttttcctatggtagagctcttcaggcttctgcccttaaggcttggggtggaaagaaggaaaacctaaaagctgctcaagaggagtatgtaaagcgggcattggccaacagcttggcatgtcagggaaagtacacccctagcggtcaggccggggctgctgcatcagagagcctcttcgtatctaatcacgcctac

SEQ ID NO: 5841 - DNA, 1092 bp, synthetic construct
  misc_feature 1..1092: note = source = /note="Description of Artificial Sequence: Synthetic coding sequence"
  source 1..1092: mol_type = other DNA
atgccatatcaatacccagctctgactccagagcaaaaaaaggaattgtctgacattgcacatagaatcgttgcacctggtaagggaatcttggctgctgacgagagcacaggatccattgctaagaggttacaatctatcggaactgaaaataccgaggagaatcgtaggttttacagacagctcttgctcaccgctgatgatagagtcaatccctgcataggaggtgtgatcctgttccatgaaactctctaccaaaaagcagatgatggacggccgttcccccaagttattaagtcaaagggaggagttgtagggataaaggttgataagggcgtggtcccattggccggaacaaatggagaaacaaccactcagggattagatggactttctgaacgatgcgcccagtacaagaaagatggcgcagattttgctaaatggcgttgtgttctcaagatcggagaacatactcctagcgcattggcgattatggagaatgctaacgtgctcgcccgatatgcttctatttgtcagcagaatggaattgtgccgattgttgaaccagagattctaccagatggtgatcacgaccttaaaagatgccaatatgtcacagaaaaagtgcttgcagcagtgtacaaagcgctgtcagaccatcacatttacctagagggcacactgttaaaaccaaacatggttacaccagggcacgcatgtacacagaaattttcgcatgaagagattgctatggccacagttactgctcttagacgaacagtgccgccagcggttacaggaattacctttctttcaggaggtcagtccgaagaagaagcatctatcaatctcaacgcgattaataaatgtccgttactcaagccgtgggctctcacattttcatatggaagagctctccaggcctccgctctcaaagcttggggaggaaaaaaagagaacctaaaggccgctcaagaagagtacgttaaaagagccctagctaattctcttgcttgtcaaggtaaatatactccatccggacaagcaggggctgcagcttcagagagccttttcgtttcaaaccacgcctat

SEQ ID NO: 5842 - DNA, 1092 bp, synthetic construct
  misc_feature 1..1092: note = source = /note="Description of Artificial Sequence: Synthetic coding sequence"
  source 1..1092: mol_type = other DNA
atgccataccagtaccccgcgctcactccagagcagaaaaaggaactctccgatatcgcccaccggattgtggctccgggaaagggtattctggctgcagatgaatccaccgggtcaatcgcaaagcgcctgcagagcatcggtactgaaaataccgaggaaaaccgaaggttctaccgccaactcctgttgactgcagatgaccgggtcaacccgtgtatcggtggagtgattctgttccacgaaactctttaccagaaggccgatgacggccgcccgttccctcaggtgatcaagtcgaagggcggagtggtcggaatcaaagtggataagggagtggtgcctctggcgggaaccaatggtgaaaccacgacgcagggactcgatggactctcagaacgctgcgcacagtacaagaaggacggagcagacttcgccaaatggcggtgcgtcttgaagatcggcgagcatactccctccgccctcgccatcatggaaaacgctaatgtcctcgcgcgctacgcctccatctgccagcaaaatggtatcgtcccaattgtggagccagaaatcctcccggatggcgatcacgacctgaagaggtgtcagtacgttaccgagaaagtgttggccgctgtgtacaaggccctgagcgaccaccacatttatctcgaggggaccctgctcaagcccaacatggtgactcctggacacgcttgcacccagaagttctcgcacgaagagatcgctatggcgaccgtgaccgccctgcgccggacggtgcctcctgccgtcaccgggatcaccttcctctcgggaggacaatccgaagaagaggcgtccatcaatctgaatgcaattaacaagtgccctttgctgaagccatgggcgctgactttctcatacggaagagcgctgcaggcatcggccctgaaggcgtggggaggaaaaaaggaaaaccttaaggccgctcaggaggagtacgtgaagcgggctctcgcgaattccctggcgtgtcagggaaagtacaccccgtcgggacaggcaggtgcagcagcatcggaatcgctctttgtgtcgaaccacgcgtac

SEQ ID NO: 5843 - DNA, 1092 bp, synthetic construct
  misc_feature 1..1092: note = source = /note="Description of Artificial Sequence: Synthetic coding sequence"
  source 1..1092: mol_type = other DNA
atgccctaccaataccccgctctcacgcccgagcaaaagaaagagctttcggatatagcacatcggattgtcgcgccaggtaagggcatccttgcggctgacgagagcacgggatccattgccaagcgactgcaatccatcggtactgaaaatactgaagaaaatcgccgcttttacagacagctccttctgaccgcggatgatagagtgaatccatgtatcgggggcgtgatactgttccatgaaaccttgtaccagaaggccgatgacggccgaccatttccacaagtgataaagtcgaagggaggagtggtgggcatcaaggtggataagggagttgttcctctcgctgggaccaacggagaaaccactactcaggggcttgacgggctctcggaaagatgtgcgcagtacaaaaaggacggagccgacttcgctaagtggaggtgtgtcttgaagattggtgaacacactccatcagcacttgcaatcatggagaacgccaacgtgctggcacggtacgcatctatttgtcagcaaaacggtatcgtgcctattgttgaacctgaaatcctccccgatggggaccacgatcttaaaagatgccagtacgtgaccgagaaggtcctcgcagccgtctacaaggcgctgtccgatcatcacatatatctcgaggggactcttctgaaacctaacatggtgacccctggccatgcatgcactcagaagttttcacatgaggagatcgcaatggcaacggtgaccgcactcagaaggaccgtgcctccagctgtcacgggaattacctttctgtccggaggtcaatcagaagaagaagcctccattaacctgaacgcaattaacaaatgtcctctgcttaagccttgggccctcactttcagctatggtagagcgcttcaagcatctgcgctgaaagcgtggggtggaaagaaggaaaatctgaaggccgcgcaggaggaatacgtcaagcgtgcgctcgccaacagcctcgcctgccaaggaaaatacaccccatcaggccaggctggcgccgctgccagcgaatcgctttttgtctccaatcatgcatac

SEQ ID NO: 5844 - DNA, 1092 bp, synthetic construct
  misc_feature 1..1092: note = source = /note="Description of Artificial Sequence: Synthetic coding sequence"
  source 1..1092: mol_type = other DNA
atgccttaccagtatcccgcactcacgcctgagcaaaagaaagagctgtccgacattgcccatcgaatcgtggctccaggcaagggtatattagccgcagacgagtctacaggctctatcgcaaagcggctgcaatcaataggcaccgaaaatactgaggagaataggaggttttatcggcaactactccttaccgccgacgatcgagtgaatccatgtatcgggggggtcattctctttcacgagacactgtaccagaaagccgacgatggacggccttttcctcaggtgatcaaatccaaggggggagtcgttggtataaaagtagataaaggcgtcgtccccctcgccgggaccaacggggagaccaccacccaggggctggacggccttagcgagaggtgcgctcagtacaaaaaagacggcgccgacttcgccaaatggaggtgtgtattgaagataggggagcacactccatccgccttggccattatggagaacgcaaatgtactggctaggtatgcctccatctgccaacaaaatgggattgtacccattgtagagcccgagatccttcccgatggcgaccacgacctgaaaagatgccagtatgtgacagagaaagtactggccgccgtgtataaggcactaagtgaccaccatatctacttggaaggcacactgctgaaaccaaacatggtcacaccgggccatgcttgtacacagaaattcagccacgaggaaattgccatggccactgtaaccgccctgcggagaacagtccctccagccgttaccggcataacgtttctctccggcggtcaaagcgaagaagaagcttccattaatctaaacgccattaataagtgtccgctcctgaaaccttgggcgctcacattttcctacgggcgtgctctgcaggcctctgccttgaaggcatggggaggcaagaaagagaatctgaaggccgcgcaggaagaatacgtgaaacgtgcactagcaaattccttggcgtgtcaaggtaagtataccccttcgggccaggccggagccgccgcaagcgaaagtctgttcgtgagcaaccatgcatac

SEQ ID NO: 5845 - DNA, 1092 bp, synthetic construct
  misc_feature 1..1092: note = source = /note="Description of Artificial Sequence: Synthetic coding sequence"
  source 1..1092: mol_type = other DNA
atgccctaccagtaccccgccctgaccccagaacagaaaaaggaactgtcagatattgcacatagaatcgtggcgccagggaagggaattctcgcagcggacgagagtaccggatcgatagccaagcgcttgcagtccataggtaccgagaataccgaagaaaatcgccgcttttaccgacagctgcttctgactgcagatgatagagttaacccatgtatcggtggtgtcattctttttcatgaaactctgtaccagaaggccgacgatggtcgccctttccctcaagtcatcaaatccaaagggggtgtggtgggtattaaggtggacaagggtgtggtgcccctggccgggaccaatggagaaactactacccaaggacttgatggactctctgaacggtgtgcgcaatacaagaaggacggcgcagattttgccaaatggcggtgtgtcctgaagatcggagagcataccccatcagcacttgctattatggagaacgcaaacgtgctggcaaggtacgcctccatttgtcagcagaacggaatcgtgcccatcgtggaaccagagattctgccagatggggaccatgatctgaagcgatgccaatacgtgaccgaaaaagtgctcgctgcagtgtataaggcgctttcggatcatcacatatacctggaaggaactttgcttaagcccaatatggtgactccaggccacgcgtgcactcagaaattctcgcatgaagaaattgccatggctactgtgactgcattgaggaggaccgtcccacctgcagtgactggtatcacctttctctcgggaggccaatccgaggaggaagccagcatcaaccttaatgcaattaacaagtgcccgctcttgaagccctgggccttgacttttagctacggtcgagccctgcaggcctcagcattgaaggcctggggaggaaaaaaggaaaaccttaaggcggcacaggaagagtacgttaagcgtgcacttgctaactccttggcttgccagggaaagtacaccccctccggccaagcaggagcggcagcctcggaatcactttttgtgtcgaatcatgcctac

SEQ ID NO: 5846 - DNA, 1092 bp, synthetic construct
  misc_feature 1..1092: note = source = /note="Description of Artificial Sequence: Synthetic coding sequence"
  source 1..1092: mol_type = other DNA
atgccataccaatatcccgctctgacccccgaacagaagaaggagctgagcgacatcgcccaccgcatagtcgcaccaggtaagggaatcctcgcagccgacgagagcactggctccattgctaagaggctgcagtctataggtaccgagaatacagaggaaaatcgtaggttctacaggcaattgctccttaccgctgacgatcgcgtcaacccctgcatcggcggcgtaattctcttccatgagacactgtatcagaaggctgacgacggcaggccctttccccaggtgattaaatcaaaaggaggtgtcgtgggtatcaaggtggacaaaggcgtcgtccccttggctggtaccaacggagagaccaccacccaaggactcgacggcctgtcagagcgctgcgcccagtacaaaaaggacggcgccgatttcgctaagtggcgttgcgtgctgaagataggtgaacacactccctccgccctcgcaatcatggaaaatgccaatgttctggctaggtatgcctctatctgccagcagaacggtatcgtgcccatagttgaaccagaaatccttcctgacggcgaccatgatttgaaaagatgtcagtatgtgacagaaaaagttttggccgccgtttataaggctctttcagatcaccatatatatctggagggtacattgcttaagcctaatatggtgactcctggacatgcatgtacacaaaaattctctcatgaggagatcgccatggctacagtgaccgctctgaggcgcaccgtaccacccgctgtaacaggaattacctttctttcaggtggacagagcgaggaagaagcctccataaacttgaacgcaatcaacaagtgtcccttgctcaaaccttgggctcttaccttctcatacggtcgcgcactgcaggcttccgctctcaaggcatggggtggcaagaaggaaaatcttaaggctgcccaggaagagtatgtaaagagagccctggcaaattcactggcttgccaaggcaagtacactccatctggacaggctggagctgccgctagcgagtccctgttcgtcagtaaccacgcctat

SEQ ID NO: 5847 - DNA, 1092 bp, synthetic construct
  misc_feature 1..1092: note = source = /note="Description of Artificial Sequence: Synthetic coding sequence"
  source 1..1092: mol_type = other DNA
atgccctaccagtaccctgctctgactcctgagcagaaaaaggagctttctgatattgcccatcggattgtcgctccgggtaagggaatcctggccgccgatgagagcactgggtctatcgctaagaggctgcaatcgatcgggaccgaaaataccgaggaaaaccgccgtttttatcgccaattactcttaactgccgacgaccgagtgaatccctgtattgggggggttatactgtttcatgagacactctatcagaaggcggatgacgggcggccatttccacaggtcattaaatccaagggcggcgtggtgggcataaaggttgataaaggtgtggtacccctggctggtacaaacggagaaactactacacagggactagatggcctgagtgagagatgtgcccagtacaagaaggacggggccgactttgcgaagtggcgttgcgtcctgaagattggggagcacaccccgtccgccttggccattatggaaaacgctaacgtgctggcaagatatgcctcaatttgtcagcagaatgggattgtcccaatcgttgaaccggagatactccctgatggagaccacgatctcaagcgttgtcagtatgttaccgagaaggttttggccgccgtttataaagccctgtcagaccatcatatctatctcgagggaaccctgctcaaacccaacatggtgactccaggccatgcgtgcacacaaaagttctcccatgaggaaattgccatggcaaccgtcaccgccttaagaaggaccgtgccacccgccgtgaccggtatcacctttctgtcaggcggacaaagtgaagaggaggcaagtattaaccttaacgcgatcaacaagtgccctcttctgaagccttgggccctgacgttctcctatggccgcgctttacaggcgtccgccctcaaggcctggggcggtaaaaaggaaaacttgaaagctgcccaggaggaatatgtgaaacgcgcgcttgcaaactctttagcctgtcaaggaaagtacactccctctggtcaggccggcgccgcagcatcagagagtctgttcgtgtcaaaccacgcctat

SEQ ID NO: 5848 - DNA, 1092 bp, synthetic construct
  misc_feature 1..1092: note = source = /note="Description of Artificial Sequence: Synthetic coding sequence"
  source 1..1092: mol_type = other DNA
atgccctaccagtaccccgcccttaccccagaacagaagaaggaactttccgatattgcccatcggattgtggcacccggaaaaggtattctggcggccgacgaatcaaccggctcgatcgcaaagcggctccaatccattggaactgaaaacacggaggaaaacagacgcttttaccggcagctgctccttaccgcggacgatagagtcaacccatgtattggaggagtgatcctctttcatgaaaccctgtaccaaaaagcagatgacggtcgcccttttccacaagtgataaagtcgaagggcggtgtggtggggatcaaggtggataagggcgtggtgcctctcgccggcactaacggagaaaccacgacgcagggtctggacggcctttcagagcgctgcgcacagtacaagaaggatggagcagatttcgctaagtggaggtgtgtgttgaagatcggagagcacacgccttccgcactggcaatcatggagaacgccaacgtgttggcgaggtacgcatcaatttgtcagcaaaatggaattgtgcctattgtggaaccggaaatcctgcccgatggcgatcatgatcttaagcgctgtcaatacgtgaccgaaaaagtccttgcagccgtgtacaaagcactcagcgatcatcatatctatcttgagggtaccctgctgaaacccaacatggtcaccccaggtcatgcatgtactcaaaagttttcgcacgaagagatcgcaatggcaactgtgactgcactgagaaggaccgtcccaccagcagtgactggtattacttttctttcaggaggtcaatcagaagaagaggcatcgattaaccttaacgccataaacaagtgtcctctccttaaaccctgggctcttacgttttcctacggaagagcactccaggcgtccgcactgaaagcatggggaggtaaaaaggaaaacctgaaggcagcccaagaagaatacgtgaaacgcgcgctggcaaactccctcgcatgccagggaaagtacactccttcgggccaagcgggtgcagcagcatcggaatccctctttgtgagcaaccacgcctac

SEQ ID NO: 5849 - DNA, 1092 bp, synthetic construct
  misc_feature 1..1092: note = source = /note="Description of Artificial Sequence: Synthetic coding sequence"
  source 1..1092: mol_type = other DNA
atgccctatcagtatcctgccctgacaccagaacagaagaaggagctctccgacatcgcacatcggatagtggcccctgggaagggcatccttgccgcagatgagtccacagggtccatcgccaaacggctacagtcaatcggcactgaaaacactgaagaaaaccggcggttttacagacagctgctgctgaccgctgatgatcgcgtgaatccatgtataggtggcgtcatactcttccatgaaacactgtatcaaaaagccgacgatggccgaccctttccccaggtgattaagagtaagggcggtgttgtggggattaaagttgataagggagttgtcccactggcaggcaccaacggcgagacaacaacccagggcctagatggcctgtctgagaggtgtgctcaatataagaaggatggcgctgactttgcaaagtggaggtgtgtcttaaagattggagagcatacccccagcgccttagctattatggaaaacgctaatgtcctagcccgctacgctagcatatgtcaacagaatggaatagttccaattgttgaaccagagatcctgcccgacggcgatcatgacttaaaacgttgccaatacgtcactgagaaagtgctggctgccgtgtataaggctttatccgatcatcacatctacctggaaggcaccctgctaaagcctaacatggtgacaccgggacacgcctgcactcaaaaatttagccatgaggagattgctatggccacagttacagccctaagaaggaccgtgccccctgccgttactggcataacctttctgtccgggggacaatccgaagaggaggccagcatcaatctgaacgccattaacaagtgcccacttctgaaaccttgggcccttaccttttcctatggccgggccttgcaggcctccgcactgaaggcctggggaggcaagaaggagaacttaaaagctgcccaagaggaatatgtcaaaagggcccttgccaacagcctcgcttgccaaggaaaatatacccccagcggccaggctggcgcagctgccagtgagagcctctttgtctctaatcacgcatat

SEQ ID NO: 5850 - DNA, 1092 bp, synthetic construct
  misc_feature 1..1092: note = source = /note="Description of Artificial Sequence: Synthetic coding sequence"
  source 1..1092: mol_type = other DNA
atgccctaccagtaccccgcactgacaccagagcagaaaaaagaacttagtgatattgcccatagaatcgtcgcaccaggaaagggtattttggctgcagatgagtcaaccgggtctattgctaaaaggttgcagtcaatcgggaccgagaatactgaagagaatagaaggttctacagacaattactcctgaccgcagatgacagagtcaatccatgtatcggcggtgtcatcctgttccacgaaaccctttaccagaaggctgacgatggaaggccctttccacaggtcataaaatctaagggcggggtggtagggatcaaagtggataagggggttgttcctctagcgggcaccaacggggagaccacgacccagggcctggatggactcagtgagcgctgtgcacagtataaaaaagacggcgctgacttcgccaaatggcggtgtgtgttgaaaataggagaacacacaccttccgcgctggctattatggagaatgccaacgtactggcaaggtatgcttccatctgccagcagaacgggatcgtcccaatagtggagcccgaaatcctgccagacggggaccacgaccttaaaaggtgccagtatgtaaccgaaaaggtgctcgctgcagtttataaggccctatccgaccaccacatttatctggagggaacgctgttgaaacccaatatggttacccctggccatgcatgtacacagaagttttcccacgaagagatcgcaatggccaccgtaacagctctgcggaggaccgtcccaccggcagtaacaggtatcacctttctgtcgggcggccagtccgaggaggaggccagcatcaatctgaatgcaattaataaatgccctctgctaaagccatgggccctaactttctcctacggacgagctctgcaggcaagcgctcttaaggcctggggagggaaaaaggagaatctgaaggcagcacaggaagagtacgtgaagagggccctcgcaaatagtttagcatgccagggcaaatacactccatccggccaggccggtgccgctgcatctgagtcactgttcgtgagcaaccatgcctat

SEQ ID NO: 5851 - DNA, 1092 bp, synthetic construct
  misc_feature 1..1092: note = source = /note="Description of Artificial Sequence: Synthetic coding sequence"
  source 1..1092: mol_type = other DNA
atgccgtatcaatatccagcactgacccctgagcagaaaaaggagctaagtgatatcgcacacaggatcgtggcacctggtaaaggaattctagctgctgatgaatccactgggagtattgcgaaaagactgcagagcattgggactgaaaataccgaggagaaccgaaggttttatcgccaacttctcctgaccgccgacgatcgagtaaacccctgcatcggcggcgttatcctgttccacgagacgctctatcagaaagctgacgacggcagaccatttccgcaggtgatcaaatcaaaagggggggttgtgggaattaaggttgacaaaggtgttgtgccgttggcaggaactaacggggaaaccaccacgcaaggactggatgggctcagcgagcgatgcgcacagtacaaaaaggacggggctgatttcgctaagtggcgctgtgtactgaagatcggcgaacatacaccatctgctttggcaattatggagaatgcaaacgtgctggcccggtacgcgagcatctgccaacaaaacggcatcgttcccattgtggagccagaaatccttccagacggcgaccacgacctaaaacggtgccagtacgtcaccgaaaaggtactggcagccgtgtataaggcacttagtgaccaccacatttacttggaagggaccctactaaagcccaatatggtcactccaggccacgcatgtacgcagaagttctcccacgaagaaatagccatggccaccgttaccgcactgaggcggacggtccccccagccgttaccggtatcacgttcctgtctggcggacagtccgaagaagaagcttcaattaaccttaacgctatcaacaaatgtcccctgctgaaaccctgggccttaactttctcttacggcagagccctgcaggcctctgctctgaaggcttgggggggtaagaaggagaacttaaaagccgcacaggaggagtacgtaaagcgtgcactcgccaatagcctggcctgccaagggaaatacacaccttcaggccaggcaggagcggcagcttctgaatcactattcgtgagcaatcatgcatac

SEQ ID NO: 5852 - DNA, 1092 bp, synthetic construct
  misc_feature 1..1092: note = source = /note="Description of Artificial Sequence: Synthetic coding sequence"
  source 1..1092: mol_type = other DNA
atgccctaccagtatccggccttaacccctgagcagaagaaggaactgtcggatattgcacaccgtattgtggctccagggaaggggattctggcagcagatgagtcaacaggatctattgccaagagactgcaatcaattgggaccgaaaataccgaggaaaaccgacggttttatcgccagctacttctcacagctgatgacagggtaaatccctgcattggaggtgtgatattgtttcacgagaccctgtaccagaaggccgatgacgggagacctttcccgcaagtcataaaatctaaaggtggcgtcgtcggaatcaaggtcgacaagggagtggtgcccctcgcaggaacaaacggagagactacaacacaagggctggacggcctcagcgagagatgcgcccaatataagaaagatggagctgatttcgcaaagtggcgctgcgtgctgaaaattggtgaacacacaccctccgccttagccatcatggagaacgcaaacgtgctggccagatatgcatctatttgtcagcagaatggcatcgtgccaatcgtcgagcccgaaatcctgcccgatggagatcatgacctcaagcggtgccagtatgtgacagagaaggtgctggcagcagtctataaagccctcagcgaccatcatatataccttgagggcaccttattgaaaccaaacatggttaccccaggccacgcctgcacgcagaagttctcgcacgaagagattgcgatggcgaccgttaccgcattacggcgcacagtacctccagccgtgactggtatcacctttctgtctggaggccagagcgaagaggaggcttcaattaatctgaatgctatcaacaagtgcccactcctgaaaccatgggcactaacatttagttacggccgagccctccaagcctccgctctcaaagcctggggtgggaaaaaggagaatctgaaggcagcccaggaggagtatgtcaagcgcgccctcgccaactcgctcgcctgccagggaaagtacaccccaagtggccaggccggagcagccgcctcagagtcactgttcgtgtctaaccacgcatac

SEQ ID NO: 5853 - DNA, 1092 bp, synthetic construct
  misc_feature 1..1092: note = source = /note="Description of Artificial Sequence: Synthetic coding sequence"
  source 1..1092: mol_type = other DNA
atgccctaccaatatcctgcgttaacccccgaacaaaagaaggagctttcagatatagctcatcgaatagtagctcccggtaagggcatacttgcagccgacgagtcaacgggtagtatcgcgaaacgtttgcagagcatcggaactgaaaacaccgaagaaaaccgacgattttaccgacagctgctgctaactgccgacgacagagtgaatccttgtattggaggggtgatcttgtttcatgagaccctttatcaaaaggccgatgacggtaggccctttccccaggtgatcaagagcaagggcggcgtcgtaggcatcaaggtggacaagggagtagtgccactggctggcactaatggagaaacaactacgcagggacttgatggtttaagcgaacgatgcgcacagtacaaaaaagacggggctgactttgcgaaatggagatgtgtgttaaaaattggagagcacacaccttcagccctggctataatggagaacgccaatgtcctcgcgaggtacgcatcaatctgccagcagaatggaattgtgccaatcgtagagccagagatattgcccgacggtgaccacgatttaaaacgctgtcagtatgtcacagaaaaggtgctggccgctgtgtataaggccctgagtgaccaccatatctacctcgagggcacgctcctgaagcccaacatggtgacgcccgggcatgcgtgtacgcagaagttctctcatgaagaaatagccatggcaacagttacagcgctacgtcgaaccgtcccacctgctgtaaccggtatcacttttctgagcggaggtcagagtgaagaagaagcttctatcaaccttaacgccattaacaaatgccctttgctgaaaccctgggccctgaccttttcctacgggcgggcactccaagcctcagcattgaaggcctggggaggtaaaaaggagaatctgaaagctgcccaggaagaatacgtaaagagagctttggccaatagccttgcctgccaggggaagtatactcccagtggacaagccggcgccgctgcaagcgagtctctgtttgtgtctaaccatgcctat

SEQ ID NO: 5854 - DNA, 1092 bp, synthetic construct
  misc_feature 1..1092: note = source = /note="Description of Artificial Sequence: Synthetic coding sequence"
  source 1..1092: mol_type = other DNA
atgccataccagtaccctgcacttactcccgagcagaaaaaggaactgagtgacattgcccacaggatcgttgcccctggtaagggcatattggcggctgacgaaagcacaggatcaattgcgaagagactgcagagcatcggtaccgaaaacactgaagagaacagacggttctaccgccagctgctgctgacagctgacgaccgcgtaaacccctgtatcggaggcgtgattctctttcacgagactctttatcagaaggccgatgacggccgtccattcccccaggttataaagtctaaaggcggcgtggtgggtatcaaggtggataaaggcgtggtgccgctggcaggcacaaacggggagaccacgacccaaggactcgacggactctctgaacgctgtgctcagtataagaaggatggggctgattttgcaaagtggcggtgcgtccttaagattggggagcacacgcccagtgctctcgccattatggagaacgcaaatgttctggccagatacgcctcaatctgtcaacaaaatgggatcgtccctattgtagagcccgaaattcttcctgatggcgaccacgatcttaagagatgtcagtatgttaccgaaaaggtcctagcagccgtgtacaaagcactgtccgaccaccacatctacttggaggggaccttacttaaaccaaatatggtgacgcccgggcatgcctgcacccagaaatttagccatgaggagatcgccatggccaccgtgaccgccctccgtaggaccgtgccacctgcagttacaggaattacattcttaagcggtgggcagtctgaggaggaggctagtattaacctcaacgctatcaacaagtgccctctcctaaaaccttgggccctcacttttagctacggaagagctctgcaggctagcgctctgaaagcatgggggggtaagaaggagaaccttaaggccgcccaagaggagtatgttaaacgggcgcttgcaaactccctcgcttgtcagggaaaatacaccccctctggacaggcaggtgccgcggcttccgaatctctattcgtatcaaatcacgcatat

SEQ ID NO: 5855 - DNA, 1092 bp, synthetic construct
  misc_feature 1..1092: note = source = /note="Description of Artificial Sequence: Synthetic coding sequence"
  source 1..1092: mol_type = other DNA
atgccttaccagtacccagcactcactccggagcagaaaaaagagctttcggacatcgcccaccgcatcgtggcgccggggaaaggaatcttggcagcggacgaatcgacggggtcgatcgcgaagcggctgcagtcgatcggaacggagaataccgaagaaaatcgaaggttctacagacaactcctgctcaccgctgatgaccgcgtcaacccatgcatcgggggcgtcatcctctttcacgagactttgtaccagaaagcagacgatggacgcccgttcccccaagtcatcaagagcaagggaggggttgtgggaatcaaagtggataagggagtggtcccactggctggaactaacggagaaaccaccacccagggattggatggactgtccgagagatgtgcgcaatacaaaaaagacggagctgattttgcgaaatggaggtgtgtcttgaaaatcggagagcataccccatcagcccttgctatcatggaaaatgccaacgtactcgcgcgctatgcaagcatctgtcaacaaaatggcatcgtgccgattgtcgaaccggagatcctgccggacggtgatcacgaccttaaacgctgccagtacgtgactgagaaagtgctcgctgcggtgtacaaagctctgtcagatcaccatatctacctggaagggacccttcttaagcctaacatggtgactcccggacatgcttgcactcagaagttcagccacgaggaaatagctatggccactgtgaccgcactgcgccggaccgtgcctcccgccgttactggtatcactttcctctccggaggacaaagcgaggaggaagcgtccataaatctgaacgcaatcaacaagtgcccactgctcaagccttgggcccttaccttctcgtacggaagggcgctgcaagcctccgccttgaaggcctggggcggcaagaaggaaaatctgaaggccgcacaagaggaatacgtgaagcgagctctggcgaatagtctggcgtgccaaggcaagtacaccccgtcaggacaggcgggcgcggccgccagcgaatcactgttcgtgtcaaaccatgcttac

SEQ ID NO: 5856 - DNA, 1092 bp, synthetic construct
  misc_feature 1..1092: note = source = /note="Description of Artificial Sequence: Synthetic coding sequence"
  source 1..1092: mol_type = other DNA
atgccgtatcagtacccagcattaacaccggaacagaaaaaagaactgagcgatatcgcacacagaatcgttgcaccaggcaaaggcatccttgcggcagatgaaagcaccggctcgatcgctaaacggctgcagagcattggaacagaaaatacggaggagaataggcggttttatcgtcaactcctgttaactgctgatgatcgcgttaacccttgtattggcggagtaatattgtttcacgaaacgttatatcagaaggccgatgacggcagaccttttccccaagttattaagtcaaagggaggggtagttggcatcaaggttgataagggtgttgttccgcttgccggaactaatggagaaacgacgacgcagggactggacggcctttcggaacgttgcgctcaatataagaaagatggtgcggacttcgcgaagtggcggtgcgtcctgaaaataggagaacacaccccttcagccctggcgatcatggaaaatgcaaatgtgctcgcaagatatgcatccatatgccaacagaacggcattgtgccgatcgtagaacctgagatcctgcctgatggagaccatgacctaaaaagatgccaatacgtgacggaaaaagttttggccgccgtatacaaagctctgtcggatcaccatatctacctcgagggtactttactcaaaccaaatatggtcactccgggacatgcatgtacgcaaaaattcagccatgaagaaatcgcgatggcaacagttactgcccttcgcaggacggtgccacctgctgtgacaggcattacgtttctttccggaggacaatcagaagaggaagcatcaatcaacctcaacgccattaataagtgcccgttgcttaaaccgtgggctcttacgttttcctacggcagggcattacaggcaagtgcgctcaaggcatggggcggcaaaaaggagaacctgaaggcggcacaagaggagtacgttaagagagccctagcaaacagcctggcatgtcagggtaagtacaccccgtctggacaggcgggcgccgctgcatcggaatcactatttgtaagtaatcatgcgtat

SEQ ID NO: 5857 - DNA, 1092 bp, synthetic construct
  misc_feature 1..1092: note = source = /note="Description of Artificial Sequence: Synthetic coding sequence"
  source 1..1092: mol_type = other DNA
atgccataccagtaccccgcccttacacccgaacaaaagaaggaattgtccgatattgcccaccgtatcgtagcacccggcaagggaatcctggccgcagacgaaagcacaggctcaattgcgaagaggctgcagtccatcggtacagagaacactgaagaaaatcgtcgattctacaggcaattgctgctgaccgcggacgatagagtgaacccttgtatcggaggcgtcatacttttccatgaaaccctttatcagaaagccgatgatggccggccctttcctcaggtgattaaatcaaagggaggtgtcgtgggaatcaaagtcgacaaaggagtcgtgcccctagcgggtaccaacggcgagaccaccacacaagggctggatgggttaagtgaacggtgcgcccagtacaaaaaggatggggccgactttgcgaagtggcgctgtgtgctcaaaattggcgaacatacacctagcgctctggctatcatggagaatgcaaacgtcctggctcgttatgcctccatatgccagcagaatggcatcgtgcccattgttgaacctgagatactgccagatggcgaccacgatctgaagaggtgtcagtacgtgactgagaaagtgctggctgctgtgtacaaggcgctttccgatcaccatatttacctcgagggcacgttgctaaaaccgaatatggtaacaccagggcacgcatgtacgcagaaattctcacatgaggaaatcgccatggctacagtcacagcgctgaggcgaacagtcccccctgcagtgaccgggatcaccttcttgagtggcggacagagtgaagaagaggcatccataaacctcaatgcaatcaacaaatgtccattgctaaaaccatgggcactcacattcagctatgggcgcgcactgcaggctagtgcgttgaaagcctggggagggaagaaggagaacctgaaggccgcccaagaagagtacgtgaagagggccctcgccaattcgttggcatgccaggggaagtacactccctcgggccaggcaggagcagcagccagcgagtcactgtttgtgtccaatcacgcatac

SEQ ID NO: 5858 - DNA, 1092 bp, synthetic construct
  misc_feature 1..1092: note = source = /note="Description of Artificial Sequence: Synthetic coding sequence"
  source 1..1092: mol_type = other DNA
atgccttaccaatacccagcactgactccagagcaaaagaaggagctgtcggatattgcgcatagaattgtggcgcctggaaaagggatccttgccgccgatgagtccaccggttcaatcgcaaagcgcctgcagtccatcggaactgagaatactgaggaaaatagaagattttaccgtcagttgttgctgaccgcagacgatagggtgaacccttgtattggaggagtcatactgttccacgagactctgtaccaaaaggcagatgatggccgcccgtttcctcaggtcatcaagtcaaaaggcggcgtggtgggaattaaggtggataagggtgtggtcccgctggcaggcaccaacggggagactacgactcaaggtcttgacggactgagcgaacgctgcgctcagtacaaaaaagacggcgctgatttcgcaaaatggcgctgtgtgctcaaaattggagaacatactcctagcgcacttgcgattatggaaaatgccaacgtgttggcgagatacgcttccatctgccaacaaaatgggattgtgccgattgtggaacctgagattttgcccgacggtgaccatgatctcaaaagatgccaatacgtcacggaaaaggtgctggcagcagtgtacaaggcactttcggatcatcatatctatttggagggaactctcctcaaacctaatatggttactcccggacacgcatgtacccaaaagtttagccatgaagagatagcaatggctaccgtcactgcccttcggagaactgtgccgccagccgtgacgggtatcacctttctctcaggaggtcaatccgaggaagaagcatccattaacctgaacgcgatcaacaagtgtccgctcctgaagccctgggccctgaccttttcctacggtcgagcgctccaagcatcggcactgaaggcatggggtggtaaaaaggaaaatcttaaagccgcccaggaagagtacgtgaagcgagcactggcaaactccttggcctgtcagggaaaatacacgcctagcggtcaggccggcgccgccgcctcggaatccttgtttgtttccaaccatgcatac

SEQ ID NO: 5859 - DNA, 1092 bp, synthetic construct
  misc_feature 1..1092: note = source = /note="Description of Artificial Sequence: Synthetic coding sequence"
  source 1..1092: mol_type = other DNA
atgccctaccagtaccctgctcttactccagagcaaaaaaaggagctgagcgacatcgcccatcggatcgttgccccgggcaagggcattttggctgcagacgagtccacaggctccattgccaaacgcctgcagtctatcggaaccgagaacactgaagaaaatcggcgattctatcgccagctgttgctgaccgccgacgatagagttaatccgtgcataggtggagtgattctgttccatgagaccctgtatcaaaaggccgacgacggcaggccattcccacaggtcataaagagtaagggaggagtcgttggaatcaaggtggacaagggagttgtgccgctagcaggcacgaacggagaaaccacaacgcagggtctcgatggtctgtcggagcgatgcgcccagtacaagaaagacggagctgattttgctaaatggcgctgcgtcctgaaaattggcgaacatacaccctcagcgctcgcaatcatggagaacgccaatgttctggcacgctacgcctccatctgccaacagaacggtattgtgcccattgttgaaccggagattctgccggatggcgaccatgacctgaagcggtgccagtatgtaaccgagaaggttctggccgcagtgtacaaggccctgagtgaccaccatatttacctcgagggcacacttctgaagcccaacatggttacaccgggacatgcgtgcacgcagaaattctcgcacgaggagatcgctatggccactgtgacagcgctgaggcgaactgtaccacccgctgtgacgggcatcacgtttttgtcgggtggtcagtctgaggaagaagcctccatcaacctcaacgcaatcaataagtgcccgctgttgaaaccgtgggcacttaccttttcatacggccgggccctacaggcctcggccctgaaggcttggggaggaaagaaggagaatctgaaggccgctcaggaggagtacgtgaagcgcgcccttgccaattccctcgcctgccagggcaagtacacaccttccggccaggcaggcgcagctgcttcggaatcactgtttgtctcaaatcacgcctac

SEQ ID NO: 5860 - DNA, 1092 bp, synthetic construct
  misc_feature 1..1092: note = source = /note="Description of Artificial Sequence: Synthetic coding sequence"
  source 1..1092: mol_type = other DNA
atgccttaccagtacccagctcttactccggaacagaagaaggagttgtccgatatcgcccacaggatcgtggcgcccggtaaagggatccttgcggccgacgagtcaaccggatctatagcgaagcgcctccaaagcatcggtaccgagaacacggaggagaaccgacgcttctacagacaactgctgctgaccgctgacgatcgcgtgaatccatgcatcgggggagtaatcctcttccacgaaactctgtaccagaaagcggacgacggacggccgttccctcaagtcatcaagtcgaagggcggcgtcgtggggatcaaggtcgacaaaggcgtcgtgccgctggccggtactaacggcgagacgaccacccaggggctcgatggactcagcgaacggtgtgcccaatacaagaaggacggtgccgatttcgccaagtggagatgcgttttgaaaatcggagagcacaccccctcagccctggccattatggaaaacgccaacgtgctggctcggtacgcctcaatttgccagcagaacggaatcgtgccgatcgtggagccagagatacttccggacggggatcacgacctgaagcggtgccagtacgtcactgaaaaggtgctggcggcggtgtacaaagcacttagcgaccaccatatctacttggaaggaactctcctcaagcctaatatggtcactccaggacatgcgtgcactcagaagttttcacacgaagaaattgccatggcgaccgtgaccgccttgcgccggaccgtgccgccagccgtgacgggtatcaccttcctctccggaggacagtcggaggaagaggcatcaatcaacctcaacgcaatcaacaagtgccctcttctcaagccatgggccctgaccttctcctatggcagggctttgcaagcatccgccctgaaggcgtggggaggaaaaaaggagaatttgaaggcggcccaggaagaatacgtgaagagggctctggcaaactcattggcgtgtcagggaaaatacactccgagcggacaagccggcgcagccgcgtcggaatcgctgttcgtgtcaaatcacgcctac

SEQ ID NO: 5861 - DNA, 1092 bp, synthetic construct
  misc_feature 1..1092: note = source = /note="Description of Artificial Sequence: Synthetic coding sequence"
  source 1..1092: mol_type = other DNA
atgccctaccaataccctgcccttacgcccgagcagaagaaggagctcagcgacatcgcgcaccgtattgtcgctcccggcaagggaatcctcgccgctgacgaatccactggctctattgccaagcgcctgcaatctatcggtacagagaacaccgaagaaaaccgtcggttttaccgtcagctgctcctcactgcggatgatcgcgtgaacccttgtatcggtggcgtaatcctcttccacgagacactctatcagaaggccgacgacgggcgccctttcccccaggtcatcaagagcaagggaggtgttgtgggcattaaggtggacaagggagtcgttccactagctggcaccaacggtgagaccactacccaggggttagacggtctctccgagcgttgcgcgcagtacaagaaggacggagcggatttcgcgaagtggcgctgcgtcctcaagatcggcgaacataccccttcggctctggctattatggaaaacgccaacgtgctcgcccgttacgcctccatctgtcagcagaatggcatcgtcccgatcgtcgagcccgagatcctgccggacggtgaccatgacctaaagcggtgccagtacgtcaccgagaaggtcctcgccgcagtctataaggccctctccgaccaccatatttacctggagggaacactgctgaagcccaatatggtcacccccggtcacgcctgcacgcaaaagttctcccacgaggaaatcgccatggcgaccgtgaccgccctgagacgcaccgtcccgccggctgtcaccggtatcacgttcctgtctggaggtcagagtgaagaagaggccagcatcaatctaaacgccatcaacaagtgccctctactgaagccgtgggcattgacattctcgtatgggcgagcccttcaggcatctgccctcaaggcctggggtggtaagaaggaaaacttgaaggccgctcaggaggagtacgtgaagcgcgcactcgcgaactccttggcctgccagggaaagtataccccatccggccaggccggagccgccgctagcgaatccctctttgtttctaaccacgcgtat

SEQ ID NO: 5862 - DNA, 1092 bp, synthetic construct; identical to SEQ ID NO: 5828
  misc_feature 1..1092: note = source = /note="Description of Artificial Sequence: Synthetic coding sequence"
  source 1..1092: mol_type = other DNA

SEQ ID NO: 5863 - DNA, 1092 bp, synthetic construct
  misc_feature 1..1092: note = source = /note="Description of Artificial Sequence: Synthetic coding sequence"
  source 1..1092: mol_type = other DNA
atgccgtatcaatacccagctctgacaccagagcagaagaaggagttgtcagacatcgcccatagaatagtggcccctgggaaaggaattctcgctgcagatgagtcaactggaagcatagctaagaggcttcagtccattggaactgaaaacacagaagagaataggcgcttttacaggcagcttcttttaactgcggacgatagggtaaacccatgcattgggggtgttattcttttccatgagacattatatcaaaaggcagatgatggacgaccttttcctcaggttataaagagcaaagggggtgttgtgggtataaaggttgataagggagtggttccactggctgggaccaatggagaaacaactactcaagggctcgatggccttagcgaaaggtgtgcacagtataaaaaagatggagcggattttgctaaatggagatgtgtcttgaagatcggcgaacacaccccttctgctcttgccatcatggaaaacgctaacgttcttgcaaggtatgcttccatttgtcagcagaatggcatagtccctatcgtcgaaccagaaattctgcccgacggcgaccacgatctaaaacgatgccagtatgtcactgaaaaggtgttggcagccgtgtataaggccctgagtgatcatcatatttatcttgaaggcacgttattgaagccaaacatggttacacctggtcatgcttgcactcaaaaatttagtcacgaggaaattgctatggctaccgttactgctcttagacggacagtgccaccggccgtgactggcataactttcttgtcaggaggacagtctgaagaagaagcctcgattaaccttaatgctattaacaaatgccccttgcttaagccatgggcacttacattcagctatggaagagcattgcaagcgtctgctttgaaggcatggggtggaaaaaaggaaaacttgaaggctgcacaagaggagtacgtcaagcgggcgcttgcaaattcactcgcatgtcagggtaagtataccccaagcggtcaggcgggtgcagctgcatcagaatctcttttcgtgtctaaccatgcttac

SEQ ID NO: 5864 - DNA, 1092 bp, synthetic construct
  misc_feature 1..1092: note = source = /note="Description of Artificial Sequence: Synthetic coding sequence"
  source 1..1092: mol_type = other DNA
atgccctatcagtatcccgcgctgaccccagaacaaaaaaaggagctgtccgatatcgcccaccgtatcgtggcaccgggaaaagggatcttagctgccgacgagtctactggctccatcgccaagaggctgcaatcgatcggtaccgagaatacagaggagaacagaaggttttatcggcagctcctgctgactgccgacgacagagtaaacccatgcattggtggagtgatcctgtttcacgaaacgctctaccagaaagcagacgatggcaggccttttcctcaggttatcaaatctaagggaggagtagttggtatcaaggtagacaaaggtgtggtacccctggcgggcaccaatggcgagactacaacccagggcttggacgggctctctgagaggtgcgcccagtacaagaaggacggcgcagacttcgcgaagtggcgctgtgttctaaagatcggcgaacatactcctagcgccctggccataatggagaatgctaacgtactagcacgatacgcgagtatttgtcagcagaacggtatagtccctatcgtggagcctgagatactgcccgacggagaccacgacttgaaacggtgtcagtacgtgaccgaaaaagtgcttgcagcagtctataaggcactgagcgaccaccacatttatttggaggggaccctgctgaaacctaacatggtgactcccggacacgcctgtacacagaaattttcccacgaggaaatagccatggccaccgtgaccgcacttcgcaggacagtacctccagcagtcactgggataacctttctgtcaggtgggcagagcgaggaggaagcaagcataaatctaaatgcgataaacaagtgtccactcttgaagccttgggcgttgactttttcctatgggcgggcgctacaggcctcagccttgaaggcatgggggggaaagaaagagaatctgaaagcagctcaggaggaatatgtgaagcgagccttggccaacagtctggcatgtcagggcaagtacacgccctcggggcaggccggtgccgcagccagcgagtcgctgttcgtgtctaaccacgcttac

SEQ ID NO: 5865 - DNA, 1092 bp, synthetic construct
  misc_feature 1..1092: note = source = /note="Description of Artificial Sequence: Synthetic coding sequence"
  source 1..1092: mol_type = other DNA
atgccgtaccaataccccgcacttacccccgaacagaagaaggagctgtctgacattgcacatcgcattgttgcacccggaaaaggaatcctggcagcggatgagtccactggcagcatagcaaaacgcctgcaatccattggcaccgagaacactgaggaaaaccgccggttctaccgtcaactccttcttactgcagatgatcgggtgaacccatgtatcgggggagtgattttgttccatgaaacgctgtaccagaaggcggacgacggaaggcctttcccacaagtcatcaaatcgaaaggtggtgtggtcggaatcaaggtggataagggagtggtccctctcgcaggaactaacggggaaactaccacccaagggcttgatggtctgtcggaaagatgtgcacaatacaaaaaggatggcgcagattttgccaagtggaggtgtgtgcttaagattggagaacatacccccagcgctcttgcaataatggaaaacgccaacgtcctggccaggtacgcgtcgatttgccagcagaatggtattgtgccaattgtggaacctgaaatccttccagatggggaccatgatctgaagaggtgtcaatacgttaccgaaaaggtcctcgcagcagtgtacaaggcactgtccgatcatcacatctacctcgagggtactctcctgaagccaaacatggtgactcctggacacgcctgtacgcaaaagttttcgcatgaggaaatcgccatggcaacggtgaccgccctcagacgtaccgtgccccccgcagtgactggcattacctttctgtcgggtggacagtccgaagaagaagcaagcattaatctcaatgcaattaacaaatgtccactcctgaaaccatgggcccttaccttttcatacggcagagctcttcaggcctcggcactcaaggcatggggaggtaagaaggaaaaccttaaagcagcacaagaggagtatgtcaagcgagcacttgcaaattcgcttgcatgtcagggaaagtacacgccttcgggtcaagccggcgccgcagcctccgagtcgctgtttgtgtccaaccatgcatac

SEQ ID NO: 5866 - DNA, 1092 bp, synthetic construct
  misc_feature 1..1092: note = source = /note="Description of Artificial Sequence: Synthetic coding sequence"
  source 1..1092: mol_type = other DNA
atgccatatcagtaccccgccctcacacctgaacagaagaaggaactctccgatatcgcccacagaattgtggcccctggaaaaggaattctcgccgccgacgaatctactggctccatcgccaagcgcctgcagagcattggcactgaaaatacggaggagaatcggcggttttatcgacagttgctcctgacagcagatgacagggtgaatccatgtatcggaggggtgatcctgtttcacgaaactctgtatcaaaaggcggatgacgggagaccctttccccaggtcatcaaatccaagggtggcgtggtcggcataaaagttgataagggggttgtgcctctcgctgggacaaacggcgaaacgaccacacagggcttggacggcctttctgagagatgcgctcagtataaaaaggacggggccgattttgccaagtggcgctgtgtcttgaagataggggaacacaccccatcagcgctggcaattatggagaacgccaatgtcctggctcgatatgctagtatctgccagcaaaatggtatagttccaatcgtggagcctgaaattttaccagacggcgaccatgatttgaagaggtgccagtacgttacagagaaagtgcttgcagcagtttataaggctctgtccgatcaccatatctatctggagggaacattactgaagcctaacatggtgactccgggacacgcttgtacacaaaagttctcccacgaagagattgccatggcaacagtgaccgccttgcggcgcacagtcccgcctgccgtcacaggcataaccttcctttcgggaggtcagtctgaagaagaggcgtccataaacctcaacgccattaacaaatgtccattgctgaaaccttgggcactgacatttagctacggcagagccttgcaggcctctgccttgaaggcatggggagggaagaaggagaacttgaaagcagcacaggaggagtacgtcaaacgtgcgctcgccaactctctggcctgtcaaggcaaatatacgcctagcggacaagcaggtgcagcagcgtccgagagtttgttcgtaagtaatcatgcgtac

SEQ ID NO: 5867 - DNA, 1092 bp, synthetic construct
  misc_feature 1..1092: note = source = /note="Description of Artificial Sequence: Synthetic coding sequence"
  source 1..1092: mol_type = other DNA
atgccataccagtaccccgcactgacgccagaacagaagaaggaactttccgacatcgcacatagaattgtggcacccggaaaaggcatacttgcagcagatgaaagtactggatctattgccaagcggctgcaatcgattggaacggaaaatacggaggaaaacagaaggttctacagacaattgctgctgactgcagatgacagggtgaatccttgtattgggggagttattctctttcacgagactctgtaccagaaggcagatgatggacgccctttcccacaggtcatcaaatcaaaaggaggggtcgtgggtattaaggtggataagggggtggtgcctctcgccggtactaacggagaaaccactacccaagggctcgatgggctctcagaacggtgtgcacaatacaaaaaggacggagcggactttgcgaaatggaggtgcgtgctgaagatcggagagcacaccccttccgcacttgcaattatggaaaacgctaatgtgctggcgcgctacgcatccatctgtcaacaaaacgggattgtcccaatcgtagaaccagaaattctgccagatggcgatcatgatttgaagcgttgtcagtacgtgactgagaaagtcctcgccgccgtctacaaagcattgtcggaccaccatatctaccttgaaggaacgcttctgaagcctaatatggtgactccgggtcacgcatgcacccagaagttttcccatgaggagatcgctatggcgactgtgaccgccctccgcagaaccgtgccgcccgcggtaaccggcatcaccttcctgagcggtggtcagtctgaagaggaggcgtcaattaacctgaatgcgattaacaagtgcccactcctcaaaccgtgggcgttgactttttcatatggacgtgctcttcaagcaagcgcgctgaaggcatggggtggaaagaaggagaacctcaaggcagctcaggaggaatacgtgaaacgggcccttgcaaactccctcgcatgtcaaggaaagtacactccctcgggccaagccggtgctgccgcatcagagtcacttttcgtctcaaaccatgcttac

SEQ ID NO: 5868 - DNA, 1341 bp, synthetic construct
  misc_feature 1..1341: note = source = /note="Description of Artificial Sequence: Synthetic coding sequence"
  source 1..1341: mol_type = other DNA
atgtccgcgtctaagattcctttgttcaagatgaaggacctgattctcatcctgtgcctgctggaaatgtccttcgccgtgcctttcttcccgcagcagtcaggtacacccggtatggccagtctgtccctggaaacaatgaggcaactcggtagtctccaaaggctgaacaccctgtcccagtactcaaggtacggttttggaaagtctttcaactctttgtggatgcacggactgctcccccctcacagctcactgccctggatgaggccacgcgaacatgagacccaacagtatgagtactctttgcccgtgcatccacctcctttgccgtctcagcctagcctgaagccgcaacaacccggacttaaaccatttttgcagtccgccgccgctactaccaaccaggccaccgccttgaaggaagcacttcagccacccatccatctcggtcacctgccgctccaagaaggcgaactgcccctggtgcagcaacaagtcgcaccctctgacaaaccaccgaaaccagaactgccaggcgtagattttgctgacccacaaggtccaagcctccccggcatggactttcccgacccacagggcccttctctgccaggtcttgattttgcagatccccagggttccaccatctttcagattgccagattgatctctcacggcccgatgccacagaataagcagtctcctctctatcctggtatgctgtacgtgccattcggtgctaatcaacttaatgctcccgctcgcctcggtattatgagtagcgaggaagtggccggcggaagggaggaccctatggcttatggcgcgatgttccctggcttcggaggtatgcgccccggatttgaaggcatgccgcataacccggccatgggtggtgattttacactggaattcgattctcctgtcgctgctacaaaaggccctgagaacgaggaaggcggagcccaaggcagtccaatgcccgaggctaaccccgataacctggagaaccccgccttcctgactgagcttgagcctgccccccacgctggtctgttggcgcttccaaaggatgacataccgggcctgccaagaagcccctccggcaaaatgaaaggtcttcccagtgtgacgccagctgccgccgatcctttgatgacccctgaactggccgacgtgtataggacctacgacgctgatatgactacgtctgtggactttcaagaggaggcaacgatggataccacaatggctccgaattccctgcagaccagtatgcccggcaataaggctcaggagcccgagatgatgcatgacgcttggcacttccaggagcca

SEQ ID NO: 5869 - DNA, 1341 bp, synthetic construct
  misc_feature 1..1341: note = source = /note="Description of Artificial Sequence: Synthetic coding sequence"
  source 1..1341: mol_type = other DNA
atgagcgcgagtaagattccactcttcaagatgaaagacctgatcctgattctctgcctgctcgagatgtcatttgcagtgccttttttcccgcaacaaagcggcaccccgggaatggcctcactctccctcgagactatgcgccagctgggttcactgcagcggctgaacaccctgtctcagtattcaagatacggcttcggaaagtcttttaactcactgtggatgcacggattgttgccgcctcactcctcgctgccttggatgcgcccacgggaacacgaaacccagcaatacgaatactcgctgcctgtccacccgcctccactgccatcacagccgtccctcaagcctcagcaaccaggactcaagccattcctccaaagcgcggcagcaactaccaaccaagcgactgccctgaaagaagcgcttcaacccccgattcatctcgggcacctgccactccaagaaggagagctcccgctggtgcagcagcaggtggctccgagcgacaaaccgccgaagccggaactgcccggagtggacttcgccgatccccagggaccatcgctgccaggaatggatttcccggacccacaaggcccttcgctgccgggcctggatttcgccgatccgcaagggagcacgattttccagatcgccagactgatatcacatggaccgatgccccagaacaagcaatcaccgctgtacccgggaatgctttacgtgccattcggagccaaccaactgaatgcccctgcccggctcgggatcatgtcgtcggaagaggttgcaggaggccgcgaggaccccatggcatacggagcaatgttcccaggtttcggagggatgcggccgggatttgaaggaatgccacacaacccggcgatgggaggagatttcacccttgagttcgacagcccagtcgccgcaaccaagggaccggagaatgaagaaggaggggcccagggatccccgatgccggaggcaaatccggacaacctcgagaacccggcatttctcaccgagctggaaccagcgcctcatgccggattgctcgccctgcctaaggatgatatccctggtctgccacgctcgccttcaggaaagatgaaaggcctgccgtccgtgactccggcagcggccgacccgctcatgaccccagagctggccgacgtgtacaggacttacgacgccgacatgaccaccagcgtggacttccaggaagaagctaccatggacactactatggctccgaattcactgcagacgtccatgccgggaaacaaggcccaggaaccggagatgatgcacgacgcgtggcactttcaagagcct

SEQ ID NO: 5870 - DNA, 1341 bp, synthetic construct
  misc_feature 1..1341: note = source = /note="Description of Artificial Sequence: Synthetic coding sequence"
  source 1..1341: mol_type = other DNA
atgagcgctagcaaaatacccctcttcaaaatgaaggacctcatcctcattctctgcctgctggagatgagtttcgccgtaccatttttccctcagcagagtggtactcctgggatggcatctctcagcctggaaacgatgcggcagcttggctctttgcagcgactgaatacactatcccagtactccagatacggattcgggaagagtttcaatagcctttggatgcatggactgctgccaccgcacagtagcttaccttggatgagaccaagggagcacgaaactcaacagtacgaatacagtctgccagtccacccgcctcctctgccttcacagccctcactgaagccccagcagcccggactgaaaccattcctccagtctgccgctgccactactaatcaggctaccgctctgaaggaagccctgcagccgcctatccatctgggccacttgcctttacaggagggcgagctgcccttggtgcaacagcaggtggctccatctgacaaaccaccaaagcccgagctgcccggggtcgatttcgccgacccacagggtccttctttaccgggcatggatttccctgacccacaagggccgtctctccccgggctggacttcgccgacccacagggctctacgattttccagatcgcaaggctgatttctcatggccccatgccgcagaataagcagtctccactctaccccgggatgttatacgttcctttcggcgccaatcaacttaatgctcccgctcgtctgggaatcatgtcgtccgaagaagttgccggtggaagagaagatccaatggcgtatggggctatgtttcccggcttcggggggatgcgacctgggtttgagggaatgccccacaaccctgctatgggaggggactttaccctcgagtttgattctccagtcgccgctacgaaggggcccgaaaacgaggagggtggtgcccagggaagccccatgccggaggcaaatccagataatcttgaaaacccagcctttttgaccgagttggagcccgctccccatgccgggctgctggccctgcctaaggatgatattcccggtttgcctcgctcccctagcggtaagatgaaaggattgccgtctgttacccccgccgcggccgacccactgatgacccctgagctggcggatgtctacagaacttacgatgctgatatgactacaagcgtggacttccaggaggaagcaaccatggacaccacaatggcccccaatagcctacaaacttctatgcccgggaataaggcgcaggagccagagatgatgcatgacgcttggcatttccaagagcct

SEQ ID NO: 5871 - DNA, 1341 bp, synthetic construct
  misc_feature 1..1341: note = source = /note="Description of Artificial Sequence: Synthetic coding sequence"
  source 1..1341: mol_type = other DNA
atgtcggcctcaaagatccccctcttcaaaatgaaagaccttatccttattctgtgtctgctcgaaatgtcgtttgccgtccccttttttccacagcaatcaggtacccctggcatggctagcctttccctggaaaccatgcggcagctgggatcgctgcagaggctgaataccctgagccaatactcccgctacggcttcggaaaatcgtttaactccctctggatgcatggtttgctgccgccgcactctagccttccgtggatgcgtcctagggaacatgagactcagcaatacgagtactcactgccggtccatcctccacctctgccatcacagccatccctcaagccccagcagccagggctgaagccgttcttgcaaagcgccgccgcgacgactaaccaggcgacggcactcaaagaagcgctgcaaccgccaatccatctgggacaccttccactgcaagaaggagaattgccactggtgcaacagcaagtggcaccgtccgataagcctcccaagccggaactgccaggagtggattttgccgacccacagggaccttccctcccgggaatggatttcccagacccccaaggtcctagcttgccaggcctggacttcgccgacccgcaaggatcgaccatcttccagatcgcccgcctcatctcacacggaccaatgccgcaaaacaagcaatcccctctgtacccaggaatgctgtacgtgccgttcggagccaaccagctcaacgccccagcacggctgggaatcatgtcgagcgaggaagtggcgggcggacgcgaggaccctatggcttacggggccatgttcccgggattcggaggaatgcgccctggattcgaaggcatgccgcacaacccggccatgggtggagacttcaccctcgaatttgactctccggttgccgcgactaagggaccggaaaacgaagaaggaggagcccaaggaagcccaatgcccgaggccaaccccgacaatctggaaaacccggcgttcctcaccgaacttgagccagcaccgcatgcgggcctgctggccctgccgaaggatgacatcccaggtctgccccgcagcccgagcgggaaaatgaagggactgccgtccgtgaccccagccgccgcagatccattgatgaccccggagctcgcagacgtctaccggacttacgatgctgatatgaccacctccgtggacttccaggaggaggcaactatggataccactatggctccgaactccctgcaaacttcgatgccaggaaacaaggcacaggaaccagagatgatgcacgacgcttggcacttccaggagccg

SEQ ID NO: 5872 - DNA, 1341 bp, synthetic construct
  misc_feature 1..1341: note = source = /note="Description of Artificial Sequence: Synthetic coding sequence"
  source 1..1341: mol_type = other DNA
atgtcggcctcgaaaatcccgcttttcaaaatgaaggatctcatcctcatcctgtgcctgctggaaatgtccttcgcggtgcccttttttcctcaacagtcgggaactccgggcatggcttccctttcgctcgaaactatgcggcagctcggctcacttcaaagattgaacactctgagccaatactcccgctacggctttggcaagagctttaattctttgtggatgcacggactgctcccgcctcactccagcctgccgtggatgcgcccgcgagaacacgaaacccagcagtacgaatacagtctgccggtccaccctccgcccctgccgtcgcagccatccctgaagcctcagcagccgggactgaagccattcctgcaatccgccgcggcaaccacgaaccaagccactgcgctgaaggaagctctccaaccgccaatccatttggggcatctgccactccaagaaggtgaactcccactggtccagcagcaggtggcgccctcagacaaaccaccaaaaccggaactcccgggcgtcgatttcgccgatccacaaggaccgtcattgccggggatggacttccccgaccctcagggacctagcctcccaggactcgacttcgcggaccctcaagggtcgaccatcttccaaatcgcacgcctgatctcgcacggcccgatgccgcaaaacaagcagtccccgctgtaccctggaatgctctacgtgccgttcggtgccaaccagctgaacgcaccggcccgcctgggaattatgtcctcagaagaggttgccgggggaagagaggacccaatggcatatggagcgatgtttccgggattcggaggcatgcggcccggattcgagggtatgccgcataatccggcaatggggggagactttactctggaattcgactcgcctgtggcggcgaccaaaggacccgagaatgaggagggtggggcgcagggatcacctatgccggaagccaatccagacaacctggagaatccggctttcctgaccgagcttgagccagccccgcatgccggattgctggccctgccaaaggatgacattccaggactgccaaggtcccccagcggtaagatgaagggcctgccctcggtgacccctgccgcagccgaccccctcatgaccccggagcttgctgatgtgtaccggacctacgatgcagacatgactaccagcgtggatttccaggaggaagctactatggatactacgatggccccaaacagcctccagacctcaatgcctggcaacaaggctcaggagccagaaatgatgcacgacgcctggcacttccaggaaccg

SEQ ID NO: 5873 - DNA, 1341 bp, synthetic construct
  misc_feature 1..1341: note = source = /note="Description of Artificial Sequence: Synthetic coding sequence"
  source 1..1341: mol_type = other DNA
atgtctgctagcaagattcctctgttcaagatgaaggatcttattctcatcttgtgcctcctagaaatgtctttcgccgtgcctttcttcccacaacaatcaggtactcctggaatggccagtctttcactggaaacgatgcgccaattgggttcgcttcagcggttaaatacactctcacaatattctagatacggatttggaaaatctttcaactccctgtggatgcatgggttacttcctcctcacagttctctgccttggatgaggcctagagaacatgaaacccaacagtatgagtactcattaccagtccaccctcctccactcccttctcaaccgtcgctaaagcctcagcagcctggactcaaacccttcttgcagtcagcagcagctaccaccaaccaagctaccgcgcttaaagaagcattgcagccacctattcatctcggacacctcccattgcaagaaggagagcttcctttggtccaacaacaagttgcaccttccgataagccacccaagccggagcttccaggcgtcgattttgctgacccacagggtccttcactacccgggatggatttccccgatcctcaaggtccaagtcttccgggtcttgattttgcagatcctcaaggatcgacaattttccaaatagctcgtctgatatcgcacggcccaatgccccaaaacaaacaaagtccactatatcctggtatgctctacgtgccattcggagctaatcaattgaacgcacctgcgcgtcttggtattatgagtagcgaagaggtggcaggaggtcgtgaggacccaatggcgtacggggcgatgtttcctggatttggtggtatgaggcctggctttgaggggatgccacataatccagctatgggtggagatttcactttggagtttgatagcccagttgcagccacaaaaggtcctgagaatgaagaggggggcgcacaaggctcaccaatgcccgaggcaaacccggataaccttgaaaacccagcattcctcacagagttggagccagctccacatgcaggacttttggctttgccaaaggatgatattcctggcctacctcggtctcccagcggtaagatgaaaggtttacctagtgtgaccccagcagccgctgatccactaatgacaccggaacttgcagatgtctatcgtacatacgatgctgatatgaccacatcagtcgatttccaagaggaagccacaatggatactacaatggctccgaactctttgcaaacctccatgcctggaaacaaagctcaagagccagagatgatgcacgatgcttggcatttccaggaaccc

SEQ ID NO: 5874 - DNA, 1341 bp, synthetic construct
  misc_feature 1..1341: note = source = /note="Description of Artificial Sequence: Synthetic coding sequence"
  source 1..1341: mol_type = other DNA
atgagcgctagcaagattcctttattcaagatgaaggatcttatactcattctatgtctcttggaaatgagctttgcagtccccttcttcccccagcagtccggtacgccggggatggcgtctctctctttagaaacaatgcgtcagctaggaagccttcaaagactgaatacattatcccagtattctcgttacggtttcggcaagagcttcaatagcctgtggatgcatggactgctcccgccgcattcctcactgccatggatgagaccacgtgagcatgagacccagcaatatgagtactccctccccgtgcatccaccccctctgccgtcccaacccagtctgaagcctcagcagcctggtctaaagccgttcctgcaatctgcggccgcaactacaaaccaggctaccgcactgaaggaggcactccaacctccaatccatctagggcatcttccactgcaggagggagagctgcccttggtccaacagcaggtggccccgagcgataaaccgcctaagccggagctcccgggagttgacttcgctgatcctcagggcccctcgctacctggtatggattttcctgatccccaaggaccaagcttgcctggattggatttcgccgacccgcaaggatccacaatattccaaattgcacgtctaattagtcacgggccgatgccacaaaataagcaatcacctttgtacccaggcatgctatacgttcccttcggtgcgaaccaattgaacgctccagctaggcttggcatcatgtcttccgaagaagtcgcaggaggcagagaggatcctatggcctacggtgccatgtttcccggtttcggtggcatgcgcccaggttttgagggcatgccacacaacccggctatgggtggggacttcacactcgaatttgatagccccgtggccgcaacaaagggtccagagaacgaggagggcggagcacagggatcgcccatgccagaggccaaccccgataacctggagaacccggcgttcctcactgaactcgaacctgcgccacatgcaggtcttctcgccctacctaaagatgacatccctggtttgcctagatcccctagtggtaagatgaaggggctgcctagcgtcacaccggctgcggccgatccgcttatgacacccgaactcgctgatgtgtaccggacatacgatgcagacatgacaacgagtgtggactttcaggaagaagctactatggacacaacaatggcgcccaactcgcttcaaacatctatgcccgggaacaaagcacaggaacccgagatgatgcacgatgcgtggcatttccaggaaccg

SEQ ID NO: 5875 - DNA, 1341 bp, synthetic construct
  misc_feature 1..1341: note = source = /note="Description of Artificial Sequence: Synthetic coding sequence"
  source 1..1341: mol_type = other DNA
atgagcgcctcaaaaatccccctgttcaagatgaaggacttgatattgattctgtgcctgttggagatgtcttttgccgtgcctttctttccacaacaatccgggacgcctgggatggccagccttagtctagagaccatgagacagctgggaagcctccagcgactgaacaccctgagccagtacagtaggtacggatttggtaaatcttttaactctctgtggatgcacggccttctgcctccccatagcagtttaccttggatgaggccacgagaacacgaaacgcaacaatacgagtactctcttccagtgcacccccccccgctgccttcccagccttctttgaaacctcagcagccaggactcaaaccatttttacaatcagccgctgccacgaccaatcaggcgacggccctgaaggaggctctgcagcctcctattcacctcgggcacctcccactgcaggaaggggaactccctctggtgcaacagcaggtcgccccatctgacaaaccgcccaagcctgaacttcccggagtggactttgccgatccccaaggccccagtctcccaggtatggatttccctgacccacaagggcccagtctcccgggcctcgattttgcagatccacaagggtcaacaattttccaaatcgccaggctgatatcacacggacccatgcctcaaaataaacagtcaccattgtatcctgggatgctgtatgtgcctttcggcgccaaccagctgaatgcacccgctcgcctaggaatcatgagctcggaggaagtcgctggcggacgcgaggaccccatggcatatggagccatgttcccgggtttcggaggtatgagacctggtttcgagggaatgcctcacaaccctgccatgggcggggacttcaccctagagtttgattctcccgtggccgcaactaagggcccagaaaacgaagaggggggagctcaggggtctccgatgccagaggccaatccggacaatttagaaaaccccgccttcctaactgagctagaaccagctcctcacgccggtctactggccctgcctaaagacgacatcccgggccttcctcgctctccgtccggcaagatgaaggggctgccaagcgtcaccccagctgctgcggacccgctgatgaccccggagttggctgacgtctatagaacctacgatgctgatatgacaacctccgttgattttcaagaagaagcgacaatggataccaccatggcccctaattctcttcagacgagcatgcccggcaataaagcccaggagcctgagatgatgcacgacgcatggcactttcaggagccc

SEQ ID NO: 5876 - DNA, 1341 bp, synthetic construct
  misc_feature 1..1341: note = source = /note="Description of Artificial Sequence: Synthetic coding sequence"
  source 1..1341: mol_type = other DNA
atgtctgcttctaagataccactttttaaaatgaaagatcttatccttatcctatgtcttttagaaatgtcatttgcagttccattttttccacaacaatctggaacacctggaatggcatcattaagtttagaaactatgagacaactcggaagtctacaaagacttaatacattatcacaatattcaagatatggattcgggaagtctttcaattctttatggatgcatggattattaccacctcatagtagtttaccatggatgagacctcgtgaacatgaaacccaacaatatgaatattcacttccagtacatcctccaccattaccatctcaaccttcattaaaaccacaacaaccaggattaaaaccattcttacaatctgcagcagccactacaaaccaagcaactgcacttaaggaagctttacagccaccaattcatttaggacatcttccattacaagaaggagaacttcctttggttcaacaacaagtagctccatcagataaaccaccaaaaccagaattaccaggagttgattttgcagatccacaaggtccttcccttccaggtatggattttccagatccacagggtccatctttaccaggattagatttcgcagaccctcaaggttcaacaatctttcaaattgctagattaatttctcatggacctatgccacaaaataaacaaagtccactttatcctggaatgttatatgttccatttggtgccaatcaactaaatgctcctgcaagattaggaattatgtcatctgaagaagtagctggaggaagagaagatccaatggcatatggagctatgttcccaggatttggaggtatgagaccaggttttgaaggaatgcctcataatccagctatgggtggagattttacgcttgaatttgattcaccagttgctgcaactaaaggacctgaaaacgaagaaggtggagctcaaggttcaccaatgccagaagcaaatccagataatcttgaaaaccctgcatttttaactgaattagaaccagctccacatgctggtttacttgcattacctaaagatgatatacctggtttaccaaggtctccatctggaaagatgaaaggattaccttcagttacaccagctgctgctgacccattaatgactcctgaacttgctgacgtatatagaacgtacgatgctgatatgacaactagtgtagatttccaagaagaagctactatggatactacaatggctccaaattctttgcaaacatctatgccaggaaataaggcacaagaaccagaaatgatgcatgatgcttggcattttcaagaacca

SEQ ID NO: 5877 - DNA, 1341 bp, synthetic construct
  misc_feature 1..1341: note = source = /note="Description of Artificial Sequence: Synthetic coding sequence"
  source 1..1341: mol_type = other DNA
atgagcgcctccaagatacctctgttcaaaatgaaggatctgattttaatcttgtgcctacttgagatgtctttcgctgttccattcttcccacagcaatcgggaacacctggtatggcctcgctgtcgctagaaactatgcgccagctcggatctctgcaaaggctgaataccctgtcgcagtactcccgatacgggtttggaaagtcttttaactctctgtggatgcatggcctccttccacctcacagctcgttgccatggatgaggcccagagagcacgagacacagcagtacgaatactctcttccggtgcaccctccccccctgcctagccagccaagcctgaagccacagcagccaggtctaaagccctttctgcaatctgccgcggccacaactaaccaggcaactgcactgaaggaggctctacagcccccgattcacctgggacacttaccactgcaggagggcgaactcccactggtgcagcaacaagtcgccccaagcgataagccccctaagcctgaattacccggtgttgacttcgccgacccacagggtccttcactgcctgggatggattttccagatccacagggcccgagtctacccggcctggattttgcagaccctcagggctcaaccattttccagattgcccggctgatcagtcacggaccaatgcctcagaacaaacagtcgccgctttacccaggcatgttatatgtgccttttggcgctaatcaactgaatgcaccagcccggcttggaatcatgtcaagtgaagaggtagccggcggtcgtgaggaccccatggcttatggcgctatgtttcccgggttcggagggatgcgcccgggattcgaagggatgccccataacccggcaatggggggagacttcaccttggagttcgattctccagtggctgccacaaagggaccagaaaatgaggagggcggcgctcaaggcagccctatgcccgaagctaacccagacaatctcgaaaatcccgcttttctgaccgagctggagccagccccgcacgccggactcctagctctgcccaaggacgatattcccgggctgcccaggagcccatctggaaagatgaaagggctcccctcggtgactcctgccgccgccgacccgctcatgacaccagaactcgccgatgtgtaccggacctacgatgctgatatgacaacaagtgtggatttccaggaggaggccaccatggataccacaatggcacctaactcacttcagacatccatgcctggcaacaaggctcaggaacccgaaatgatgcacgacgcctggcactttcaagagcct

SEQ ID NO: 5878 - DNA, 1341 bp, synthetic construct
  misc_feature 1..1341: note = source = /note="Description of Artificial Sequence: Synthetic coding sequence"
  source 1..1341: mol_type = other DNA
atgtcagcttccaaaatccccctgtttaaaatgaaagacttaatcctgattttgtgtctgctagagatgtcattcgctgtgcccttctttcctcagcagtctgggacccctggaatggcctccctgtctttggagaccatgaggcagctgggttctctgcagcgtttgaatacgttatctcagtactcaagatacggattcggcaagtccttcaactccctctggatgcacggcttattgcccccgcacagctccctgccttggatgagaccccgcgagcatgagactcaacaatacgaatactcgctgcccgtccatccaccgccactcccctctcagcccagcctgaagccacaacaacctgggctgaaacctttcctccagtccgccgcagcgaccacaaaccaggcgaccgcactcaaagaggccctgcagccacctatccatctagggcacctccccttgcaggagggagagctaccactggtacagcaacaggtcgcaccctccgacaagccccccaagcctgaactcccgggagtagactttgcagacccacagggcccatcccttcctggaatggacttccccgatccccagggtccctctctgcctggtctagactttgcagatccacaaggctccactatttttcagatcgctagactgatatcacatgggcctatgccgcagaacaagcaatctccactgtatcccggtatgctttacgtgcctttcggcgcaaatcagctgaatgcacccgcacgactgggcattatgagctcggaagaggtagcaggcggcagagaggacccaatggcctacggggctatgttccccggttttggaggcatgaggcccggcttcgagggaatgccccataatccggccatgggtggcgacttcaccctcgaatttgattctccagtcgccgcaactaaggggccggagaacgaggagggaggggcgcaaggcagccctatgcctgaagctaaccccgataacttagagaacccagcctttctgacagaactggaaccagcaccacacgctgggctgttagccctccccaaggacgatatccccggcctgccacgcagcccaagtggcaaaatgaaagggttacctagcgtcacacctgccgccgccgatccgctcatgacacccgagctcgctgatgtatacagaacatatgatgcagacatgaccacctctgtagattttcaggaggaagctacgatggatacaaccatggcccctaatagcctacagacttccatgccgggaaacaaggcccaggagccagaaatgatgcatgacgcctggcacttccaagaacct

SEQ ID NO: 5879 - DNA, 1341 bp, synthetic construct
  misc_feature 1..1341: note = source = /note="Description of Artificial Sequence: Synthetic coding sequence"
  source 1..1341: mol_type = other DNA
atgagcgcatccaagatcccgttgttcaagatgaaggatctgatcctcatcctgtgcttgcttgagatgagcttcgctgtccccttttttccccaacagtcgggtacacccgggatggccagcctgtcgctggagactatgcgccaactaggatctctccagcgcctgaataccttaagtcagtactcgagatacgggttcggcaaatcattcaactctctctggatgcatggccttctgcccccgcattctagcctaccctggatgcgacctagagagcatgagacgcagcagtacgagtatagcttgccagtgcaccctcctcctctgccaagtcagccctctcttaagccccagcagcccggtttgaagccattcctacaaagtgccgctgccacaacgaaccaggctacagccttgaaggaggcgttgcaaccgccgatccatctcggccatctacctctccaggagggggaattgccactcgtgcagcagcaggtggccccctcggataaaccgcccaaaccagagctacccggtgttgattttgccgacccgcaaggacccagcttgcccggtatggacttcccagacccccaaggcccgagcctgcctggtctggacttcgctgacccacagggcagtacgatcttccaaattgcccgtctgatatcccatggcccaatgccacaaaacaaacagagccccctgtaccccggaatgctgtacgtgcccttcggtgctaaccagctcaatgcgccagcgcggttaggtattatgtcttctgaggaagtggctggcggccgtgaggatccaatggcctacggagcgatgttcccgggattcggcggaatgcggccgggtttcgaaggcatgccacacaatccggccatggggggagacttcaccctggagttcgattctccggttgctgctactaaaggcccagagaacgaagagggaggcgctcaaggctcgcccatgccggaggccaaccccgataatctagaaaacccagcattcttgacagagctcgagcctgctccccatgctggcctgcttgcgttgcccaaagacgacataccgggattgccgcgctccccaagcggtaagatgaagggactgccctccgttacccccgcggcagccgatccactgatgacccccgagctggcagatgtctacagaacatacgacgccgatatgacgacctcggtagattttcaggaggaggccacgatggatacaaccatggccccgaatagtctacaaacatcgatgccgggcaataaggcccaggagcccgaaatgatgcacgacgcctggcatttccaggagcct

SEQ ID NO: 5880 - DNA, 1341 bp, synthetic construct
  misc_feature 1..1341: note = source = /note="Description of Artificial Sequence: Synthetic coding sequence"
  source 1..1341: mol_type = other DNA
atgagcgcgtcaaagattccccttttcaaaatgaaggatctcattcttatactttgtctgttggaaatgtcgtttgcagttcccttttttccccaacaatcaggaactccagggatggcttcactgtcactggaaaccatgagacagttggggtcgcttcagcgcctgaacacgctgtcacaatacagcagatatggatttggaaagtcctttaactccctgtggatgcacggactgctcccaccgcatagctcactcccatggatgcggccgagagaacatgaaacccaacaatacgaatactcccttcctgtccatcctccgcctctgccttctcagccaagcctcaagcctcagcaacctggactgaagccatttctgcaatccgccgcagcaactaccaatcaggctacggcgcttaaggaggcacttcaacccccaatccacctcggacacctgcccctgcaggagggcgaattgccgctggtccagcagcaagtggctccctcggataagccccctaagccagagcttcctggcgttgactttgcggacccacagggtcccagccttcccggaatggattttccggatcctcagggaccatcccttcccgggctggacttcgccgatccccaagggagcactattttccaaatagcacgcctgatttcacatggtcctatgccccaaaacaaacaatcccctctttacccaggcatgctttacgtcccctttggtgcaaaccaactgaacgcacctgcgcgtctgggcattatgtcgtcggaggaagtggcaggtgggcgggaagatcctatggcgtacggagcaatgttcccgggatttgggggaatgcgaccgggttttgaaggtatgcctcacaatcccgcaatgggaggcgacttcaccctggaatttgattcaccagtggccgcaactaagggaccagagaatgaagaagggggtgcacaaggctccccaatgcccgaggcaaatcctgacaaccttgaaaacccagcatttcttactgaactcgagcccgccccgcatgctggtctgttggccctcccgaaggacgacatccccggacttccgagaagcccttcggggaaaatgaagggactgccatcggtgactccagcagccgcagatccactgatgacccctgaacttgccgacgtgtacagaacctacgacgctgatatgactacgagcgtggactttcaagaagaagcgacgatggatacgaccatggcgccgaactcactgcaaacgtcaatgccaggtaacaaggcccaagagccagaaatgatgcacgatgcatggcattttcaggaacct

SEQ ID NO: 5881 - DNA, 1341 bp, synthetic construct
  misc_feature 1..1341: note = source = /note="Description of Artificial Sequence: Synthetic coding sequence"
  source 1..1341: mol_type = other DNA
atgtccgcgtccaagatccctctcttcaagatgaaggacttgatcctgattctctgcctcctggagatgtcattcgcagtcccgttcttccctcagcagagcggaactccgggcatggcgagcctcagcctcgaaactatgcgccaactgggttccctccaaagactcaataccctgagccagtactcccggtacggtttcggcaagtcgttcaacagcctgtggatgcacggccttctgcctccccactcctccctgccatggatgcgtccaagggagcatgagactcaacagtatgaatactcactcccggtgcatccgcccccactcccatcgcagccgagccttaagccacaacaaccagggcttaagccgttcctccaatccgcggccgccaccactaaccaagctaccgccctcaaggaagctctccaaccgcccatacatctgggacacctcccgcttcaggagggagagctccccttggtgcaacaacaagtcgctccgtccgacaaacctccgaagcctgagctgccgggggtggactttgccgaccctcagggaccatcgctcccaggtatggacttcccagacccacagggaccgtcgttgcctggcctggatttcgcagacccgcagggatcaaccatctttcagatcgcgcggctcatttcccacggtcccatgccgcagaacaagcaaagccccctctacccgggaatgctctacgtgccatttggagccaaccagctgaatgccccagcgcgcctcggcattatgtcatcagaagaggtggcaggaggacgggaagatccaatggcatacggagcgatgtttcccggattcggcggaatgcgccctgggttcgagggcatgccgcacaatcccgcaatgggcggagatttcaccctcgaatttgatagtcctgtcgccgcaactaaaggtccagaaaacgaagaaggaggcgcccaggggtccccgatgccggaggccaatcctgacaacttggagaacccggccttcctgactgagctcgagcccgccccacatgcagggcttctcgcgctgccgaaagacgacatcccaggactgccacgcagtccgtcgggcaaaatgaagggactgccttccgtgacccctgcagccgcagatcctttgatgaccccggaactggccgacgtgtaccggacttacgacgcagacatgactacctccgtcgacttccaggaagaagccaccatggacacgactatggcgccgaactcgctgcagacctctatgcccggcaacaaggcgcaggagccggagatgatgcacgacgcgtggcatttccaggaaccg

SEQ ID NO: 5882 - DNA, 1341 bp, synthetic construct
  misc_feature 1..1341: note = source = /note="Description of Artificial Sequence: Synthetic coding sequence"
  source 1..1341: mol_type = other DNA
atgtcagcctcgaagataccgttgttcaagatgaaggacctgatcctcattctttgtctgcttgaaatgtcgtttgctgtgccattctttccacagcagtccggaactcctggaatggcatcactgtcacttgaaaccatgcgccagcttggatctcttcaacggttgaataccttgagccaatacagcagatacggcttcgggaagtcattcaatagcctgtggatgcacggactgctcccgccgcactcgtcgctcccctggatgaggccaagagagcacgagactcagcagtacgagtactccctgccagtgcatcctccgcctctgccctcacagccatctctgaagccacaacaaccggggctgaaaccgttcctccagtcagcagcggctaccaccaatcaggctaccgcgttgaaagaggcccttcaaccgccgatccacctcgggcatctccccctccaggagggtgaactgcctcttgtccagcaacaagtcgctccgtcggacaagccgccgaaaccggagttgcctggagtcgactttgcagacccacaaggcccctcgctgccggggatggatttccctgacccccagggaccatccctgcccggccttgacttcgccgatccgcagggatcgaccatcttccagatcgcgcgcctgatctcccatggcccgatgccacagaataagcagtccccgctgtatccgggaatgctctacgtgccattcggagcaaaccagctgaacgcccccgcaaggttgggcattatgtcgagcgaagaagtggcaggaggccgggaggatccgatggcctacggcgccatgttccctggtttcggtggaatgcggccgggcttcgaaggtatgccacataacccggccatgggtggggattttacgctggaattcgacagccccgtggccgcgacgaagggaccagaaaacgaggaaggcggggcccagggaagtccaatgccggaagcgaatccggataacctggaaaatcccgcgtttctcaccgagctggagccagcccctcacgctggactgctggcgctgccgaaagacgatattcccggactgccacgttcccctagcggaaagatgaaaggattgccttcagtcactccggcggcagctgacccgttgatgaccccagagttggcagatgtataccggacttacgatgccgacatgactacctcggtggactttcaagaagaggcaactatggacaccacgatggcccctaacagcctccagactagcatgcctgggaacaaggcacaggaaccagaaatgatgcacgacgcatggcacttccaagagcct

SEQ ID NO: 5883 - DNA, 1341 bp, synthetic construct
  misc_feature 1..1341: note = source = /note="Description of Artificial Sequence: Synthetic coding sequence"
  source 1..1341: mol_type = other DNA
atgagcgcatcgaagattcctctctttaagatgaaagatctgattctgatcctgtgtctgctcgaaatgagctttgcagtcccttttttcccccaacaaagcggtactcctggaatggccagcctgtcgttggaaactatgagacagcttggtagccttcagagacttaatactctttcacaatacagccggtacggatttgggaagagctttaactcgctctggatgcacggacttctcccaccacattcatcccttccttggatgcgccctcgagagcacgaaactcagcaatacgaatactcgttgcctgtgcatcctccacctcttccatcccaacctagccttaagccgcagcaaccgggtctgaagcctttcctgcagtccgcagcggcaactacgaaccaggccaccgctctgaaggaagcactccaacctcccatacatctgggtcaccttcctctgcaagagggcgaactgccgcttgtgcaacagcaagtggctccatcagataagcctcctaaacccgaacttccaggggtggatttcgcagatccacagggaccctcgctgccggggatggattttcctgatccccaaggaccttcactgccaggcctcgactttgcagatccccagggaagcaccatctttcagattgcaagactgatctcacacggaccaatgccacaaaacaaacaaagccccctctaccccggcatgctgtatgtgccctttggagccaaccagctgaacgcacctgcgagacttggtattatgtctagcgaggaggtggcaggtggtagagaggacccaatggcctacggcgcaatgtttcctggattcggaggcatgcggcctggcttcgagggtatgccacataatccagcaatgggcggggatttcaccctggaatttgacagccctgtggccgctaccaaggggccagaaaatgaggaaggaggggcacagggttccccaatgcccgaagccaatcctgacaacctcgaaaatccggcgtttctcacggagcttgagccagctccacatgcagggctgttggccctccctaaagatgatataccaggcctgcctcgctcgcctagcggaaaaatgaaaggactcccatctgtgactcctgcagctgccgatccgcttatgactcctgaacttgcagatgtctacagaacttacgacgcagatatgaccacctcagtggattttcaagaggaagccaccatggatactaccatggcacctaattctctccagacttcaatgccgggcaataaggcacaagagcctgaaatgatgcatgatgcttggcattttcaagaacct

SEQ ID NO: 5884 - DNA, 1341 bp, synthetic construct
  misc_feature 1..1341: note = source = /note="Description of Artificial Sequence: Synthetic coding sequence"
  source 1..1341: mol_type = other DNA
atgtccgcgtctaaaattcccctcttcaaaatgaaggatctgatcttgatcctctgtctgctggaaatgtccttcgccgtgccattctttccacagcagagtggaacccctggtatggctagtttgtcccttgagacgatgcgccagctgggcagtcttcagcgtctgaataccctgtcccagtactcccgctatggattcgggaaaagttttaattcactttggatgcatgggttgctccccccgcattccagcttgccatggatgagaccgcgtgagcatgaaactcagcagtatgagtactcccttcctgttcatcctcctccactgccttcccaaccttccctgaaaccgcagcagcctggcctgaagcctttcttgcagagtgccgccgccacgacaaatcaggctactgctctcaaagaggccctccagccccctattcacctaggtcacctgccactgcaggagggagaactccctctggtccagcaacaggttgccccttctgataaaccacctaaaccggagctgccaggtgtggacttcgccgatccccaagggccgagcctgcctgggatggacttccccgaccctcagggaccatcgcttcccgggctcgatttcgccgatccacagggctctacgatctttcagattgcacgcctgatctcccacggaccaatgccccagaacaagcagagtccactgtacccagggatgttgtacgttccttttggggcaaaccagctcaatgctcccgccagactgggaattatgagtagtgaagaagttgcgggcgggagagaagaccctatggcatacggcgccatgttccctggctttgggggtatgcgaccggggtttgaaggcatgccccacaatccagctatggggggagactttaccttagagttcgactcacccgtcgcggcgactaagggaccggagaatgaggagggcggagctcagggcagtcccatgcccgaagccaaccctgacaacctggaaaatccagcattccttacagagctcgagcccgcgccacacgctggcctgctggctctgccaaaagacgatattcccggacttccccggtccccctccggcaagatgaaaggcctccctagcgtaacacccgccgctgcagatccgcttatgacgcccgagctcgccgacgtttaccgcacctacgatgctgacatgacgacatccgtcgatttccaggaggaagcgaccatggataccacgatggcgccaaactcactccagacatctatgcccggaaataaagctcaagagccggagatgatgcacgatgcatggcattttcaagaaccc

SEQ ID NO: 5885 - DNA, 1341 bp, synthetic construct
  misc_feature 1..1341: note = source = /note="Description of Artificial Sequence: Synthetic coding sequence"
  source 1..1341: mol_type = other DNA
atgtccgccagcaaaattcctctgttcaagatgaaagatctcatcttgatcctttgtttgttagaaatgtcgtttgcagttccgttttttcctcaacagtcaggtacccccgggatggcatctctgtccctcgagacgatgagacagctgggaagtctgcagaggttaaatacactgtcacaatactctaggtacggctttggtaagagctttaacagcttgtggatgcacggtctgctccccccccactcctctcttccatggatgagaccgagggaacatgaaacccagcagtatgagtactcacttccagttcacccgccacctctgccgtcccagcctagcctgaaaccccagcagcctggactgaagcccttcttgcagtccgctgccgccaccactaatcaggccacggccctgaaagaagcactgcaacctcctatccaccttggccacctccctctacaggagggcgagctgccgttggtgcagcagcaagtcgccccaagcgacaagcccccgaaacctgagctcccaggagtagattttgcagatccacagggaccaagcctccctggcatggacttccccgaccctcagggaccatcccttcccggacttgactttgcagacccacagggatcaaccatattccagattgcccggctgatctctcatgggcccatgccccaaaacaaacagagtccactgtaccccgggatgttgtacgttccatttggggcgaaccagttaaatgccccagcacgtttaggcataatgtcttccgaggaggtcgccggcgggcgtgaagatcccatggcttatggcgccatgtttcccggctttggtggtatgaggcccggcttcgagggaatgccccacaaccccgcaatgggcggagactttaccttggagttcgattccccagtggctgctacaaagggccccgagaacgaagaagggggcgcgcaaggctcccccatgcccgaggcgaatccagacaacctggagaatccggccttcttgacggaactagaacctgcccctcatgccgggctgttggcacttccaaaagacgatattcccgggttaccccggtcccctagcgggaagatgaagggcctcccatcagtcaccccggcagcagctgacccactgatgaccccagaactcgctgacgtgtatcggacttacgatgcagatatgactacctctgtggactttcaggaggaagcaaccatggataccacaatggcacccaattcactccagacaagcatgcccgggaataaggcccaggagcccgagatgatgcacgacgcttggcactttcaggagccc

SEQ ID NO: 5886 - DNA, 1341 bp, synthetic construct
  misc_feature 1..1341: note = source = /note="Description of Artificial Sequence: Synthetic coding sequence"
  source 1..1341: mol_type = other DNA
atgtcagcgagcaagatccccctcttcaaaatgaaagacttgattctgattctatgtctccttgagatgagcttcgcagttcccttctttccacaacaatctggtacccctggtatggcctcactttctctggagacaatgaggcagctgggctctttacagcggttgaatactctgagtcagtatagtcgttacggcttcggcaaaagcttcaattcactctggatgcacgggctcttgcctccgcatagcagtttaccctggatgcgccccagggagcatgagacccaacaatacgagtatagtctcccagtgcaccctccacccctgccctcacagcccagcctaaaaccacaacaaccagggctaaagccgtttttgcagagcgccgccgccaccactaaccaggccaccgccctgaaggaggcactgcagcctcccatccatctgggccacctgcccctccaggagggcgaactgcccttggttcagcagcaagtagccccgtcagacaagccacctaagccggagctgccaggggtcgactttgctgatccccaggggccgtccttaccggggatggacttcccggaccctcaaggacccagtttgcccggtctcgactttgccgacccgcagggctcgacgatttttcagattgctagactaatctctcatggaccaatgccacagaataagcagagtcctctataccccggaatgctgtatgtgcccttcggcgccaatcagctcaatgcacccgcgcgtctcggaattatgtcctccgaagaagtggctggaggtagggaggatcccatggcctatggggccatgttccccggcttcgggggcatgcgtcccgggttcgaaggcatgccacataacccagcgatgggcggggactttaccctcgagttcgatagtcctgtggcagccaccaaaggccctgaaaacgaagagggaggggcccagggcagccccatgccagaagccaatccagacaatctggaaaaccccgcgtttctaactgaactggagcctgccccacacgccggacttctcgctcttcccaaggacgacattccagggctgccccggtctccgtcagggaagatgaagggtctcccatcagtgacacctgcagctgcggaccctctcatgactcctgaactggctgacgtgtatcggacgtatgacgcggacatgactacttctgtggacttccaggaggaggctaccatggataccaccatggctccaaacagcctgcagacaagcatgcccggcaataaggcacaggagcccgagatgatgcatgacgcctggcacttccaagagccc

SEQ ID NO: 5887 - DNA, 1341 bp, synthetic construct
  misc_feature 1..1341: note = source = /note="Description of Artificial Sequence: Synthetic coding sequence"
  source 1..1341: mol_type = other DNA
atgtccgcgagcaaaataccactctttaagatgaaagacctgattttgatactgtgtttgcttgaaatgagctttgcagtgcctttcttccctcaacagtcaggaactccaggcatggcaagcctttcgcttgaaaccatgcgtcagctgggatcactccaacggcttaacacgctctctcaatacagcagatacggatttggaaaatcgtttaactcgttgtggatgcatggacttttgcctccacatagttcgcttccctggatgcgcccaagagagcatgaaacgcaacagtacgaatactccctcccagtgcacccaccaccactcccttcgcagccatcgctcaagcctcaacaacccggattgaaaccctttcttcagtccgcagcagcaacgactaatcaggcaactgcccttaaggaagcactgcagccacctatccacctgggacatcttccactccaagagggtgaactgcccctcgtgcaacagcaagttgcaccctcagataagccaccaaagccggagctgccaggggtggactttgcagatcctcagggaccatcacttcccggcatggactttccagatccacaggggccttccctgcctgggctcgatttcgcagacccccaggggtcaactattttccagatcgcgaggctgattagccacggtcccatgccacaaaacaagcagtcacctctctacccggggatgctctacgttcctttcggtgcaaaccaattgaacgcaccggcacgtctgggtattatgtcatccgaagaggtggctggtggaagagaggaccctatggcatacggcgcaatgtttcctgggtttggtggaatgcgccctggctttgagggcatgcctcacaaccctgcaatgggaggagattttaccctggaattcgactcgccagtggcggcaaccaaggggccggagaatgaagagggaggcgcacaagggtcccctatgcctgaagcgaacccagataacttggagaatcccgcatttctgactgaactggagccagcaccccacgccggactgcttgccctgccaaaggatgacattccgggactgccccgctccccatccggtaagatgaaaggacttccttccgtgactcctgcagcagccgacccccttatgactcctgaactggcagatgtttaccggacctatgatgccgacatgactacctcagtggatttccaggaagaagcgaccatggacacgaccatggcccctaactccctgcaaaccagcatgccaggtaacaaagcacaagaacccgagatgatgcacgacgcatggcatttccaagagccc

SEQ ID NO: 5888 - DNA, 1341 bp, synthetic construct
  misc_feature 1..1341: note = source = /note="Description of Artificial Sequence: Synthetic coding sequence"
  source 1..1341: mol_type = other DNA
atgagcgccagtaagatcccccttttcaagatgaaggacttgatcctcatcctgtgtcttctagagatgtcattcgccgtaccattcttcccacagcagtctggaactcctggtatggcgagtctgtctcttgaaacgatgagacagctgggaagcctgcagagactgaatacgctgagccagtactcaagatacggctttggaaagagtttcaatagtctgtggatgcatggtctcctacccccccattctagcctgccttggatgcgcccaagagaacacgaaacccagcagtacgagtactctctccctgttcaccccccaccactgccttcacaaccgagtctcaagcctcagcagcccggactgaagcctttcctgcagtctgccgccgcgactaccaaccaagccaccgctcttaaggaggcattacaaccccccatccacctaggtcacttgcctctgcaggagggtgagcttccactcgtgcagcagcaggtcgctccctcggacaaaccgcctaagcccgaattacctggggtggactttgctgatccacagggtccatcactgcccggcatggacttccctgacccccagggtccgtctctgccaggcctggatttcgctgacccacaggggtctactatctttcagatcgcccggctgatctcacacggtcccatgcctcagaacaagcaaagcccattgtaccccggcatgttgtatgttccctttggggcgaaccaacttaacgccccagcacggttgggaattatgtcaagcgaagaggtagccggtgggagagaagatcctatggcttacggtgcaatgttccctggtttcggtggtatgcggccaggcttcgaaggaatgccgcacaacccagctatgggcggcgatttcacactcgagtttgatagcccggtggccgctaccaagggtccagagaacgaagagggaggagctcaggggtccccaatgccagaagcgaacccagataatctggaaaaccctgcattcctgactgagctggaacccgccccccacgccgggctactcgccctgccgaaagatgatatccccgggctgccacgctctccatccggcaagatgaagggactgccctctgtgaccccagcagcggcagatcccctgatgacaccagagctggcagacgtctatagaacatatgacgccgatatgacaactagcgtcgatttccaagaggaagctaccatggacacaaccatggcccccaactccttgcagacgagcatgcccggaaacaaggcacaggagcctgagatgatgcatgatgcttggcattttcaggaaccc

SEQ ID NO: 5889 - DNA, 1341 bp, synthetic construct
  misc_feature 1..1341: note = source = /note="Description of Artificial Sequence: Synthetic coding sequence"
  source 1..1341: mol_type = other DNA
atgagcgcatcgaaaatcccgcttttcaagatgaaggatctgatcctgatcctctgtctgctcgaaatgagcttcgctgttccgttcttcccgcaacaatctggaactccaggaatggcgtcactcagcctggagacgatgcgccaactcggctcccttcaaagactcaacactctgagccagtactcccggtacgggttcggaaagagcttcaactcgctgtggatgcacgggctcctgccaccgcactccagcctgccttggatgcggccgcgggagcatgaaacccaacagtacgaatattccctgccagttcacccgccacccctcccatcgcaaccatcattgaagccgcagcagccaggtctgaagccattcctgcagagtgctgccgcaactactaaccaagccactgcgcttaaagaagcactgcagccgcccatccatttgggccacctccctttgcaggaaggagaactcccgctggtccagcagcaggtcgcaccttcagacaagccgcctaaaccggaactgccgggggtcgattttgcggacccgcaaggcccctcgctgccgggcatggactttccagatccgcaggggccgtcgttgccgggactcgacttcgccgatccgcaaggatccaccatctttcaaatcgcacgccttatctcgcatggccctatgccgcagaataaacagagcccgctgtaccccggaatgctctacgtcccgttcggagcaaaccaacttaatgccccagcaagactcgggattatgtccagcgaagaggtggctggtggaagagaggaccccatggcgtacggagctatgttccctgggttcggcggcatgcgcccgggattcgaaggaatgccgcataacccggcaatgggaggcgactttactttggaattcgacagcccggtggcagcgactaaggggcctgaaaacgaggaaggcggtgcccagggctcgccgatgccggaggcgaaccctgacaatctggagaacccggcctttctgactgaactggaaccggctccccatgccggattgctggcactgccaaaggacgatatcccaggacttccgagatcaccttcgggtaagatgaaaggactcccgtcagtgaccccggccgcagccgacccgctgatgacgccggagctcgctgatgtctaccggacctacgacgctgacatgaccacgtcggtggatttccaggaggaagcaaccatggacaccactatggcgccgaattccctgcaaactagtatgccgggtaataaggcgcaagagcccgagatgatgcatgatgcctggcatttccaagagccg

SEQ ID NO: 5890 - DNA, 1341 bp, synthetic construct
  misc_feature 1..1341: note = source = /note="Description of Artificial Sequence: Synthetic coding sequence"
  source 1..1341: mol_type = other DNA
atgtccgctagtaagatccctctgtttaagatgaaggatcttattctgatactgtgcctccttgagatgtcattcgctgtccctttcttccctcaacaatcagggacacctgggatggcaagcctaagtctagaaacgatgaggcagctggggagcctacagcgacttaatacattatcacagtactcccgttacggatttggaaagagcttcaatagtctctggatgcacgggttgttgccaccccatagctctctgccctggatgcgtccccgtgagcatgagacccagcagtacgaatactctcttcccgtacacccgccccctcttccaagccagccctccctgaagccccagcagccagggttgaagccctttctgcagtctgcagccgctaccacaaatcaggccaccgccctgaaggaggccctgcagccacccatccacctaggacacctgccactgcaggagggggagctgccacttgtccagcagcaagtcgcgccctctgacaagccacccaagccagagctccctggagtggacttcgccgaccctcagggtccaagtctcccaggcatggactttcctgatcctcaggggcctagtcttccaggccttgatttcgctgacccacaggggtctaccatcttccagatcgcccgcctgataagtcacggccctatgccacaaaacaagcaatcccctctgtatccagggatgctatatgtcccgttcggcgctaatcagctcaacgcgcccgctaggctaggtataatgtccagtgaggaagttgccggggggcgggaggacccaatggcctatggagccatgttccccggattcggcggaatgagacccgggttcgagggcatgccacacaacccagccatggggggggattttacactggaattcgattcaccagtggccgccactaagggccctgagaatgaagaaggcggcgcccagggctcccctatgccagaggccaacccggataatctggagaatccagccttcttgacagagctggaacctgcacctcacgcgggactgttggcactgcctaaggacgatattcccggccttccacggtctccctcgggcaagatgaagggactgccctccgttacccccgcagcagctgatccactcatgactccagagctggccgacgtatacaggacttacgacgcggacatgactacgagcgtcgactttcaagaggaggcaaccatggacactacaatggccccaaatagcttacagacctccatgccaggcaacaaagctcaggagcctgaaatgatgcatgacgcctggcactttcaagagccg

SEQ ID NO: 5891 - DNA, 1341 bp, synthetic construct
  misc_feature 1..1341: note = source = /note="Description of Artificial Sequence: Synthetic coding sequence"
  source 1..1341: mol_type = other DNA
atgagcgcaagcaagattcctctgtttaagatgaaggacctcattctcattctttgcctgctcgagatgtcttttgccgtccctttctttccgcagcagtccgggacccccgggatggcgtcgctctctttggaaaccatgcgccagctcgggtcgcttcagaggcttaataccctgtcgcaatactcccggtacggctttggaaagtcctttaactccctttggatgcacgggcttctccctcctcactcgagccttccatggatgcggcctagagagcatgaaacccagcaatacgaatactcgctgcctgtgcatcctccccctcttccgagccaaccttccctcaaaccacaacagcccggcctcaaaccgtttctccaaagcgcagctgctactaccaaccaggcgacggctctgaaggaagcgctccagcctcccattcacctgggacatttgccacttcaagagggtgaacttcccctggtgcaacaacaagtggcacccagcgataagcctccgaagcctgaattgcccggagtggacttcgcagatccccaaggaccgtcacttccaggaatggatttccctgatccacagggacctagcctccctggccttgatttcgcagaccctcaaggctccacgatcttccaaattgctagactgatttcccatggtccaatgcctcagaataagcagtccccactgtaccctggaatgctttatgtgccctttggagcaaatcagcttaacgcacctgcgcgcctcggaataatgtcgtcagaagaagtggcaggagggagagaggacccgatggcatatggagcgatgtttccaggttttggtggcatgcgaccggggttcgaaggcatgcctcacaaccctgcaatgggcggcgattttaccctcgaatttgattcgcccgttgcagcaactaagggacctgaaaacgaggaaggcggggctcaaggaagcccaatgcctgaagcaaacccggacaacctcgaaaacccagcatttcttaccgaacttgagcctgcaccccatgctggactgcttgctctgcctaaggatgacatccctggccttccccgcagcccatcaggaaagatgaagggtctgcctagcgtgactcctgctgccgcagacccacttatgaccccggagcttgcagatgtctaccggacctacgacgcggacatgacgacttcggtcgattttcaagaggaagccactatggataccaccatggcgcctaattcacttcaaacttcaatgccaggcaataaggcacaagaaccggagatgatgcatgatgcctggcatttccaagaacca

SEQ ID NO: 5892 - DNA, 1341 bp, synthetic construct
  misc_feature 1..1341: note = source = /note="Description of Artificial Sequence: Synthetic coding sequence"
  source 1..1341: mol_type = other DNA
atgagtgcttcgaagattcccctgtttaagatgaaagatctgattctaattctctgtctgcttgagatgtctttcgccgtgcctttcttccctcagcagtcagggacccccggcatggcgtctttgtctttggagacaatgaggcagctgggcagcctccagagactcaacaccctcagtcagtattctcggtacggtttcggcaagagcttcaattcattgtggatgcacggtctgctgcccccccactcatccttgccgtggatgcggccacgagaacatgagactcagcagtacgaatactcactgcccgtccacccccctcccctgccctcgcagccctccctcaagcctcaacaacccggcctgaagccatttctccagagtgcggctgccactaccaatcaggctaccgccctcaaagaggcactgcagccacccattcatctgggacatctgcctctccaagaaggggagctacccttggtgcagcagcaagttgccccatctgacaagccgccaaagcccgaactgcctggcgtggacttcgccgatccccaaggtccctccctgccaggaatggattttccagaccctcagggcccttcattgcccggcttagacttcgccgatcctcagggcagcaccatctttcaaattgccaggctcatctcacatggccccatgccacaaaacaagcagtccccactttatcccggcatgctttatgtcccttttggcgcgaatcaacttaacgccccggcccgtctggggattatgtctagtgaagaagtggcgggcgggcgcgaggatccgatggcttatggtgctatgtttccaggcttcgggggaatgcggccggggttcgagggcatgccccataacccagccatgggcggcgacttcacactggagttcgactctcccgttgctgccacaaaagggcctgagaacgaagaaggcggcgcgcaaggaagtcccatgcccgaagcgaatccagacaatttagagaatcctgcttttctgacagaactggagccggcacctcatgctggactgttagctctgcctaaagatgatatccctggcctgcccaggagccctagcgggaaaatgaagggcctgccctctgtcacccccgccgcggcagacccgttgatgacgccagaactggccgatgtgtacaggacatacgacgccgatatgacaacaagcgtagatttccaagaagaagccacaatggataccactatggcgcctaatagccttcaaacctctatgcccggtaacaaagctcaggagcctgaaatgatgcatgacgcctggcactttcaggaacca

SEQ ID NO: 5893 - DNA, 1341 bp, synthetic construct
  misc_feature 1..1341: note = source = /note="Description of Artificial Sequence: Synthetic coding sequence"
  source 1..1341: mol_type = other DNA
atgagcgcttcaaagattcccttgttcaaaatgaaggatctcattctgatcctgtgcctcctggaaatgtcttttgctgtgccttttttcccacagcagagtggaactccagggatggcttcgctctctctggagacaatgaggcagctcggcagcctccagcggctgaatacccttagtcagtacagcagatatggttttgggaagagttttaactcattatggatgcatggtttgctgcctcctcactcaagtctcccttggatgagaccaagagaacacgagacacagcagtatgagtattctttgcctgtacacccaccccctcttccatcccagccatctctcaaaccacaacagcccggactcaaacccttccttcagtcggcagctgcaaccaccaaccaagctaccgcccttaaggaggccctgcaacccccaatccacctcggccacctgccgctgcaagagggggaacttcccctggtgcagcagcaggtggccccaagcgataaacccccaaagccagaactgccgggagtcgactttgccgacccccagggtccatcccttcccggtatggacttccccgacccacaagggccctccctccctggactggatttcgctgatccacaagggtccacaatcttccagatcgctagactcatatcccatggtccaatgcctcagaacaagcagtcccctctttaccccggcatgttgtacgtgcctttcggagcaaaccaactgaacgcccccgcaaggctcgggatcatgagctcggaggaagttgccggggggcgggaggacccaatggcgtacggggcaatgttccccggttttggaggcatgagacccggctttgagggaatgccacataaccccgccatggggggagactttacactcgaattcgattcacccgtagctgccacaaagggcccagagaacgaggaaggaggtgctcagggaagtcccatgcccgaagcgaacccagacaatctggagaaccccgcattcctgaccgaactcgagcctgctcctcacgctggcctgcttgctctgcccaaagacgatattcctggacttccccgatccccaagtggcaagatgaaggggttgccttcagtgactcctgccgccgcagatcccttaatgactcctgagcttgcagacgtctatagaacctacgatgccgacatgacaacatccgtcgatttccaagaagaggctacgatggacaccaccatggctcccaattcattgcagacaagtatgccaggcaacaaagcccaggagcccgagatgatgcatgacgcctggcattttcaagaacct

SEQ ID NO: 5894 - DNA, 1341 bp, synthetic construct
  misc_feature 1..1341: note = source = /note="Description of Artificial Sequence: Synthetic coding sequence"
  source 1..1341: mol_type = other DNA
atgtccgcaagcaagatcccactcttcaagatgaaggatcttatcctgatactgtgccttctggagatgtcgtttgcagtgcctttctttcctcaacagtcaggcacgccaggaatggcaagccttagcctggaaaccatgcgacaacttggctcgcttcaaagactgaacactctttcccaatactcgcggtatggattcgggaagtcctttaactcgctttggatgcatggtttgcttccacctcattcatcgctgccttggatgcgccctcgggagcatgaaactcagcagtacgagtactcgctgcctgtgcatccgccgcctctgccctcgcaaccctccctgaagccgcaacagcctggtttgaagcctttcttgcaatccgcagccgctactaccaatcaggcaaccgcccttaaggaggcactgcaaccccctatccatctcggacatctccccctccaagaaggagagctccctctcgtgcagcagcaagtggccccatcggataagccccctaaacccgagctccccggtgtggattttgcagatcctcaaggtccgagcctcccaggtatggatttcccggaccctcaggggccatcgcttcctggacttgacttcgcagatccccagggctcgaccattttccagattgcgcgtcttatttcgcacggtccaatgccacagaacaaacagtcacccctttacccagggatgctgtacgtgcctttcggcgcaaaccagctcaacgcaccagcacggctcggtatcatgagctccgaggaggtggccggtggaagagaagatccaatggcgtacggtgccatgtttcctggatttggaggcatgcgccctggatttgaaggtatgcctcataaccctgccatgggaggagattttaccctggaatttgacagccctgtcgccgcgaccaaagggcctgaaaatgaggaaggtggagcgcagggttcaccaatgcccgaagcaaatcctgataatcttgagaatccagccttccttactgaacttgaaccagcaccacatgctggactgctcgcacttcccaaggacgatataccaggactgccccgcagcccttcgggtaagatgaagggactgccttcggtcaccccagccgcagctgatccactgatgacccctgagcttgcagatgtctacagaacttacgatgcggatatgaccaccagcgttgactttcaggaagaagccactatggacactactatggcgccgaactccttgcagacttcaatgccaggcaataaagcccaggaaccggaaatgatgcacgatgcgtggcatttccaagagcca

SEQ ID NO: 5895 - DNA, 1341 bp, synthetic construct
  misc_feature 1..1341: note = source = /note="Description of Artificial Sequence: Synthetic coding sequence"
  source 1..1341: mol_type = other DNA
atgagcgcttccaaaatacccctgttcaaaatgaaagacctcattctgatcttgtgcctcctggagatgtcattcgccgtaccatttttcccccagcagagtggaacccctggcatggcttccctgtctctggaaacaatgcgccagttaggatcacttcaaaggctcaatacactcagccagtattcccggtacggtttcggaaagtcattcaattctctttggatgcatggactgcttcccccgcacagttccctgccatggatgagaccaagagagcacgaaactcagcagtacgagtattccctaccagtacatccccctccgttgccgtcccagccgtccctcaaaccacagcagcctgggcttaaacctttcctgcaaagtgccgccgccacaaccaatcaggctaccgctctgaaggaggccttacagcctcccattcacctggggcaccttcctctgcaggaaggagagctgcctctggtacagcaacaagttgcgccgagtgataagccgcccaaaccagagctgcctggcgtcgatttcgccgacccgcagggacccagtctgccaggtatggatttccccgatccccagggcccgtccctgccaggactagactttgctgacccacaggggagcaccatcttccaaattgcaaggctgattagccacgggccgatgccgcagaataagcaaagcccgctgtatccaggaatgctttacgttccgtttggtgctaatcagcttaacgcccccgcccgactgggaatcatgtccagcgaagaggtcgccggagggcgtgaggatcccatggcatacggggcaatgttcccgggttttggggggatgaggccaggattcgagggaatgccgcacaaccccgcaatgggcggagacttcactctggagttcgattcccccgtggccgccaccaagggtccagagaacgaggaaggcggagcccagggttcgccgatgccagaagctaatcccgataatctcgagaaccccgctttcttgaccgagcttgaaccagctccacacgctgggctgcttgccttacctaaagacgacatccctggcctgccaagaagtccatccgggaaaatgaagggactgccatctgtgacccctgctgccgccgaccctctaatgactccagagttagccgatgtctaccgtacatacgatgccgatatgaccacctccgtggattttcaggaggaagccacaatggatactactatggctcccaatagcctccagacatctatgcccggcaataaggcacaggagccggagatgatgcatgatgcttggcacttccaggaaccg

SEQ ID NO: 5896 - DNA, 1341 bp, synthetic construct
  misc_feature 1..1341: note = source = /note="Description of Artificial Sequence: Synthetic coding sequence"
  source 1..1341: mol_type = other DNA
atgtcggcatcaaagatcccactttttaagatgaaagatctgatcctcatactgtgcctcctcgaaatgagcttcgcagtgcctttcttcccgcagcagtccggtactcccggaatggcttcactgagccttgaaactatgcgccagctgggatctctccagcggctcaatactttgtcccaatactcccgttatggattcggcaagagcttcaattccctgtggatgcatgggctgctcccgccacatagctcactcccatggatgcgcccacgcgaacacgaaactcagcagtacgaatactcactgccagtgcatccgccgccgcttccaagccaaccgtccttgaagcctcagcaaccgggcctgaagccgttcctccagagcgcggccgctactaccaatcaggctactgcactgaaagaggcacttcaacctcccatccacctgggacacttgccactgcaggagggagagctgccgctggtccagcagcaagtggccccgtcggacaagccgccgaagccggaactgccaggagtggactttgcagacccccaaggaccatccctcccgggaatggacttcccggatccgcagggaccgtcacttccaggacttgactttgctgatccacagggatcaactatcttccagatcgcccgcctgatttcgcacgggcctatgccccagaataagcagtcccccctttacccgggcatgctctacgtcccgttcggggcgaaccagctcaacgcgccggccagactgggaatcatgtcctcggaggaggtggcaggcggaagagaagacccgatggcgtacggggcaatgttcccgggattcggcgggatgcggccgggtttcgagggcatgcctcataacccggcaatgggaggcgacttcaccctggaattcgatagcccggtggcggctaccaagggaccggagaacgaagagggaggagcccagggttcgccaatgccagaggctaatcctgataacctggagaaccctgcattcctgactgaactggaaccggcgccgcatgccggcttgctggcactgccgaaggacgatatccccggactgccgcggtcgccatcaggaaaaatgaagggcctcccgtcggtgactcctgctgcagccgatcctctgatgactcctgagttggccgacgtgtacagaacttacgatgccgacatgactaccagcgtggatttccaggaagaggcaaccatggacacgacgatggcacccaatagcctgcaaacttcgatgccggggaataaggcccaagaacctgagatgatgcacgatgcatggcacttccaagaacct

SEQ ID NO: 5897 - DNA, 1341 bp, synthetic construct
  misc_feature 1..1341: note = source = /note="Description of Artificial Sequence: Synthetic coding sequence"
  source 1..1341: mol_type = other DNA
atgtccgcctcgaagatccctctcttcaaaatgaaggacctgatcctgatcctctgcctgttggagatgtcgtttgccgttccctttttccctcagcagtcaggaaccccggggatggcgagcctgtccctcgaaaccatgagacagcttggaagcctgcaacggctgaataccctgtcccagtactctcggtacggattcggaaagagctttaactcactgtggatgcacggtttgctccctcctcattcctccctgccatggatgaggccacgagagcacgaaacccaacaatatgagtactccctgccggtgcacccgccgccgcttccgtcgcagccgagcctgaagccacaacagccgggactgaagcctttcctgcagtccgccgccgctaccactaaccaggccactgctctgaaggaggctttgcaaccgcccatccacctgggccatctgccgctgcaggaaggagaactgcctctcgtccaacagcaggtcgccccgagcgataagccgccaaagcctgaactgcctggagtggacttcgcagatcctcagggaccttcactgccgggtatggatttcccggatccgcaggggccgagcctcccgggcctggattttgcggacccacagggtagcaccatcttccaaatcgctagacttatctcgcacgggccgatgccgcaaaacaaacagtcgccgctgtaccctgggatgctttacgtgccgtttggagcgaatcagctcaacgccccggctcgccttggcatcatgtccagcgaggaggtggctggcggccgcgaggacccgatggcatacggggctatgttcccgggcttcggcgggatgcggccagggttcgagggaatgccgcacaatccagccatggggggagacttcacgctcgaattcgattcgccggtcgcagcaacgaagggccctgagaatgaagagggcggagctcagggcagccctatgccggaggcgaaccccgacaatctggagaacccagcttttctcactgaactcgaacctgcacctcacgcgggactcctggcgcttccgaaggacgatatcccgggcctgccgcggtcgccgtcgggcaagatgaagggcctcccgtcggtgaccccggccgcggcggacccgcttatgactccggaactggcagacgtgtataggacctacgatgcagacatgacgacctcggtggacttccaggaagaagccactatggacaccactatggccccaaactccctccaaacttcgatgccgggaaacaaggcgcaagaaccggagatgatgcacgatgcatggcacttccaagaaccg

SEQ ID NO: 5898 - DNA, 1341 bp, synthetic construct
  misc_feature 1..1341: note = source = /note="Description of Artificial Sequence: Synthetic coding sequence"
  source 1..1341: mol_type = other DNA
atgtctgcctctaagatccccctgttcaagatgaaggatctcatcctgatcttgtgccttcttgaaatgagcttcgcagtaccttttttcccccagcagtcgggtacacctggtatggcctcgctctcgctggaaactatgagacaactgggtagcctgcagcgcttgaatactctatcgcagtactcacgctacggtttcggtaagtcatttaactcgctctggatgcacggcctacttcccccccactccagcctcccgtggatgcgacctcgcgaacacgaaacccagcagtatgagtacagcttgcctgtccaccctcctcccttgccctctcaaccctctcttaagccccaacagcctggtttgaagccatttttgcaatccgccgcggccaccactaatcaggccactgcgctcaaggaggccctccagcctccaatccaccttggtcatctgcccttgcaggaaggtgaattgcccctcgtccagcaacaagtcgccccttccgataaaccccctaagccagagttgcccggcgtcgacttcgcggatccccagggaccgtccctgccaggtatggacttcccggaccctcaaggcccgagtctccccgggttggatttcgctgacccgcagggctctaccatcttccagattgcacgcctgatttcccacggaccaatgccgcaaaacaagcaatcccctctataccccggtatgctttacgttccattcggagcgaaccagctcaacgcccctgcccgcttggggatcatgtcgtctgaggaggttgctggcggtcgagaggatcccatggcttacggcgctatgtttcccggttttgggggaatgcgcccgggctttgagggtatgccacacaaccctgccatgggcggagatttcactttggaatttgactctccggtggccgctaccaagggccctgagaatgaggaaggcggtgcacagggctctcctatgcccgaggcgaaccccgataacttggagaacccagccttccttacggaactcgaacccgctccccacgctggactcctcgccctccccaaggatgacatcccggggcttccccgcagccctagcggtaagatgaagggattgcctagcgttacgcctgccgcggccgatcctctgatgacaccagagctggcggacgtataccggacgtacgatgccgacatgacgacgagtgtcgacttccaggaggaggcgacgatggacaccactatggctccgaacagtctccagacgtccatgcccggcaacaaggctcaggagcctgagatgatgcacgacgcctggcacttccaggagccc

SEQ ID NO: 5899 - DNA, 1341 bp, synthetic construct
  misc_feature 1..1341: note = source = /note="Description of Artificial Sequence: Synthetic coding sequence"
  source 1..1341: mol_type = other DNA
atgagcgcctccaaaatcccactatttaaaatgaaagatctgattctgatcttgtgtctcttggagatgtcttttgccgttcccttctttccccaacagagcggaaccccgggtatggcctcactgagtcttgaaactatgagacagctgggctctcttcaacgtctcaacactctgagccagtactctcgctacgggtttggcaaatcctttaatagcctctggatgcacggactgctgcccccacatagctctctgccatggatgagacctagagagcacgaaacgcagcaatacgaatatagtttgccagtccacccacccccactcccctctcagccttccctaaagccccaacaacccggcttgaagccattcctccagtctgcggccgctacgactaaccaagctaccgcgttaaaagaagcactgcagccgccgatccacctaggtcatctccccctgcaagaaggggagctgcctctggtgcagcagcaggtcgcccccagcgacaagccacctaaacccgaactccccggggtcgatttcgcagaccctcagggtccctcactccccggtatggattttcctgatccacagggtccatcactgccaggactcgactttgctgaccctcaaggatctactatcttccagatcgcacggttgatttctcatggccccatgccccagaataaacagtcacctctgtaccccggtatgctctatgtgccatttggtgcaaaccagctcaacgctcccgcccgtttaggcataatgtccagcgaggaggtcgccggaggcagggaagacccgatggcctacggggcgatgtttccaggatttggtggcatgcggcctgggtttgagggaatgccccataaccccgctatggggggcgacttcacactcgaattcgactcccctgtagcagctacaaaagggccagagaatgaggaggggggcgcccaaggtagccccatgcctgaggcaaatcccgataatttggaaaatcctgcctttcttactgaacttgaaccagccccccatgctggcttgctggctcttcccaaagacgacatccctggcttgcctagaagcccttcgggaaagatgaaaggattaccaagcgtgacacctgcagctgcagaccccctgatgactcccgaactcgcagacgtgtatcggacgtacgacgcggacatgactacttctgtggacttccaggaggaggctacaatggacactacaatggcccctaactccctgcaaactagcatgcctggcaacaaagctcaggagcccgagatgatgcacgatgcatggcactttcaggaaccc

SEQ ID NO: 5900 - DNA, 1341 bp, synthetic construct
  misc_feature 1..1341: note = source = /note="Description of Artificial Sequence: Synthetic coding sequence"
  source 1..1341: mol_type = other DNA
atgtctgcatcaaaaatacctctctttaagatgaaagatttgattctgatcctgtgcctgctcgaaatgtcattcgcagtgcctttcttcccccagcaatcagggacaccaggaatggccagtctttctctagaaactatgcgacagctcggatctttacagcgactgaacacactatcacagtatagtagatatggatttggaaaaagtttcaactccctctggatgcatggactgctgcctcctcattctagtttgccttggatgagacctagggagcacgagacacagcagtatgaatattcactccccgtgcatcctccacccttaccttcgcagccatctctcaaaccacagcagcctgggctaaaaccatttcttcagtcagcagccgcgacaactaaccaggcaacagcacttaaagaggctctccagcctcctattcatctcgggcacctgcccttgcaggaaggggaacttcctctcgtccagcagcaggtggccccttctgataaaccccccaaacccgaactccccggggtagatttcgctgatccacaaggacccagtctcccaggaatggacttccccgatccacaggggccttcactgcccggacttgatttcgccgatccacaggggtcaacaattttccaaatagcacgccttatcagtcacggacctatgcctcagaacaaacagtccccactttatcctggaatgctatatgtgccattcggagcaaatcagctgaacgctcccgctcgactcgggatcatgtcttctgaggaagtggccgggggaagggaagatccaatggcatatggggctatgtttcctggatttggaggaatgcgccctggatttgaagggatgccccataacccagctatgggaggggattttacactcgaatttgatagtccagtcgctgccactaaaggaccagaaaatgaagaaggaggagcccagggatcccctatgcctgaggccaaccctgataatctagaaaatcccgccttcctgacagaattagaacctgccccccatgcggggttgctggcccttcctaaagatgatatccctgggctcccccggagtcccagtggaaagatgaaaggactccccagtgttactcctgctgctgcagatcctcttatgactcccgaactcgccgacgtatacagaacttacgacgcagacatgactacatctgtggatttccaggaagaagccacaatggatacaacaatggcccccaactccctacagacttcaatgcccgggaataaggcacaggaacctgaaatgatgcacgatgcctggcattttcaggagcca

SEQ ID NO: 5901 - DNA, 1341 bp, synthetic construct
  misc_feature 1..1341: note = source = /note="Description of Artificial Sequence: Synthetic coding sequence"
  source 1..1341: mol_type = other DNA
atgagtgcaagtaagattcctttattcaaaatgaaagatctaatcctgattctctgtttgctcgagatgtctttcgccgtacccttctttccccaacagtctggcacgcctggtatggctagcctgtctctcgagacaatgcggcagcttggctctttgcagcgactgaataccctctctcagtatagtcgatacggcttcggtaagagttttaacagcttgtggatgcacggcctgctcccgccccatagtagcctgccctggatgaggcccagagagcacgagacgcaacagtacgaatattccttacccgtccatccccctccccttccctctcaaccgagcctgaagcctcagcaaccaggattgaaacctttccttcagtcagccgcggccaccaccaatcaggctacagcacttaaggaggctcttcagcctcccattcatctggggcatctgcccctacaagaaggagagcttccattggtgcaacagcaagtggctccatctgataagcctcctaagccagaactccctggagtcgacttcgctgacccccagggaccttctctgcctgggatggatttccctgacccccagggaccgtccctgcccgggctagactttgcggacccccagggctcaactatattccagatcgcccggcttataagtcacggccccatgccccagaataagcagagccctctttacccaggaatgctgtacgttcccttcggagccaaccagcttaatgcacctgcgaggctgggtatcatgtccagcgaagaggtcgcggggggacgggaggacccaatggcatatggcgccatgttcccagggttcggcggcatgcgcccaggtttcgaggggatgcctcataatccggcaatgggcggtgattttaccctggaattcgattctccagtcgcagctaccaagggaccagagaatgaggaggggggagcacaagggagcccgatgcccgaagccaatcctgataatttagagaacccagcgttcttgactgaactggagcctgccccacacgcaggactactagcgttgccgaaagatgatatccctggactccctagatccccttctggcaaaatgaagggactgccaagcgtgactcccgcagcggctgacccgctgatgacaccagagctagccgacgtgtaccgaacctacgatgctgatatgacgacgtccgtcgatttccaggaggaagccacaatggacactacaatggctcccaactcgcttcagacctctatgccgggcaataaagcgcaggagcccgagatgatgcacgatgcatggcactttcaggagccc

SEQ ID NO: 5902 - DNA, 1341 bp, synthetic construct
  misc_feature 1..1341: note = source = /note="Description of Artificial Sequence: Synthetic coding sequence"
  source 1..1341: mol_type = other DNA
atgtccgctagtaagattcctctgttcaaaatgaaagatctgatcctgatcctctgtctgctcgaaatgtcctttgctgtgcctttctttcctcagcagtcgggaactcctggaatggcttcgttgtcgctcgaaaccatgagacaattggggagcttgcagaggctgaacaccctctcacagtacagccgatacggatttggtaagagctttaacagcctttggatgcatggtctgttgcctcctcacagctccctcccttggatgaggccacgagagcacgaaacccaacaatacgaatacagccttcctgtgcatccccctcctctgccaagccaaccttcgctgaagcctcaacagccagggctcaagcccttcctccaatcggcagccgcaaccactaatcaggccactgcactgaaggaggctctgcaaccgccaatccacctcggacatctcccactgcaagaaggtgagctgccacttgtgcaacagcaggtcgccccttccgataagcctcccaagcctgaacttcccggtgtggactttgccgatccgcagggtccttccctgcccggcatggattttcctgaccctcaagggccttccctccccggtttggattttgccgatccccaaggatcaaccatcttccagatagcgaggctcattagccacggcccaatgcctcagaataagcaatcccccctctacccaggaatgttgtacgtgccattcggagcaaaccaactgaacgcaccggctcgacttggaattatgtcctcagaggaagtggctgggggcagagaggaccctatggcatacggtgcaatgttccccgggttcggtggaatgcgccccgggttcgaaggcatgccccataaccctgccatgggaggtgatttcaccctcgaatttgattccccggtggcagccactaagggaccagagaacgaggagggtggagcccaaggatcacccatgccagaggcaaacccagataatctggaaaacccagccttccttaccgagcttgaacccgcccctcatgccggactcctggcgcttccaaaagacgacatccctggattgccacgttcgccctccgggaagatgaagggactgccgtcagtcacccccgcggccgctgatccgcttatgactcctgaactggctgatgtctaccggacttatgacgcagacatgaccactagcgtggactttcaggaggaagcaaccatggataccacgatggctccaaactcgctgcaaacttcaatgccaggcaataaggcacaagaaccagagatgatgcatgatgcgtggcattttcaagaaccc

SEQ ID NO: 5903 - DNA, 1341 bp, synthetic construct
  misc_feature 1..1341: note = source = /note="Description of Artificial Sequence: Synthetic coding sequence"
  source 1..1341: mol_type = other DNA
atgtccgcctctaagatcccactgttcaaaatgaaagatctgatcttaatcctctgccttttggagatgtccttcgctgtaccattcttcccccaacagtcgggaaccccaggcatggcctccctttctcttgagaccatgaggcagcttggcagtctgcagcggctgaataccttgagccagtactctagatatggcttcggaaagtcgtttaattcactgtggatgcacggactcctccccccccatagctcgctgccctggatgcgaccacgggagcatgaaactcaacaatatgagtattccctcccagtacaccctccaccactgcccagccagccaagtctgaagccacagcaacctggcctaaagcctttcttgcagagcgccgcagccacaaccaaccaggctaccgcgctgaaagaagcccttcagcctcctatccacttaggtcacctccccctgcaggaaggggaactgcctctggtccagcagcaggtggccccttctgataagccgccaaagcccgagctgccaggagtggattttgcggacccacagggccctagtctcccgggcatggatttccccgacccccagggcccttcgttgccaggtttggatttcgccgatcctcagggctccactatctttcagatcgcacggctgatttcgcacggaccaatgccccagaacaaacaaagcccattgtacccggggatgctgtatgtgcctttcggcgcgaaccaactgaatgcaccagcgcggctgggcattatgagctcagaagaagtggcagggggtcgcgaagatcctatggcgtacggggccatgtttcctggattcggcggcatgagacccggattcgagggaatgccacataacccagccatgggcggcgatttcacactggagttcgattcccctgtggccgcgacgaaaggtccagagaacgaggagggaggagcccaggggagccctatgccagaagcaaacccggataatctggagaaccctgcgttcctgactgaactggagccggctccacatgccgggctcttggctcttccgaaagacgacataccgggcctgccgagatctccttctggtaaaatgaagggactgccttccgtcactcctgcagccgccgatccactaatgactccagagctagccgacgtgtatcggacttatgatgccgatatgaccaccagcgtagactttcaggaggaggccaccatggacaccacaatggccccaaacagcctgcagacaagtatgcccgggaataaggcccaggaaccagaaatgatgcacgacgcatggcacttccaggagccc

SEQ ID NO: 5904 - DNA, 1341 bp, synthetic construct
  misc_feature 1..1341: note = source = /note="Description of Artificial Sequence: Synthetic coding sequence"
  source 1..1341: mol_type = other DNA
atgtccgcctcaaagatccctctatttaaaatgaaagatcttattctgatattgtgtctcctggaaatgagcttcgcagtgccattcttcccccagcagagtggtacccctggtatggcgtccctaagcttagagactatgcgccagttagggagcctccaaaggttgaacacactttcgcagtactcccgatatggtttcggcaaaagcttcaatagtctctggatgcatggacttctgccccctcactcgtcactcccctggatgagaccccgagaacacgagacgcagcaatatgaatactcattgccagtgcaccctcctcccctaccgtctcagccctcactaaagccacagcagcctgggcttaagccgtttttgcagagtgccgcagccactaccaaccaggccactgcactaaaagaggccctacaacctcctatacacctcggccaccttcccctccaggaaggcgagctcccactcgtccagcagcaagttgcaccttccgacaagcccccgaagcccgagctgcccggcgtggactttgccgacccgcaggggccctccctacctggcatggacttcccagatcctcaaggaccttccttgcccggactggactttgcggaccctcaggggagtacgatcttccagattgctagactcatttcccacgggcctatgccccagaataagcagtcgcccctgtatcccggcatgctctatgttccctttggcgctaatcagctgaacgcccccgcacgcctgggcatcatgagcagcgaagaagtggcaggagggcgcgaagatccaatggcatatggggcaatgttccctggtttcggtggtatgagaccgggtttcgagggcatgccacataacccagcaatgggtggggactttaccctggagttcgattcaccagtggcagcaacaaaaggacccgaaaatgaggagggaggcgcacagggatctccaatgccggaggccaatcctgataacttagagaatcctgctttcctgaccgaacttgagcctgctccacacgccgggctgctggctttgccaaaagacgacatccccgggcttcctagatcaccatctgggaaaatgaaaggccttcctagtgtgactcccgcagccgctgatcctttgatgactcctgaactggctgacgtctaccgtacctatgacgctgatatgacgacatccgtggatttccaggaggaggccaccatggacaccactatggccccaaactccctgcagacttcgatgcctggtaataaggctcaggagccagaaatgatgcatgacgcgtggcatttccaggagccg

SEQ ID NO: 5905 - DNA, 1341 bp, synthetic construct
  misc_feature 1..1341: note = source = /note="Description of Artificial Sequence: Synthetic coding sequence"
  source 1..1341: mol_type = other DNA
atgagcgcaagcaagattcccctgttcaagatgaaagaccttattctgatcttgtgcttgcttgaaatgtctttcgccgtgcccttcttcccccagcagagtggcacccccggcatggcatctctgtccctggagactatgaggcaactcgggtccctccagcggcttaatacactttcccagtatagtcggtacggtttcggtaaaagcttcaatagtctgtggatgcatggactgttgccaccccactcctctctcccatggatgcgcccgagagagcacgaaacccaacagtacgagtattccctgcctgtacaccccccacccttgccaagccaaccgtctctgaagccgcaacagcccggattgaagccattcctccagagcgctgccgccaccaccaaccaggcgaccgcgctgaaggaagcacttcagccacccatccacttgggacatctgccactgcaggaaggggaactgcccctggtgcagcagcaggtggccccttcagacaaaccacccaaaccggagctccccggcgtggactttgcagatcctcaaggaccttctctgccaggcatggactttccagacccacagggcccctccttgccagggctggactttgccgacccgcagggctccacgatctttcagatagcgagacttattagccatggtcctatgccacagaacaagcagagccctctgtaccctggtatgttgtatgtcccctttggcgccaatcagctcaatgctccagccaggctgggtataatgtctagtgaagaagtcgccggcggtcgggaagatcctatggcgtatggcgcaatgtttcctgggtttggcggtatgagacctggatttgagggcatgccacacaaccccgccatgggtggggatttcactctggagttcgatagccctgtcgcagcaacgaagggccccgagaatgaagaaggtggcgctcagggcagccctatgccagaggccaatcctgataatctcgaaaatccagcatttcttacggaactggagcctgccccacacgctgggctgctggcattgccaaaggatgacattcccggtctccctcgatctccctccggcaagatgaaaggtctccctagtgtgacccccgccgccgctgaccctcttatgacacctgaattggccgacgtctacagaacctacgacgcggacatgacaacgagcgtggatttccaagaagaagctaccatggacacgacaatggcacccaacagcttgcagacatccatgcccggcaataaggcccaagagcctgagatgatgcacgatgcctggcatttccaggagccc

SEQ ID NO: 5906 - DNA, 1341 bp, synthetic construct
  misc_feature 1..1341: note = source = /note="Description of Artificial Sequence: Synthetic coding sequence"
  source 1..1341: mol_type = other DNA
atgtcggcctccaagatccccctgttcaagatgaaggacctgatccttatcctctgcctgctggaaatgtcatttgcagtgccgttcttcccgcaacagtccgggactccagggatggcgtccctttccctggaaaccatgcgccagctcggatcgctgcagaggctgaacacgctgtcacagtactcgcggtacggtttcggtaaatccttcaatagcctttggatgcacggtctgctgcctcctcactcaagcctgccgtggatgcggccgcgggaacacgaaacccagcagtacgagtacagcttgccagtccatccaccgcctctgccatcgcagccatctctgaagccgcaacagccgggattgaaaccgtttctgcagagcgccgctgccaccactaatcaagcaactgccttgaaggaggcgctgcagccgccaatccaccttggacacctgccgttgcaagagggcgagctcccgctggttcagcagcaagtggccccgtctgataagccaccgaagccagaactcccaggggtggacttcgcggatccccagggccccagcctgcccgggatggacttccctgatccgcaggggcccagcctgcctggcctcgacttcgcagacccacaggggtcgactatcttccaaatcgcccgcctgatttcccatggcccaatgcctcagaacaagcagtcgccgttgtaccctgggatgctttacgtgcccttcggagcgaaccagctgaacgcgccggccagattgggaatcatgtctagcgaagaagttgcaggagggagggaagatccgatggcttacggagcaatgttcccaggattcggaggaatgaggccgggatttgaagggatgccgcataacccagcaatgggaggagatttcacgcttgagttcgattcgccggtcgccgcgaccaagggccccgagaatgaagaagggggcgcccaaggatccccaatgcctgaggccaacccagataatctggagaatccagcgttcctcaccgaactcgaaccggccccgcatgccggtctgctcgccctgcctaaggacgacatcccaggtttgcctcggtccccgtccgggaaaatgaaggggctgccgtcagtgaccccggcggccgcggacccactgatgactccagagctggcggatgtgtacagaacgtacgacgctgatatgaccacctcagtggactttcaagaggaggccaccatggataccaccatggccccgaacagcctgcagacgagcatgccaggaaacaaagcccaggagccggaaatgatgcacgatgcttggcacttccaggaaccg

SEQ ID NO: 5907 - DNA, 1341 bp, synthetic construct
  misc_feature 1..1341: note = source = /note="Description of Artificial Sequence: Synthetic coding sequence"
  source 1..1341: mol_type = other DNA
atgtccgcctctaaaatccccttgttcaagatgaaggacttaattctgatcctgtgccttctggaaatgtccttcgccgtcccattcttcccacagcagtcggggacccccggcatggcttctctgagcttggagactatgcgacagctgggcagcttgcagagactgaacacactgtcacagtatagccgttacgggtttggaaagtcgttcaactcgttatggatgcatggtctgctgcctccgcattcaagcctgccatggatgaggccccgagagcacgagacccagcaatacgaatacagcctgccggtccatccccccccactcccatctcaacctagtctgaagccacagcagcccggacttaagcccttcctgcagtccgccgcagctactacaaaccaagcaactgccctgaaagaggccctgcaaccccctatccacctggggcatctccctctacaggaaggggagctccctctcgtgcagcagcaggtagctcctagcgacaagccgccaaaacccgagcttcctggcgtggacttcgcagaccctcaaggtccaagtctgcctgggatggacttcccggatccccaagggcccagtttacccgggctagatttcgcggatccccaggggtcaacaatcttccaaatcgctaggctgatcagtcacggacccatgccccagaacaaacaatctcctctgtatcctggcatgttgtacgttccattcggtgccaaccagcttaatgctccagctagactgggaatcatgagctcagaagaggttgccggtggtagagaggacccaatggcatatggtgcaatgttccctgggtttggtggaatgcgacccggtttcgagggtatgccccataatcctgccatgggcggcgatttcaccctggaattcgactcccccgttgccgctaccaagggccctgaaaacgaggaagggggagctcaaggctctcccatgcctgaagcaaacccagataacctcgagaacccagctttcctgaccgagctggaaccagcaccacacgcagggctgttagctttgcctaaggacgatatccctggcctcccccgaagcccaagcgggaagatgaaaggattgcccagtgttacaccggctgcagccgatccattgatgactcccgaattggcggatgtgtacagaacatacgacgccgatatgaccacaagtgtggattttcaagaggaggctacaatggacactacgatggccccgaactctctgcaaaccagcatgccggggaataaagcacaggagccggaaatgatgcacgatgcctggcatttccaagaacca

SEQ ID NO: 5908 - DNA, 1341 bp, synthetic construct
  misc_feature 1..1341: note = source = /note="Description of Artificial Sequence: Synthetic coding sequence"
  source 1..1341: mol_type = other DNA
atgtcggcgtcgaaaataccgctatttaaaatgaaagatctaatattaatactatgtttactagaaatgtcgtttgcggtaccgttttttccgcaacaatcgggtacgccgggtatggcgtcgctatcgttagaaacgatgcgtcaattaggttcgctacaacgtctaaatacgttatcgcaatattcgcgatatggttttggtaaatcgtttaattcgctatggatgcatggtttattaccgccgcattcgtcgctaccgtggatgcgtccgcgagaacatgaaacgcaacaatatgaatattcgctaccggtacatccgccgccgttaccgtcgcaaccgtcgttaaaaccgcaacaaccgggtctaaaaccgtttctacaatcggcggcggcgacgacgaatcaagcgacggcgttaaaagaagcgctacaaccgccgatacatttaggtcatttaccgttacaagaaggtgaattaccgttagtacaacaacaagtagcgccgtcggataaaccgccgaaaccggaactaccgggtgtagattttgcggatccgcaaggtccgtcgttaccgggtatggattttccggatccgcaaggtccgtcgttaccgggtttagattttgcggatccgcaaggttcgacgatatttcaaatagcgcgtttaatatcgcatggtccgatgccgcaaaataaacaatcgccgctatatccgggtatgctatatgttccgtttggtgcgaatcaattaaatgcgccggcgcgtttaggtataatgtcgtcggaagaagttgcgggtggtcgtgaagatccgatggcgtatggtgcgatgtttccgggttttggtggtatgcgtccgggttttgaaggtatgccgcataatccggcgatgggtggtgattttacgctagaatttgattcgccggttgcggcgacgaaaggtccggaaaatgaagaaggtggtgcgcaaggttcgccgatgccggaagcgaatccggataatttagaaaatccggcgtttctaacggaattagaaccggcgccgcatgcgggtctattagcgttaccgaaagatgatataccgggtttaccgcgttcgccgtcgggtaaaatgaaaggtttaccgtcggttacgccggcggcggcggatccgttaatgacgccggaactagcggatgtttatcgtacgtatgatgcggatatgacgacgtcggttgattttcaagaagaagcgacgatggatacgacgatggcgccgaattcgctacaaacgtcgatgccgggtaataaagcgcaagaaccggaaatgatgcatgatgcgtggcattttcaagaaccg

SEQ ID NO: 5909 - DNA, 1341 bp, synthetic construct
  misc_feature 1..1341: note = source = /note="Description of Artificial Sequence: Synthetic coding sequence"
  source 1..1341: mol_type = other DNA
atgtccgcatcaaaaattccgctgtttaagatgaaggacctcattttgattctgtgtctcctcgagatgtcttttgccgttcccttctttccacagcagagtggaacccccggcatggcatccctttcactggagacaatgaggcagctgggctccctgcagaggctgaacacattgagtcagtacagccgctacgggtttgggaagtcctttaactctctttggatgcacggcctacttccaccccacagttcccttccctggatgcgccccagggaacacgagacccagcaatacgagtatagcctgcctgtccaccctcctccactcccttcccaaccgtccctgaaaccacagcagccagggctcaagccgttcctccagagtgccgccgccaccacaaaccaggcgacggccttgaaggaagcgctccagccaccaatacatctgggacacctgcctttgcaggagggcgagttaccactcgtgcagcagcaagtggcgccgtctgacaagcctccaaaaccagaactcccaggcgtggatttcgccgatcctcagggaccaagccttcccggaatggactttcccgaccctcagggtccctcactccctggccttgactttgcggaccctcagggatctacgatattccagatagcccggctcatcagtcacggaccaatgcctcagaacaagcagtcacccctctaccctggaatgctatacgtgccctttggcgctaatcagctaaacgccccagctagactcggcataatgtcaagtgaggaggtggccggggggcgggaggatccaatggcgtacggggctatgttccccggttttggagggatgcgacctggttttgaagggatgcctcataaccccgccatgggcggcgattttactcttgaattcgattcccccgtagcagctaccaaggggccagagaatgaagagggcggagcccagggatccccaatgcccgaagccaatccagataacttggagaatccagcattcctgacagagctggaacctgccccgcacgccggtcttttagctcttccgaaggacgacatcccaggcctgccaagaagcccatccgggaagatgaaagggctccccagcgttaccccagctgcagccgatcctcttatgactcctgaacttgcagatgtgtaccgaacatacgacgctgacatgaccactagcgtcgattttcaagaggaagccaccatggatacaactatggccccaaatagcttacagacaagtatgcctgggaataaagcacaggagcctgaaatgatgcatgacgcctggcattttcaggaaccc

SEQ ID NO: 5910 - DNA, 1341 bp, synthetic construct
  misc_feature 1..1341: note = source = /note="Description of Artificial Sequence: Synthetic coding sequence"
  source 1..1341: mol_type = other DNA
atgtccgcctccaaaatcccgctgttcaagatgaaggatctgatcttgatcctgtgcctgctggagatgtccttcgcggtgccgttcttcccgcaacaaagcggtaccccgggaatggcgtcgctttccctcgagactatgcggcaactgggctcgctccagcgcctcaacacgctgtcgcagtacagcagatacgggttcgggaagtctttcaactcgctgtggatgcacggactgctgccaccacactcgtcactcccctggatgcggccgcgcgaacacgaaacccagcagtacgaatactccctgccagtccatcccccacctcttccttcccaaccgagcctcaaacctcagcaacctggcctgaagccctttctgcagtcggcagctgcgaccaccaaccaggcaactgcactgaaggaggcactccagccccctatccacctgggacacctcccgctgcaggaaggcgagctccccctggtccagcagcaggtcgcgccaagcgacaagcctccaaaacctgaactgccgggcgtggacttcgccgacccgcaaggtccgtccctccctggaatggactttcctgatccgcaagggccgtcgctgcctggactcgactttgcagatccgcaaggctcaactatcttccagatcgctagacttatttcgcacggccctatgccacagaataagcagagcccgctgtacccgggaatgctgtacgttccttttggtgccaatcagcttaacgctcccgcccgactggggattatgtcctccgaagaggtggccgggggacgggaagatccaatggcatatggagcgatgttccctgggtttggagggatgcgtccgggcttcgagggaatgccacataaccccgctatgggaggagatttcaccctcgagttcgacagccccgtggcggccaccaaaggcccagaaaacgaggagggaggagcccagggatccccgatgccggaggcgaacccggacaacttggaaaacccagctttccttacggaactggaacccgcgccgcatgcaggactgctggccctgccgaaggacgatatcccagggctgccccggtcgccatcgggaaagatgaaaggactgccttcggtgactccagcggccgcagatccgctgatgactccggaactcgccgacgtgtaccggacctacgacgccgacatgacgacttcagtcgacttccaagaagaagccactatggacaccacgatggctccaaactcgttgcaaacctcaatgccaggcaataaggcacaagagcccgaaatgatgcatgatgcctggcactttcaagaacca

SEQ ID NO: 5911 - DNA, 1341 bp, synthetic construct
  misc_feature 1..1341: note = source = /note="Description of Artificial Sequence: Synthetic coding sequence"
  source 1..1341: mol_type = other DNA
atgtccgccagtaaaatccccctgtttaagatgaaggatttaattcttatcctctgccttctggagatgtccttcgctgtacctttcttccctcagcagtccggcactcccgggatggcatctctctctctggagacaatgcggcagctgggctcactccagagactgaataccctgtcccaatatagcaggtacggttttgggaaatcctttaattctttgtggatgcacggcctgctgccaccccactcatccctcccgtggatgaggcccagggaacacgagacccagcagtatgaatacagcctgcccgtgcacccaccgcccctgccgtcccaaccttcacttaagccgcagcagcccgggctcaaacctttcttacagtcagcagccgctactaccaatcaagccacagctctaaaagaggccttgcagcctccaattcacctggggcatctccctttgcaggagggcgagcttccacttgtgcagcaacaggttgcgcctagtgacaagccccctaaacctgaattgcctggcgtcgactttgccgatcctcaaggcccgtccttacctggaatggacttccccgacccacagggcccctcactacccggcttggacttcgctgatccacaggggagcacaatatttcaaattgcccggctgatttcccacggcccaatgccacagaacaagcagtcccccctgtatccagggatgctgtacgtgccgttcggggccaatcaactgaacgcccccgcccggctcggaattatgtccagcgaggaagtggccggaggacgcgaggatcctatggcttacggcgcaatgttccctggcttcggggggatgcggcctggattcgagggcatgccccacaatcctgcaatgggcggggatttcaccttggagttcgattctcctgttgccgcaactaaggggcctgagaatgaggagggaggcgctcaaggttcccccatgcccgaagccaatcctgataatctggagaacccggcctttctcacagagctcgagcccgccccccacgctgggcttctagcattgcccaaggacgatatccccggtcttcctaggagcccaagcggcaaaatgaagggcctcccgagcgtcacacctgccgcggccgaccccctaatgactcccgagctggcagacgtataccgaacatatgatgctgacatgaccaccagcgtagactttcaggaggaagcaacgatggacaccacgatggccccaaacagtctgcaaacaagtatgcccggcaacaaggctcaggagccagaaatgatgcacgatgcttggcattttcaagagccc

SEQ ID NO: 5912 - DNA, 1341 bp, synthetic construct
  misc_feature 1..1341: note = source = /note="Description of Artificial Sequence: Synthetic coding sequence"
  source 1..1341: mol_type = other DNA
atgtccgcaagtaagatcccgctgttcaaaatgaaagaccttattcttatcctgtgtctgctcgagatgtccttcgcagtgcctttctttcctcagcaatcgggaactcccggcatggcatcattgtcgcttgaaacgatgcggcaactgggttcccttcagcgccttaatactttgagccagtactcgaggtacggatttgggaaatcgttcaattctctctggatgcacggccttttgcctccccattcctccctgccttggatgaggccgagagagcacgaaactcaacaatacgagtactctttgcccgtccatccaccgccgctgccatcacaaccgtcgctgaaaccacaacaaccaggactgaagccctttcttcagagtgcagcagctaccaccaaccaagcaaccgcactgaaggaagcactccaaccacctattcacctgggacatctcccgctgcaggaaggcgagctcccactggtgcaacaacaggtcgccccatccgacaagccccctaaaccggaattgcctggagtggacttcgctgatccacaggggccatccttgcctggtatggacttcccggatccacagggtccttcgcttcctggactcgatttcgcagacccacagggatccactatctttcaaattgcacggctcatttcccacggaccaatgcctcagaataagcagtccccgctctatccagggatgctctacgtgccttttggcgcaaaccaactgaacgcacctgcacgccttggcataatgtccagcgaggaagtggcaggaggcagagaagatccaatggcttacggtgcaatgtttccgggattcggtggtatgcgcccaggatttgaaggaatgccacataaccctgcaatgggcggagattttaccttggaattcgatagccctgtcgcggcaaccaagggacctgagaatgaggagggtggcgcccaaggctccccgatgcctgaggcgaacccagataaccttgagaatcctgcgtttctgaccgaactggaaccagctccccatgctgggctcctggcacttcccaaggacgatattccgggactgccacgctcgccatcaggcaagatgaaggggctgccctcggtgactcctgcggcagccgaccccctcatgacgcccgaacttgcggatgtttaccgtacttacgatgccgacatgaccacttccgtggacttccaggaagaagcaactatggatactaccatggcaccaaacagccttcagactagcatgccaggaaacaaggcccaagaaccagagatgatgcatgatgcttggcatttccaagagcct

SEQ ID NO: 5913 - DNA, 1341 bp, synthetic construct
  misc_feature 1..1341: note = source = /note="Description of Artificial Sequence: Synthetic coding sequence"
  source 1..1341: mol_type = other DNA
atgtcggcgtcgaagattcctctgtttaagatgaaggacctgatcctgatactttgtctgctggaaatgtcgtttgcagtgcctttctttcctcaacagtccgggacccccgggatggcaagccttagcctggaaaccatgagacaactgggaagtctgcagcgcctcaacaccctttcacagtactcgagatacggatttgggaagtcgttcaactcgctgtggatgcacggacttcttcctcctcattcatccctgccttggatgaggccacgggaacatgaaacccagcagtacgaatactcacttcccgtccatcctcctccacttccttcccaaccatcgcttaagccacaacagcccggcctcaagccgtttcttcaatcggccgcagcaactacgaaccaagccactgccctcaaagaggctctccaacctcctattcatcttggtcatctgccactgcaagagggagaactcccattggtgcagcagcaggtggcaccctcggataaaccaccaaagcctgaactcccaggtgtcgatttcgccgatccccaaggcccgtcacttccaggaatggacttccctgatccacaggggccttcccttcctggactggatttcgctgacccacaagggtcgactatattccaaatcgcgcgactcattagccacggtcccatgccgcaaaacaagcagagccccctttaccccggtatgctgtacgtgcctttcggagcgaatcagcttaatgcaccagctcgccttggaattatgagctcggaagaggtggcgggcggcagggaggatcccatggcatacggcgcgatgtttccaggttttggggggatgcggcccggatttgagggaatgccgcataatccagccatgggaggtgactttacccttgagtttgactcgccagtggccgcaaccaagggacccgaaaatgaagaaggtggcgcacagggaagtcctatgcctgaagcgaatcctgataacctcgagaaccctgcatttcttaccgaactggaacctgcaccacatgctgggctgcttgcccttcctaaagacgatataccaggtctgccccgctccccatcaggcaaaatgaaaggtctgccgtcagtgacccccgcagcagcagatcctttgatgactcctgagttggcagatgtttaccggacctacgatgctgatatgactacttcagtggacttccaggaagaagccactatggataccaccatggcaccgaattcgttgcagacttccatgcctggtaacaaggcgcaagaaccagagatgatgcatgatgcatggcattttcaggaacct

SEQ ID NO: 5914 - DNA, 1341 bp, synthetic construct
  misc_feature 1..1341: note = source = /note="Description of Artificial Sequence: Synthetic coding sequence"
  source 1..1341: mol_type = other DNA
atgtccgcgtcaaagatcccactcttcaaaatgaaggacctgatactgattctttgccttctcgaaatgtcgtttgccgtgcccttcttcccacagcagtcggggactcccggaatggcatccctctccctggagactatgcgccaactgggaagccttcaacgccttaacactctgtcacagtactcaagatatggatttggtaagtcgttcaactcgctgtggatgcatggacttctccctccacattcgtcgctgccatggatgcgtcccagagaacacgaaacccagcaatatgagtactcgctccccgtccatcctccaccgcttccttcgcagccttcgctcaaacctcaacaacctggacttaaaccattccttcaatcggccgccgctactaccaatcaggcaactgcgctcaaagaggcacttcagccaccaattcacctcggccacctccctttgcaggaaggcgagttgccgcttgtgcaacaacaggtggcaccatccgacaagcctcccaagcctgaacttcctggagtggacttcgccgacccgcagggcccgtcactgccagggatggactttccagatcctcaaggtccttcccttcccggacttgactttgccgatccacaaggatctacgatcttccagattgcacgcttgatatcgcatggaccaatgccccaaaacaaacagtcacctttgtaccccggcatgctctacgttccttttggagcaaaccagctgaatgccccagcgagactggggattatgtcctccgaagaagtcgcaggagggagagaggacccgatggcctacggcgcaatgtttccaggatttggtggtatgaggcccggatttgagggcatgcctcacaatcctgcaatgggaggggattttactcttgagttcgatagccccgtcgcagcaaccaagggaccagaaaatgaagagggcggcgcacagggcagccctatgcccgaagccaacccagataatctggaaaatcctgcatttctgaccgagctggaacctgccccacatgccggactccttgcactcccaaaggacgacatcccaggactccctcggtcaccatcgggaaagatgaaggggcttcctagcgtcactccagcagcagcagatccactcatgacccccgagttggctgatgtgtacagaacctacgacgcagatatgactacgtcggtcgatttccaagaggaggcaaccatggataccactatggcacccaactcccttcaaacctcgatgcctggaaataaggcacaggaacctgaaatgatgcatgacgcgtggcattttcaggagcct

SEQ ID NO: 5915 - DNA, 1341 bp, synthetic construct
  misc_feature 1..1341: note = source = /note="Description of Artificial Sequence: Synthetic coding sequence"
  source 1..1341: mol_type = other DNA
atgtctgccagtaaaattccgctgttcaagatgaaggatctcatcctgatcctttgcctgctggagatgagctttgccgtgccattctttccccagcagtcaggcactcctggaatggcctctctctccttggaaacaatgcggcaactgggatctctgcagcggctgaacacactctctcagtattccaggtacggcttcgggaagtcatttaatagtctttggatgcatggcctcttacccccacatagctcactgccctggatgcgccccagggaacatgagacccagcagtatgaatattccctccctgtccaccctcctcccctgccatcccaaccatctttaaaaccacagcaaccgggcttaaagccttttcttcagtccgctgccgcaaccactaaccaggctactgcgcttaaagaggctctgcagccgcctatccatttaggccacctcccacttcaggaaggagagctgcccctcgtgcagcaacaggttgcacctagtgataagccccccaaacctgaactccctggggtcgattttgctgaccctcagggccctagcctgccggggatggattttcctgatccacagggccccagtctgcccggccttgacttcgcagacccacaaggctccaccatctttcagatcgcacggttgatcagccacggtccaatgccccaaaacaagcaatcgccactgtatcctggaatgctctacgtgccgtttggcgcaaatcaacttaatgctcctgcgcgtcttgggatcatgtcttctgaggaggtcgcaggaggacgcgaggatccaatggcttacggagccatgtttcctggctttggaggaatgagacctggcttcgagggaatgccgcacaacccagcaatgggaggggattttactctggaatttgatagtccagtcgccgcaacaaagggtccagaaaatgaggagggcggagcccaggggagccccatgcctgaagcgaaccctgacaacctcgaaaacccagcctttcttaccgaacttgagcccgcacctcatgccggcctgttggctttgccgaaggatgacatacctggactccccaggagtccaagcggcaaaatgaagggcttgccctctgtgacccctgccgctgctgacccgctgatgacccctgaactggcagacgtgtacaggacttacgatgcagatatgactaccagcgtcgactttcaggaggaggcaaccatggatactacaatggctcctaacagcttgcagacatctatgcctggaaacaaggcacaggaaccagagatgatgcatgacgcttggcacttccaggagcct

SEQ ID NO: 5916 - DNA, 1341 bp, synthetic construct
  misc_feature 1..1341: note = source = /note="Description of Artificial Sequence: Synthetic coding sequence"
  source 1..1341: mol_type = other DNA
atgtccgcgtcaaagatccccctgtttaagatgaaagatctcatcctcatcttgtgtctgctggaaatgtctttcgcagtgccgttttttcctcagcagagcggcacgccgggaatggcctccctgtcactggagactatgaggcagctcggatccctccaacgcctgaacaccctgtcgcagtactcccgctacggattcggaaagtcgtttaacagcttgtggatgcatggactgcttccgccgcactcatccctcccgtggatgcgcccccgcgagcacgagactcagcaatacgaatactctctgccagtgcatccacctcctctgccttcccagccgagcctcaaacctcaacagccgggactgaagcccttcctgcagtcagcagccgctaccaccaatcaggccaccgccctcaaggaggcgctgcagccgcctatccatcttggtcacctgcccctccaagagggcgaactgccgctggttcaacagcaagtggcgccatcggacaaaccaccgaaacctgaattgcctggggtggattttgcagatcctcagggcccgtcactgccgggaatggatttccctgacccacaaggcccttcactgccagggctggacttcgcagacccgcagggctccaccatttttcagatcgccagattgatctcgcacggtccgatgccgcagaacaagcaatccccgctctacccgggtatgctgtatgtcccgttcggagccaaccagctgaacgccccggccagactcggaattatgtcgagcgaggaagtcgccggaggacgggaggacccgatggcatacggagccatgttcccgggtttcggaggaatgcggccgggattcgagggtatgccgcacaatccggcaatgggaggagacttcaccttggaattcgactcaccggtggcagctacgaagggcccagagaacgaagagggaggtgcccaggggagcccgatgccggaggccaatccagacaatctggaaaacccagcctttctgaccgaactggagccagcccctcacgctgggctgctggccctccccaaggacgacatcccgggcctgccaagatcgccgtctggaaagatgaaaggcctgccgtcggttactcccgctgctgcagacccgctgatgactccggaacttgcggatgtctaccggacttacgatgcagatatgacgacttcggttgactttcaagaagaagccactatggataccaccatggcaccgaactccttgcagaccagcatgccaggaaacaaggcccaagaacccgagatgatgcacgacgcgtggcatttccaagagccg

SEQ ID NO: 5917 - DNA, 1341 bp, synthetic construct; identical to SEQ ID NO: 5911
  misc_feature 1..1341: note = source = /note="Description of Artificial Sequence: Synthetic coding sequence"
  source 1..1341: mol_type = other DNA

SEQ ID NO: 5918 - DNA, 1341 bp, synthetic construct
  misc_feature 1..1341: note = source = /note="Description of Artificial Sequence: Synthetic coding sequence"
  source 1..1341: mol_type = other DNA
atgagcgcctctaagattcccctctttaaaatgaaagacctgattctgatcctatgtttgcttgaaatgtccttcgcagtccccttctttccgcagcagtcaggcacgcccgggatggcaagtctgtccctggagaccatgaggcagctcggatccctgcaacgcttgaatacactcagtcagtactccaggtatggctttggcaagagcttcaatagtctgtggatgcatggtttacttcccccacactcttctttgccctggatgcggccgcgggagcatgagacacagcaatatgagtactctttaccagtgcatccccctccgctgccttctcagccatccctcaagccccaacagcccggtctcaagccattcctccagtccgccgctgctacaacaaaccaggccaccgcactcaaggaggcactgcagccccccatccatctgggccatcttccgctgcaggaaggtgagctgccgctggttcagcagcaggtagcgccatcagacaagccccctaagcctgagctgcccggcgtggacttcgccgatccccaggggccgagcttgccgggcatggatttcccagatcctcaaggtccttcactccctgggctcgacttcgccgatccccagggttcaacaatatttcagatcgcgaggctgatctcgcatgggcctatgccacagaacaagcagagccccttgtaccccggaatgctgtacgtgccctttggcgccaaccaactcaatgcccccgcgaggcttggtattatgtccagcgaggaggtggctgggggtcgagaagaccccatggcatacggcgctatgttcccaggcttcggaggcatgcgtcctggattcgagggcatgccccacaatccagctatgggcggtgattttacattagagttcgattcacctgtggcggccactaaagggccggagaacgaggagggcggcgcacagggctctcccatgcccgaagccaatccagacaatcttgagaacccagcattcctgactgagttggagcccgctccccatgccggtctgctggcacttccaaaggatgatatcccaggactgccccgctctccaagtggtaagatgaaagggctgcccagcgtgacaccggcggctgctgatccactcatgactcccgagcttgccgacgtgtaccggacttatgacgcagatatgacgacaagcgtcgactttcaagaggaggccacaatggacaccactatggctccaaacagcctgcagacatcaatgcccggcaacaaagcacaggagccagagatgatgcatgatgcctggcactttcaggaaccc

SEQ ID NO: 5919 - DNA, 1341 bp, synthetic construct
  misc_feature 1..1341: note = source = /note="Description of Artificial Sequence: Synthetic coding sequence"
  source 1..1341: mol_type = other DNA
atgtccgcgtccaagatccctttattcaaaatgaaggacctcatcctcatcctttgtctcctggaaatgtcattcgcagtaccgttctttccgcaacagtcaggcaccccgggcatggcatccctcagccttgagacaatgcgtcaactggggtctctccaaagactcaacacccttagtcaatattctaggtacggcttcggcaagtctttcaatagtctgtggatgcacggcttgctccctcctcacagtagcctgccctggatgagaccaagggagcacgaaacacagcagtatgagtatagcctcccagttcaccccccacctctcccctcccagccctcactaaaaccccagcagcctgggctcaagccattcctacagagcgctgctgccacaaccaaccaagctacagcactgaaggaggccttgcagccgcccatccatttggggcatctgccactccaggagggtgagctgcccctagttcagcaacaggtggcgccttctgacaaaccacccaaacccgagctacctggcgtggacttcgcagatcctcaggggccatccctccctggaatggacttccccgacccccagggtccgtcactgcccggacttgatttcgccgacccccagggttctactatctttcagatcgcaaggcttatctctcacgggcccatgccccaaaacaaacagtccccactgtatcctggtatgctgtacgtgccgtttggagcaaaccagctaaatgctcctgccaggctaggtatcatgagcagcgaggaagtcgccggcggccgcgaggaccccatggcctacggtgccatgttcccagggtttggcggcatgcgtccaggattcgagggaatgccacacaatccagccatggggggtgacttcaccttagaatttgactctccagttgcagctactaagggaccagagaacgaagaaggaggtgcccagggctcacccatgcctgaagcaaaccctgataacttggaaaatcccgccttcctcaccgagctagagccagctccgcatgcaggtctcctggcacttcccaaagacgacatccccgggttaccacgatctccctctggtaagatgaagggtttgccttccgtgacacctgccgccgcagacccccttatgacccccgagttggcggatgtgtatagaacatacgatgcagacatgactaccagcgtggacttccaggaagaagctacaatggacaccaccatggcccccaactcactgcagacttctatgcctggaaacaaggcacaggagcctgaaatgatgcacgacgcttggcactttcaggagcct

SEQ ID NO: 5920 - DNA, 1341 bp, synthetic construct
  misc_feature 1..1341: note = source = /note="Description of Artificial Sequence: Synthetic coding sequence"
  source 1..1341: mol_type = other DNA
atgtcagcaagtaagatcccgttatttaaaatgaaagacctgattctcatcctctgcctactcgagatgagctttgcagtgcccttctttccccagcaatccggcacccctggcatggcgtcgctcagccttgaaacaatgcgccaattggggtcattgcagcggctgaatactctgtcacagtactcccggtacggctttggaaagagcttcaatagcctatggatgcatggactattacccccccactcgtcactcccctggatgaggccaagagagcatgagacacagcagtatgaatactctttgccagttcatccaccgcctcttccgtctcagccatctctgaaaccgcagcagccaggcttgaaaccttttctccagtccgcagctgccacaaccaaccaagccaccgccttaaaagaagctttgcaaccccctatccatctgggtcatttacccctgcaagagggcgagctgcccttggtccagcagcaggttgccccctctgacaagccccccaaacccgagctgcctggggtggacttcgcagatcctcaagggccatcactgcccggaatggatttccctgaccctcagggtccgtccctcccaggccttgacttcgccgatccccagggcagcacgatttttcagatcgctcggcttatcagccatggtcctatgcctcagaacaaacagtcccccctatacccgggcatgctgtacgtgccctttggcgcgaatcagttgaacgcgccagccaggcttgggattatgagtagtgaggaagtggccggtggtcgagaagaccctatggcttacggggccatgttccccggctttggcggaatgagacccggcttcgagggaatgccacataacccagccatgggaggggatttcaccctcgagtttgattcaccagtcgcagctaccaagggtccggagaatgaagagggaggtgctcaagggagtcctatgcctgaggccaatcctgacaatctcgagaaccccgcctttctgaccgagctggaacctgcgcctcacgctgggctgctcgctctacctaaagatgatattccgggactaccaagaagcccctcaggcaagatgaagggcctcccgagcgtgaccccagctgccgctgacccccttatgacacctgagttggcggatgtctatcgcacatacgatgctgacatgaccacgtccgtggacttccaagaggaggcaactatggacactactatggctcctaatagtcttcaaacgtctatgccaggtaataaggcgcaagagccagagatgatgcatgatgcctggcattttcaggagccg

SEQ ID NO: 5921 - DNA, 1341 bp, synthetic construct
  misc_feature 1..1341: note = source = /note="Description of Artificial Sequence: Synthetic coding sequence"
  source 1..1341: mol_type = other DNA
atgtcagcctcgaaaatcccccttttcaagatgaaagatttgatcctaatcttatgtctactcgagatgtcattcgctgttcccttcttccctcagcagtctggaacacctggcatggccagcctgtcactggaaaccatgagacagttgggttctctacagagattgaataccttgtctcagtacagcagatacggattcggaaagtcttttaacagcctttggatgcacggactgctgcctcctcattcttcgctaccttggatgagaccaagggaacatgaaactcagcagtatgaatattctctccccgtgcatccaccaccccttcccagtcagccaagtctcaaaccgcagcagcccggccttaagccttttttgcagagtgccgcagccacaactaatcaggccacggcactcaaggaggctctccagcccccgattcacctgggtcatctgccactgcaggagggagagcttccgttggtccagcaacaggtcgcaccctcagacaagccgcctaaacccgaactgccaggtgtggattttgcagatccccagggaccatcgttacctggaatggattttcccgacccgcaggggccaagtctgccaggcctggacttcgcagaccctcaaggcagcaccatcttccagatagcacggctgatcagccacggccccatgccccaaaataaacaatcccctctctatccaggcatgctctatgttccatttggggccaatcagcttaatgcccccgctcggttgggaatcatgtcgtctgaggaggtggccggtggaagagaagacccaatggcttacggggccatgtttccaggattcggcggtatgcggcccgggttcgaaggaatgccccacaaccccgcgatggggggagacttcaccctcgaattcgactcccccgtcgccgctaccaagggcccagagaacgaggagggcggggctcagggctcgccgatgcctgaggctaaccctgacaacctggagaacccagcttttctcactgaactcgagcccgccccccacgccggcctcctggctcttccaaaggacgatattcccgggctgccccgatctccttcagggaaaatgaaagggcttcccagcgtgacccccgccgccgcagaccctttaatgactcccgagctagcagatgtttatcgcacatatgatgctgacatgactacatctgtggattttcaagaagaggctactatggatactaccatggcccccaactccctccagacctccatgcccggaaacaaagctcaagagcctgagatgatgcacgacgcctggcactttcaggagcct

SEQ ID NO: 5922 - DNA, 1341 bp, synthetic construct
  misc_feature 1..1341: note = source = /note="Description of Artificial Sequence: Synthetic coding sequence"
  source 1..1341: mol_type = other DNA
atgagcgcgtcgaaaattccgctgtttaagatgaaggacctcatcttgatcctgtgtctgctcgaaatgtcgttcgccgtcccgttcttcccgcagcagtcaggaacccctggaatggcctcactgtccctcgaaaccatgcgacagctgggaagcctgcaacgcctgaacactctgtcccagtactcccgctacggtttcggcaagtccttcaatagcttgtggatgcacggactgctcccgccccactcatcccttccgtggatgcggcccagagaacacgaaactcagcagtacgaatacagcctcccggtgcacccgcctccgctgccgtcgcagccttcactgaagccccaacaaccgggactgaagccgttcctccagtcggctgctgctactaccaatcaagccaccgccctcaaagaagctctgcaaccgccgatccatctcggacatctgccgctgcaagagggcgaattgccgctggtccagcagcaagtggctccatccgataagccaccaaaaccggagctgccaggagtggactttgcggacccgcaaggcccttcactgccaggaatggacttcccagacccgcagggaccatcgctgccgggattggatttcgccgatccacaaggaagcactatcttccagatcgcccggctgatatcccatgggcctatgccacagaataagcagtcaccgctgtaccccgggatgctgtacgtgccgttcggcgccaaccaactgaacgccccggcgcggctggggatcatgtcatcggaggaggtggcaggcggcagggaggacccgatggcctacggagccatgttcccaggattcgggggcatgcggccgggatttgagggtatgccgcacaacccggccatgggtggagattttactctcgaattcgactcaccagtggccgcgacgaaaggccctgagaatgaggagggcggcgcacagggcagccctatgccggaagcaaacccagacaacctcgagaacccagccttcctcacggaactggagcctgcacctcatgccggactgcttgccctgccaaaagatgatatccctggcctcccccggtccccatctggaaagatgaagggcctcccttccgttactcccgccgcagcggatcctctgatgacccctgagctcgctgatgtatacagaacctacgacgctgacatgaccacttccgtggattttcaggaggaggccaccatggacactaccatggccccgaactctctccagacctccatgcctggaaacaaggcccaagagccggaaatgatgcacgatgcctggcatttccaggagccg

SEQ ID NO: 5923 - DNA, 1341 bp, synthetic construct
  misc_feature 1..1341: note = source = /note="Description of Artificial Sequence: Synthetic coding sequence"
  source 1..1341: mol_type = other DNA
atgagcgcctccaaaatccctcttttcaagatgaaagatctgattctcattctgtgtctgctggaaatgtcttttgccgtgcccttttttccgcaacagtcgggaacccctggcatggcaagcctctcccttgaaaccatgcgccaactcggttctctgcaacgtctgaacaccctctcacaatactccaggtacgggtttggaaagagctttaactcgctttggatgcatggccttcttcctcctcattcatcccttccttggatgaggccgagagagcacgaaacgcaacaatacgaatactcgcttcccgtgcatcctccgcctcttccctcgcaaccaagcctcaaaccccaacagccagggctgaagccgtttctgcaatcggcagcagcaactaccaaccaggcgacggctcttaaggaggcactgcaacctccgatccatctgggacatctccctctgcaggaaggcgaattgcccctggtgcaacaacaagtcgcaccgtcggacaaacctcctaagcccgaactccctggagtggattttgcggacccacagggaccatcacttcccggaatggatttccccgatccgcagggcccttcacttcctggtcttgattttgcagatcctcagggaagcactatctttcaaattgcaagacttattagccatgggcctatgccacagaataaacaatcacctctgtacccgggcatgctctacgtgccctttggcgctaatcagcttaacgccccagcaagactgggaatcatgtcgtcggaagaagtcgcaggtggccgcgaagatccaatggcgtacggagctatgtttcctggctttggcggaatgcgaccaggattcgagggtatgccgcacaatccggccatgggaggagatttcacccttgaatttgattcgccagtcgcagcaactaagggtcctgagaacgaagaaggaggggcacagggaagccccatgccagaggcaaacccagataatcttgaaaacccagcgttcctgaccgaactcgaacctgcaccacacgcagggctgcttgctctgccaaaggatgacattcccggtttgcccagatccccctctggcaagatgaaaggacttccttcagtgacccctgcagcagcggatccacttatgactccagagctcgcagatgtgtaccggacttacgacgcagatatgaccacctccgtggattttcaggaggaggccaccatggataccacgatggcacctaattcgcttcaaacgtcgatgccagggaacaaagcacaagagcctgaaatgatgcatgatgcatggcactttcaagagccg

SEQ ID NO: 5924 - DNA, 1341 bp, synthetic construct
  misc_feature 1..1341: note = source = /note="Description of Artificial Sequence: Synthetic coding sequence"
  source 1..1341: mol_type = other DNA
atgtccgcatccaaaattccactgttcaagatgaaggatctgatactcattttatgcttgctagagatgtcctttgctgtgccctttttcccacagcagagcggcactcctggcatggcaagccttagcctggaaaccatgagacagctgggctctctgcagcggctgaacaccttgtcacaatacagcagatatggctttggtaagagcttcaactcactgtggatgcatggcctgctgccaccacacagcagtctgccctggatgaggccgcgcgagcatgagactcagcaatatgaatactccttgccagtgcacccgcctccgctgccgagccaaccaagccttaagcctcaacagccgggcctcaaaccttttttgcagtccgcagcggccactacgaaccaagcgactgcgctgaaggaggcccttcagccgcctatccacctcggtcacctgccgctccaggaaggcgaattgccccttgttcaacaacaggtggcaccaagcgacaaaccgcctaaaccagagctgccgggtgtggacttcgcggatccacagggcccaagcctcccaggtatggactttcctgatccgcaggggccttcgttgccggggctggattttgcagatccacagggttccaccatctttcaaatagccaggctgatttctcacggcccgatgccacagaataaacaaagcccactctaccccggtatgctttatgttccttttggtgcaaatcagctcaacgcaccagctcgtctggggattatgagtagcgaggaggtagcggggggtcgggaagacccaatggcatatggcgcgatgttcccgggatttggtgggatgagacctggtttcgaaggtatgcctcacaatcctgcaatgggtggcgattttaccctggaatttgactccccggtagctgcaaccaaaggtccagagaacgaggagggtggggcacagggcagcccgatgccagaggctaaccctgataacctagaaaatcctgcattcttgaccgagctagagccggcgccacatgcgggccttctggcactgccaaaggacgacatccctggactgccccgctcgccatcgggtaaaatgaagggcctgccttccgtaaccccggccgcggccgaccctctgatgaccccggagttggcagacgtttatcgaacctacgatgcggacatgaccaccagcgttgattttcaggaggaagctaccatggatacaactatggcaccaaacagcctgcagaccagcatgcctggcaacaaggcccaggaaccggagatgatgcacgacgcctggcactttcaggagcca

SEQ ID NO: 5925 - DNA, 1341 bp, synthetic construct
  misc_feature 1..1341: note = source = /note="Description of Artificial Sequence: Synthetic coding sequence"
  source 1..1341: mol_type = other DNA
atgtccgcttccaagatcccgctgttcaagatgaaggatctgattctgattctgtgtctcttggagatgtccttcgcagtccccttcttccctcagcaaagcggcacccctggcatggcgagcctctcgctcgagactatgcgccagcttgggagcttgcaaagacttaatactctctcgcagtattcacgttacggatttggaaagtcgtttaacagcctgtggatgcacgggctgctgccaccgcattcatcattgccctggatgaggccaagagaacacgaaacgcaacagtacgaatactcactgccagtgcatcctccgccgctcccttcgcagccatcgctgaaaccgcagcaacctggtctgaaaccgttcctccagtcagctgcagcgactactaaccaggcaaccgcgctcaaagaggctttgcagcccccaatccatcttggacacctgccgttgcaggaaggagagctgcctctggtgcagcagcaggtggccccctcggacaagccgcctaagccagagttgcctggagtggatttcgcagacccacagggaccaagcctgcccggtatggattttcctgacccccagggcccgtcgttgccgggcctggacttcgctgacccgcagggttcaaccatcttccagatcgctaggttgatttcgcatggaccaatgcctcagaataaacagagcccactgtacccgggaatgctgtacgtgccatttggcgcaaatcaactgaatgccccggcacgcctgggcatcatgtcctcggaggaggtggccggaggaagagaggacccaatggcctacggggccatgttcccgggtttcggcggcatgcggccaggattcgagggtatgccccataaccctgcgatgggcggcgactttactctggagttcgattccccggtcgctgccaccaagggaccggaaaatgaagaaggaggcgctcaaggatcgccaatgccggaagccaacccagacaaccttgagaacccggcctttctgaccgagctggagccggcaccgcacgctgggttgctggcgctgccaaaagacgatatcccaggtctgccccgctctccctcagggaagatgaaaggacttccgtccgtcactccggccgccgccgaccctctcatgactcctgagctcgctgacgtgtaccgcacttacgacgccgacatgacgacctcagtggatttccaggaagaggcgaccatggacactactatggctcccaattcgcttcagacctcgatgccgggaaacaaagcccaggagccggagatgatgcacgacgcctggcacttccaagagcca

SEQ ID NO: 5926 - DNA, 1341 bp, synthetic construct
  misc_feature 1..1341: note = source = /note="Description of Artificial Sequence: Synthetic coding sequence"
  source 1..1341: mol_type = other DNA
atgagcgctagtaagattcctctgttcaagatgaaagaccttatccttattctttgcctgctggagatgtcttttgctgtgccgttcttcccgcagcagtctggaacacctgggatggctagtctgtccctcgagaccatgcggcagctgggaagcttgcagagacttaataccctgtcccaatactctaggtacgggttcgggaagtctttcaattccttgtggatgcacggattgctgccccctcactcaagccttccttggatgaggcccagggagcacgagacgcagcagtacgagtactctctcccagtccacccaccacccctcccaagtcaaccctccctgaagcctcaacaaccaggactgaagccttttctgcaaagtgcagcggcgaccaccaatcaagctacagctctgaaggaggccctgcagccccctattcacttggggcacctgcctctgcaagagggcgagctgccactggtgcagcaacaagtcgctccctctgacaagccgcctaaaccagagttgccaggagtggacttcgctgacccccagggaccctcccttcccggtatggacttcccggacccccaggggcctagcctgccagggttggactttgcagatccacaaggttcaacgattttccaaatcgctaggttgatctctcatggacccatgccccaaaataagcagtcccctctctatccagggatgctgtacgtgccatttggagcaaaccaattgaacgcccccgcccggctgggaattatgtctagtgaggaagtggccgggggccgggaagatccaatggcctacggcgccatgtttcccggattcggtgggatgagaccagggttcgagggcatgcctcataacccagctatgggtggtgacttcaccctggagttcgactcccccgtggctgcaacgaagggtcctgagaacgaggaggggggcgctcagggatcaccaatgcctgaagcaaaccccgacaatctggagaatcctgcatttttgactgagcttgagcctgccccccatgcgggcttgctcgctctgcctaaagacgatataccaggtttgcctcgctcaccctctggcaagatgaaggggctgcccagtgtgacccccgcggctgcagacccactgatgaccccggaactggctgacgtttaccgcacatacgacgccgacatgacaacgtcagtagatttccaggaggaggcaacaatggacaccacaatggctcccaactcacttcagacaagtatgccagggaataaagcacaggaacccgagatgatgcacgacgcgtggcacttccaggaaccc

SEQ ID NO: 5927 - DNA, 1341 bp, synthetic construct
  misc_feature 1..1341: note = source = /note="Description of Artificial Sequence: Synthetic coding sequence"
  source 1..1341: mol_type = other DNA
atgtcagccagcaagatcccgctgttcaagatgaaggatctcatccttatcctgtgcctgctggagatgtcgttcgcagtgccgttcttccctcaacagtcgggaactccgggaatggcttcactgtcccttgaaacgatgcggcaactcggttccttgcaacggctgaataccttgtcgcagtacagccggtacggattcggaaaatccttcaattcactgtggatgcatggactcctgccgccgcactcttcactgccctggatgcgcccgagagaacacgaaacccaacagtacgagtattcgctgccggtccatccaccgccgctgccatcccaaccgtcccttaagccgcagcaaccggggctgaagccgtttctgcagtctgcggccgcgactaccaaccaggcgacggcactgaaggaggctctccagcccccaattcacctgggccatttgccgctgcaggagggagagcttcctcttgttcagcagcaggtggcgccgtcggacaaaccaccgaaacccgagctccctggcgtcgatttcgctgatccacaaggccctagcctgccaggcatggacttccctgatcctcaagggccgtctctgccgggattggactttgcggacccccaaggcagcaccattttccagattgcaaggctgatctcgcatggcccgatgcctcagaacaagcaatccccactgtacccagggatgctgtacgtccctttcggggcgaaccaattgaatgcccccgcccggctcggaattatgtcctcagaagaggtggccggaggaagagaggacccgatggcgtacggagccatgtttcctggcttcggaggaatgcggcctggatttgaaggcatgcctcacaaccctgcgatgggaggtgatttcactctggaattcgattccccggtcgccgctaccaaaggtccggaaaacgaggaaggaggagcccagggttcaccgatgccggaggctaaccccgataacttggagaacccggcttttctgaccgagcttgaaccagcccctcacgccggactcctggcccttcctaaggacgacatcccgggactcccgagatcgccctcgggaaagatgaagggattgccatccgtgaccccagccgcggcggatcctctgatgaccccggagctcgctgacgtgtaccgcacctacgacgcggacatgactacttccgtggacttccaagaagaagcaacgatggataccactatggcccccaactcccttcagacttcgatgccaggtaataaggcgcaggaacccgaaatgatgcacgacgcgtggcactttcaagaacct

SEQ ID NO: 5928 - DNA, 1341 bp, synthetic construct
  misc_feature 1..1341: note = source = /note="Description of Artificial Sequence: Synthetic coding sequence"
  source 1..1341: mol_type = other DNA
atgtcagcatcgaagatccccctgttcaaaatgaaggacctgattctcatcttatgcctcctggaaatgtcttttgcggtcccattcttccctcaacaatctggtacaccggggatggcttcactgtcccttgaaacaatgcggcaactagggtctttgcagcgcttgaacactctaagccagtacagccgttatggctttggcaaatcttttaattccttgtggatgcatggattactgccccctcattcgtcattaccatggatgaggccaagagagcatgaaacacagcaatatgaatattcccttccggtccatccgccgccgttgccgtcccaaccaagccttaagcctcaacagccagggctcaaaccgtttctgcagagcgcggccgcaactacgaatcaggccaccgcacttaaagaagcacttcaacctcctattcatctaggtcatttacctttacaggaaggtgaacttccgttggtccagcaacaggtggcgccgagcgataagccgccgaaaccagagttgccgggcgtcgatttcgcagatccgcaagggccaagtctgccgggcatggattttccggatccgcaaggcccatctttgccgggtctggactttgctgaccctcagggaagcacaatttttcaaattgcgcgtctgatttcacatggaccgatgccgcagaacaaacaatcaccgctgtatcctggcatgctatatgtcccgtttggcgcaaatcagttgaacgccccggccagactgggcatcatgagctcagaagaagttgccgggggccgggaagacccgatggcatatggcgctatgtttccgggtttcggggggatgaggcccggttttgaaggcatgccgcataatccagcgatgggcggagatttcacgttggaatttgattctcctgttgcggctacaaaaggaccggagaatgaggagggcggtgcacaaggtagccctatgccggaagcaaacccggataaccttgaaaatccggcttttcttacggaacttgaacccgcaccgcatgcaggcttgcttgctttgccaaaagatgatatcccagggttacctcggtccccgtcaggaaaaatgaaggggcttccgagcgtaactcctgcggcggcggatcctcttatgaccccagagcttgcggatgtctaccgaacatatgacgctgatatgacaacgtcagttgattttcaggaggaagcaacaatggataccaccatggcgccgaattcacttcagacatctatgccaggaaataaggcacaagagccggaaatgatgcacgatgcttggcactttcaggaacct

SEQ ID NO: 5929 - DNA, 1341 bp, synthetic construct
  misc_feature 1..1341: note = source = /note="Description of Artificial Sequence: Synthetic coding sequence"
  source 1..1341: mol_type = other DNA
atgagcgcatccaagatccccttgttcaagatgaaagacctgatcttgattctatgcctcctggagatgagttttgccgttccattctttccccagcagagtggcactccaggaatggctagcctgagtctggaaacaatgagacagttgggatcgcttcaaagactgaatacactgagtcaatacagtcgatacggctttgggaaatctttcaattcactgtggatgcatgggctcctgcctccacatagctctctgccatggatgaggccgcgagagcatgaaacacagcagtatgaatattctcttcccgtccatcctccccctttaccgagtcagccatcccttaagcctcagcagcctggcctgaagcctttcctgcagtcagccgccgcaacaacgaatcaagcgaccgccctgaaggaagccctgcagcctcctatacacttgggacacttgccactgcaggagggagagctacccctggtacagcagcaggtggcaccaagcgacaagccacccaagcctgagttgccgggcgtagatttcgccgacccgcaaggaccttctttgccaggtatggatttccccgatccgcaggggccatcgctgcccggtcttgatttcgctgatcctcaggggtctaccatcttccagattgctcgtcttatttcccacggcccgatgccccagaacaagcaatctcccctgtatcctgggatgctttacgtgcccttcggcgccaatcagcttaatgcgcctgcccggttagggatcatgtcttctgaagaagtcgccggggggagggaagatccaatggcctacggcgcaatgttccccggattcggagggatgcggcctggtttcgaaggtatgcctcacaatccagcaatggggggggacttcaccctggagttcgactcaccagtggcagctacaaagggccctgagaatgaagagggtggagcccaagggagccctatgcccgaggccaatcctgataatttggaaaaccctgcattcctgacggaactagaaccagccccacacgccgggctccttgccttgcctaaggacgatataccaggcttgcctcgaagcccaagcggaaagatgaaaggactgccttcggtcacaccagccgcagcggacccgcttatgacccccgagttggcagatgtgtataggacgtacgacgccgatatgacgacctccgtcgatttccaggaagaggccaccatggacacgacaatggctcctaattccctgcagacctccatgcccggaaacaaagcgcaagagccagagatgatgcacgacgcatggcactttcaggaaccc

SEQ ID NO: 5930 - DNA, 1341 bp, synthetic construct
  misc_feature 1..1341: note = source = /note="Description of Artificial Sequence: Synthetic coding sequence"
  source 1..1341: mol_type = other DNA
atgtcagcatccaagataccgttattcaaaatgaaagatttaattcttattctctgtcttctggaaatgagctttgccgtgccgttttttccacagcaaagtggcactcctggtatggcatcgctttcgcttgagacaatgcgtcaattaggatccctccagcgccttaacactttgagtcaatactcgcgttacggatttggaaaaagctttaactctttatggatgcatggtttgcttcctccacattcttccctcccatggatgcgcccaagagagcacgaaacacagcagtatgagtatagcttgccagtgcatccacccccattgccgtcgcagccctcactgaagccacaacaaccaggattaaaaccttttctgcagtcggcagcagcgacgactaatcaagcgacggcgctgaaagaggcccttcagcccccaattcacctaggacacttgccgctccaagaaggagagctaccacttgttcaacaacaagttgccccatctgataaaccaccaaagccagagctcccaggcgttgatttcgctgacccacagggtccatcgctaccaggcatggatttcccagacccgcagggaccttctctacctggccttgatttcgcagatcctcaagggtctacaatatttcagattgccagactgatatcccatggaccaatgccacagaacaagcaaagtccattatacccgggaatgttgtatgtaccgtttggggcaaatcaattgaacgctcctgcccgtctcggaattatgagctcagaagaagttgcgggaggtcgtgaggatccaatggcatacggagcaatgtttccgggattcggaggaatgcgacctggctttgaaggtatgccacataatccagcaatgggaggcgattttactcttgaattcgattcaccagtagcagcaactaaaggaccagagaacgaagagggcggtgcacaaggatccccgatgccggaagcaaacccagacaacctagaaaacccagctttcctgacagagctggagccggcgcctcatgccggacttctggccttgccaaaagacgatataccgggactgccccgttccccgtcgggaaagatgaaaggactaccttcagttactcctgctgcagctgatccattgatgacccccgagcttgcagatgtttatagaacttatgatgcagacatgaccacgtctgttgatttccaggaagaagctaccatggatactacaatggctccaaacagtcttcaaacttcaatgccaggcaacaaggcacaagaaccggaaatgatgcacgatgcatggcatttccaagagcca

SEQ ID NO: 5931 - DNA, 1341 bp, synthetic construct
  misc_feature 1..1341: note = source = /note="Description of Artificial Sequence: Synthetic coding sequence"
  source 1..1341: mol_type = other DNA
atgtcagcttccaagatacctctttttaaaatgaaagacctgatccttattctatgcttgctcgaaatgtcctttgcggtccccttttttccccaacagtccgggacgccaggaatggcctccctctccctggagacaatgaggcagctcgggtctcttcagcggctgaacactctgtcccagtattccagatatggcttcggaaaaagctttaatagcctttggatgcatggactcttgcccccgcactcaagtctcccctggatgcgaccgagagagcacgagacacagcaatacgaatactccctgcccgtgcacccacctccactaccatcccagcctagtctcaagcctcagcagccggggctgaagccatttctgcagagtgccgctgcgactactaatcaagctaccgccctcaaggaagcactgcagccgccaatccacctcgggcatctgccactgcaggagggagagttacctttggtgcagcaacaggtcgcacccagtgacaagccccccaaacctgaactgcccggggtggacttcgccgacccccaggggcccagcctgccagggatggatttccctgatccccagggtccgtcactcccaggcctcgatttcgccgatccacagggttctacaatcttccagatcgctcggctgatctctcatgggcctatgccacagaacaaacagtctcccctgtacccgggtatgctttatgtgcctttcggcgccaatcagcttaacgctcccgccagactcggtattatgagcagcgaggaggtcgctgggggccgagaagatcccatggcctacggcgccatgtttccgggatttggagggatgaggcctggctttgagggcatgccccacaaccccgccatgggcggggatttcacactcgaatttgattcaccggtcgctgccaccaaggggccagagaacgaggaggggggagcccagggttccccaatgccggaagccaacccagacaacttagagaatcctgcctttctaacggaactagagcccgccccgcacgcgggactgctcgccctgcctaaagacgacattccaggcctgcctcggagcccatctgggaagatgaagggcctgccatcggtgacaccagccgcagccgatcccctgatgactccagaacttgccgacgtgtaccgcacatacgacgcagatatgacaaccagcgtggacttccaagaagaagccacaatggatacaaccatggcccccaactccttgcagaccagtatgcccggaaataaagcgcaggagcctgaaatgatgcacgatgcctggcacttccaggaacct

SEQ ID NO: 5932 - DNA, 1341 bp, synthetic construct
  misc_feature 1..1341: note = source = /note="Description of Artificial Sequence: Synthetic coding sequence"
  source 1..1341: mol_type = other DNA
atgagtgcctctaaaatacctctcttcaaaatgaaagacctgatcctcatcctctgtctactcgaaatgtcttttgccgttccttttttcccccagcagtcggggactccagggatggctagtcttagtctcgaaacaatgcgccagctagggtctcttcagaggttgaacactctatcccagtattctcggtatgggttcggaaaaagttttaacagtctgtggatgcatgggttgttaccgccacattcttcactcccctggatgaggcctagggaacatgaaacacagcagtatgaatatagtctgccagtccacccccccccactcccctctcagccttctctaaagccccagcagcctgggttgaaacccttcctccagtccgccgctgccactacaaatcaggccactgccctaaaagaagctctccagccccccattcacttagggcatctgcccttgcaggaaggagaactgcccctggtgcagcagcaggtggctccttctgataagccacctaaacctgaactccctggagttgatttcgcggatccccagggaccatcactcccagggatggatttccccgatccacaggggccctctcttcccggacttgacttcgcagatccccaggggtcaacaatttttcagatagcaagactcatatcacatgggccaatgccacagaataagcagtcgccactttatcccgggatgctttacgtaccattcggagccaaccaactgaacgctcctgctcggctggggattatgtcctccgaagaagttgctgggggacgggaagatccaatggcatatggagctatgttcccaggatttggagggatgagaccagggttcgaaggaatgccccataatccagcaatggggggggatttcactctggaatttgattctcccgtggcagccactaaagggccagaaaacgaagaagggggggctcaaggatccccaatgcctgaagctaaccccgataacctggagaatcctgcatttctgactgaactggagcctgctcctcatgcaggactcctagctcttcccaaagacgatatcccaggactccccaggtctcccagtggaaaaatgaaggggcttccgtccgtgacaccagcggcagctgacccattgatgacacctgagcttgcagacgtctataggacttacgatgccgatatgactacttctgtagatttccaggaagaggctactatggatacgactatggcccccaattctcttcagacatccatgcccggaaacaaagcccaggaaccagaaatgatgcacgacgcgtggcattttcaggaaccc

SEQ ID NO: 5933 - DNA, 1341 bp, synthetic construct
  misc_feature 1..1341: note = source = /note="Description of Artificial Sequence: Synthetic coding sequence"
  source 1..1341: mol_type = other DNA
atgtcggctagcaagatcccattattcaagatgaaggacctgattctcatcctctgcctgttggagatgtccttcgctgtcccattttttccacagcaaagcgggacaccaggaatggcatcactctccctggaaaccatgaggcagctggggtctctgcagcgacttaacactctaagtcagtactccaggtatggctttggaaagagcttcaacagcctgtggatgcatgggctacttccccctcatagctccctcccttggatgagaccaagagagcacgagacacagcaatacgagtactctctaccagtgcatccacccccactcccatctcagccaagccttaagccgcaacagccgggtctgaaacccttcctgcagagcgctgccgccaccacgaaccaggcaaccgcgctcaaggaggccttacagcccccaattcacctggggcacctgcctctccaggaaggcgagttaccccttgttcagcagcaagtggctccttctgacaagccgccaaagcctgagctgcctggcgtcgactttgcagacccgcagggtccctccttgccaggcatggacttccctgatcctcagggtcctagcctgccgggtctggactttgccgacccccagggaagcacaatcttccagattgccaggctgatcagccacggacccatgcctcagaacaaacagtcacccttatacccaggcatgttgtacgtgccatttggtgccaatcagctgaatgctccggcccgcctggggataatgagttccgaggaagtggcggggggacgggaggaccccatggcgtacggagccatgtttccaggattcggaggcatgcgccctgggttcgagggtatgccccacaatccagccatggggggcgactttaccctggaattcgatagccctgtggccgcgaccaagggcccggagaacgaggaggggggcgcacagggctcgccaatgcctgaggccaatccggacaacctggagaatccagctttcctgaccgagcttgaaccagccccgcacgccggactgttagcgctgcctaaggacgacattcccggcttacctcgatcaccctcaggaaagatgaaaggtctgccctctgttacgcccgcagcggcagatccactcatgacacccgaactggcggacgtttaccgcacctacgacgctgacatgactacctctgtggatttccaggaagaggccactatggacacgaccatggcccctaattccctgcaaacctctatgccaggtaacaaggcccaggaaccagagatgatgcacgacgcttggcattttcaggaacca

SEQ ID NO: 5934 - DNA, 1341 bp, synthetic construct
  misc_feature 1..1341: note = source = /note="Description of Artificial Sequence: Synthetic coding sequence"
  source 1..1341: mol_type = other DNA
atgtctgcctccaaaattcctctgtttaagatgaaagacctcatcctgattctgtgcctcctcgagatgagctttgcggttccattcttccctcagcagagtgggactccgggcatggcctcgctgtcgctcgaaacgatgcggcagctgggatctctgcagaggcttaacaccttaagccagtactcccggtatggcttcgggaaaagttttaattccctgtggatgcacggtcttctaccaccacacagcagcctcccctggatgagaccgagggagcatgagacccaacaatatgagtattccctccctgtgcatccaccccctctaccctcacagccctcactgaagccccagcagcccggattgaagcccttcctgcagagcgctgctgctacgaccaaccaagcaactgcactgaaagaagccctgcagcccccaattcatctcggtcacttgcccctgcaggaaggtgagctccctcttgttcagcagcaagtggctccatcagacaaaccaccaaagcccgaacttcctggcgtggattttgccgatccccagggtccttcgttacccggcatggacttcccagatccacagggccctagcttgccgggtctcgattttgctgatcctcaggggtctaccatttttcagattgccaggctgatatcccacggaccaatgcctcaaaacaaacaatctccattataccctggaatgctgtatgtgcccttcggagcgaaccaactgaatgcccccgcgcgcctgggcatcatgtcatctgaggaagtggccggcggcagggaggacccgatggcctacggcgcgatgttcccaggttttggcggaatgcgtcctgggttcgaaggcatgccacacaatccagctatggggggcgactttactctcgagttcgacagcccagtcgcagctactaagggccccgagaacgaagaagggggtgcacaggggagccctatgcccgaggctaatccagacaatcttgagaacccggcctttctgacggagttggaaccagcccctcacgccggcctactcgcgctgccaaaggatgacatacccgggctgccgaggtctccaagcggcaaaatgaaaggactgccatctgtcaccccggccgcagcggaccccctgatgactcccgaattggcagacgtgtacagaacatatgacgctgatatgaccacatcggttgacttccaggaggaagccacaatggacaccacaatggccccgaacagtctccagacgtccatgccgggtaacaaggcacaggagcccgagatgatgcatgacgcctggcactttcaggagcct

SEQ ID NO: 5935 - DNA, 1341 bp, synthetic construct
  misc_feature 1..1341: note = source = /note="Description of Artificial Sequence: Synthetic coding sequence"
  source 1..1341: mol_type = other DNA
atgtcggcttcgaaaattccgttgttcaagatgaaggatctgatcctgattctgtgtctgcttgaaatgtcgtttgctgtcccatttttcccacagcagagcggaacgcctggaatggcctcattgtcactcgaaactatgagacaacttggatcacttcagcggctcaacaccttgagccagtattctcgctacggttttggaaagtcattcaactccctctggatgcacggcctccttcctccacactcctcccttccgtggatgcgcccccgcgagcatgaaacgcaacagtacgaatactctctgccagtgcatccgcccccgctgccaagccaaccctcgctgaagccccagcagcccggactcaaaccattccttcagtccgccgccgccactaccaaccaggcgaccgctttgaaggaagcgctgcagccgcccatccatctgggacacctgcccttgcaagagggagaactgccgctcgtccagcagcaagttgcaccgtccgacaagccaccgaaaccagagctgccgggcgtggactttgctgatcctcaagggccttctctcccgggcatggatttccctgacccacagggcccgtcgctgccgggtcttgacttcgcggatcctcagggatcaaccatattccagatcgcacgcctgatctctcacggacctatgccacagaacaagcagtccccactgtacccgggtatgctctacgtgccgttcggggcgaaccaattgaatgcacctgcacggcttggaatcatgtcctcggaggaggtggcgggaggacgggaggatccgatggcgtacggggccatgtttccgggcttcggagggatgcgcccgggctttgaagggatgccacacaatcccgctatgggaggcgacttcaccctcgaattcgacagtcctgttgctgccactaagggaccggagaacgaggaaggtggagcgcaagggtcaccgatgccagaggcgaatccggacaatctggaaaaccctgcgttcttgaccgagctggaacctgcacctcacgctggcctgctggcgttgccgaaggacgacattccggggctcccgcgctccccttcaggcaaaatgaagggcttgcccagcgtgactccggccgccgccgacccgctgatgacgcctgaactcgccgacgtgtaccgaacttacgacgccgacatgactacttcagtcgacttccaagaggaagccaccatggataccaccatggctccgaactccctgcaaacttcgatgcctggtaataaggctcaggaacctgaaatgatgcacgatgcatggcatttccaggaacct

SEQ ID NO: 5936 - DNA, 1341 bp, synthetic construct
  misc_feature 1..1341: note = source = /note="Description of Artificial Sequence: Synthetic coding sequence"
  source 1..1341: mol_type = other DNA
atgtctgctagtaaaatcccactgtttaagatgaaggatctgattctgatactttgtcttttagagatgagtttcgctgttccctttttcccacagcaatcaggaactcccggcatggcttccctgtccctggaaactatgagacagctcggtagcctacagcggttgaatacacttagtcaatacagccggtatggatttggtaagagcttcaactcactctggatgcacggactgctccccccccattcctccttgccctggatgcggccccgcgaacatgagacacagcagtacgagtactcactgccagtgcatcccccccctctgcccagccagcctagtctgaagccccagcagcccgggcttaagccctttctgcagtccgccgctgcaacgacaaaccaggcaaccgctcttaaggaggccctgcagccgccaatacatctgggccatttgcctctccaggaaggggaattgcctcttgtgcagcaacaagtcgccccatccgataagccaccgaagccagaactcccaggcgttgattttgctgatccgcaaggaccatcattacccggcatggattttccagacccccaggggccttccctgccaggtctcgatttcgctgatccgcaaggcagcacaatattccagatcgccagactgatttcacacggccctatgccacagaacaaacaaagccctctctaccctggcatgctttacgtcccattcggggccaatcagcttaatgcccccgccagactcggaattatgtcttcggaggaggtggccggaggacgcgaagatccaatggcctacggcgccatgttccccggctttggcggcatgagacctgggttcgaggggatgccacataaccctgccatgggcggcgactttaccctagaatttgatagtccggtggctgcaaccaaagggccagaaaatgaagagggtggtgcgcagggttcacccatgcccgaagctaatccagacaacctcgaaaatcctgcctttctcacggagctcgagcctgctcctcatgctggtttactggcactcccaaaagacgatatcccgggtcttcctcgcagcccatcgggtaaaatgaaaggtttgccatctgtaactccagctgctgctgatcctctgatgacaccagaactagccgatgtttatcggacttatgacgcggatatgaccacgtctgttgactttcaagaggaggctacaatggatacaacaatggctccaaacagtctacagacctcaatgccggggaacaaggcccaagagccagagatgatgcatgacgcctggcactttcaggaaccc

SEQ ID NO: 5937 - DNA, 1341 bp, synthetic construct
  misc_feature 1..1341: note = source = /note="Description of Artificial Sequence: Synthetic coding sequence"
  source 1..1341: mol_type = other DNA
atgagcgcgtccaagatccccctcttcaagatgaaagacttgatcctgatcctgtgcttgctggaaatgtccttcgccgtgcctttcttcccacagcaatcaggcaccccgggaatggcctcgctgagcctggaaaccatgcggcaactgggatccctgcagcgcctgaataccctctcgcaatacagcaggtacggattcggcaagtcgtttaactccctgtggatgcacggattgctgccgccacattcctcgctcccatggatgcgaccgagggaacacgaaacccagcagtatgagtatagcctgcccgtgcacccaccaccgttgccatcgcagccgtcactgaaaccgcaacagccggggctgaagccatttctccagtctgccgccgcgaccaccaaccaagcgacggcactgaaggaagcccttcagccgccgatccacctgggccatctcccgctgcaagaaggtgagctcccgctggtccaacagcaggtcgccccgtccgacaagccccctaagccggaacttccgggggtcgatttcgctgacccgcagggaccgagcctcccaggcatggatttcccggatccacagggcccatcgctgccaggattggattttgcagaccctcagggatcgacgattttccagatagctaggctcatttcccatgggccgatgccacaaaacaaacagtccccgctttacccgggaatgctgtacgttccgttcggagcgaaccagctgaatgctcctgccagactcggaatcatgtcgtccgaagaggtggcgggaggaagagaggacccgatggcttacggagcgatgttcccgggattcggaggcatgcggcccggattcgaaggaatgccacacaacccagccatggggggcgatttcaccctggagttcgattccccggtggcagctactaaggggcctgaaaatgaggagggaggggcccagggtagccctatgccagaggccaaccctgacaacctcgaaaacccagctttcctgaccgaactggagccggcaccacacgcggggctgctcgctctccccaaggacgatatccctggactgcccaggagcccttcgggcaaaatgaagggactgccgagcgtgactcctgcagccgctgacccactgatgaccccggaattggcagatgtctatagaacttacgatgccgacatgactacctccgtggacttccaggaagaagcaactatggataccaccatggccccaaattcgctgcagacttcgatgccaggcaataaggcacaggaaccggagatgatgcacgacgcgtggcattttcaggagcca

SEQ ID NO: 5938 - DNA, 1341 bp, synthetic construct
  misc_feature 1..1341: note = source = /note="Description of Artificial Sequence: Synthetic coding sequence"
  source 1..1341: mol_type = other DNA
atgtccgcaagcaaaattcccctctttaagatgaaagacctgattcttattctctgtttgctggaaatgtcctttgcagtgcccttctttccacagcagtctggaaccccaggaatggccagcctttctctggaaactatgcgacaacttggatccctccaaagactgaataccctcagccagtattcgcggtacggattcggtaagagcttcaattccctctggatgcacggcctgcttccccctcattcctcactcccttggatgaggccacgtgaacacgaaactcagcaatacgagtactcgcttcctgtgcatccgccgccccttccatcacaaccatcgctcaagcctcagcaaccagggcttaaaccctttctccaatcggccgctgcaaccaccaaccaagcaaccgcgctcaaggaagcccttcagcctccgatccatctgggccaccttcctcttcaagaaggcgagctgcctctcgtgcagcaacaggtggctccatccgacaaacccccgaaaccggaactccctggtgttgattttgcggatcctcaaggtccatcacttcccggcatggatttcccggaccctcaaggcccatctctgcctggccttgatttcgccgaccctcaaggatcgacgatctttcagatagcccgtctcatttcgcatggtccgatgccgcagaacaaacagtcccctctgtacccaggaatgctttacgtccccttcggagcaaaccaactgaatgcacctgcccgcctcgggatcatgagctcagaagaagtggcggggggccgcgaggatcctatggcttacggagcgatgttccctggatttgggggaatgaggccggggtttgaaggtatgcctcataaccctgcgatgggaggtgatttcactctggaattcgactctcctgtggccgcaaccaagggtccagaaaatgaggaggggggtgcacaaggatctccaatgcccgaggccaacccggacaaccttgagaatcctgctttcctcacggaattggaacccgcccctcacgcagggctcctggctctgcccaaggacgatattcctggacttccaagaagcccctcgggcaagatgaagggtttgccttcagtgaccccagcagctgcagatccgttgatgacccccgagttggcagatgtctaccggacctacgatgcagacatgactacctccgtggactttcaagaagaagcaactatggatactacgatggcaccaaactcactgcaaacctccatgccaggaaataaggcacaggaacccgagatgatgcacgatgcatggcattttcaagagcct

SEQ ID NO: 5939 - DNA, 1341 bp, synthetic construct
  misc_feature 1..1341: note = source = /note="Description of Artificial Sequence: Synthetic coding sequence"
  source 1..1341: mol_type = other DNA
atgagcgcttccaagatcccgctcttcaagatgaaggatctgattcttatcctgtgcttgctcgaaatgtcgttcgccgtgccatttttcccacagcagtcaggtaccccgggaatggcaagcctgtcgcttgaaaccatgcgccagcttggatcgcttcagcggcttaacaccctctctcaatacagccgctacggctttggcaagtcattcaactctctgtggatgcacggactcctgcctccacatagctccctgccttggatgcggcctcgggaacatgagactcagcaatacgagtactcgctcccagtgcaccctcctccccttccaagccaaccatcactgaagccacagcagccagggctgaagccttttttgcaatccgcggcggccaccaccaatcaagcaaccgcccttaaagaagcgcttcaacctcctattcatctcggacatcttccactgcaagaaggcgaattgcctctggtccagcaacaagttgcaccatcagataagcctcccaagccagagcttccgggggtggatttcgcagacccgcaaggtccgtcgctgccagggatggactttcctgacccccaaggccccagcctgccagggttggattttgcagacccacaaggctcaactatcttccaaattgcacgcctgatctctcacggaccaatgcctcaaaacaaacaatccccactttaccctggaatgctctacgtgccattcggcgcaaatcagctgaatgcacctgcacgcctgggtattatgtcctcggaggaggtggcaggcgggcgtgaggaccctatggcatacggtgctatgttccccggattcggagggatgaggcccggtttcgaaggtatgccccataacccggcaatgggtggagacttcaccctggaatttgactcccccgtggccgcgactaagggtccagaaaacgaagaaggaggagcccaggggtcgccaatgcctgaggcgaaccctgataatcttgagaatccggcatttcttactgagctggaacctgcgccacatgcagggctccttgcacttccgaaagatgacattcctggattgccaagaagcccctcgggaaagatgaaaggtctgccctcggtgaccccggcagcagcagatccactgatgactcctgagctcgcagatgtgtacagaacttatgatgcagatatgactacttccgtcgatttccaagaagaagcaactatggacactactatggctcctaacagcttgcagacgtcgatgccaggtaataaggcccaggagccagaaatgatgcatgacgcatggcactttcaagaaccc

SEQ ID NO: 5940 - DNA, 1341 bp, synthetic construct
  misc_feature 1..1341: note = source = /note="Description of Artificial Sequence: Synthetic coding sequence"
  source 1..1341: mol_type = other DNA
atgtcggccagcaagattcccctgttcaagatgaaagacctgattctgattctttgtctgctggagatgtcgtttgcagttccttttttccctcaacaatcagggaccccaggaatggcaagcctgtcacttgaaaccatgcgtcaactcggttccctgcagaggctgaacaccctctcgcagtactcccgatacgggtttggtaagtcctttaacagcctgtggatgcacggacttctgcctccccactcatcattgccatggatgcggccgagagagcatgaaacccaacagtatgagtactccctgcccgtgcatccccctcctctgccttcacagccgagccttaaaccccagcagccaggccttaagccttttctccaaagcgcggcagccactaccaaccaagccacggcgctgaaggaggcactgcagccaccgattcacttgggccaccttccgctgcaagagggggagctgccactcgtgcaacaacaagtcgcgccctccgacaaacctccaaaacccgaactccccggtgtcgattttgccgatccccaagggccgtcgttgccaggcatggattttccagatccccaaggtccatcgcttccgggcctggattttgccgaccctcaagggtccacgatatttcagatcgcgagacttatttcacatggacctatgccacagaacaagcagtcgcctctttacccaggtatgctgtatgtgccatttggtgccaatcaacttaatgcacctgcacggcttggtattatgtcatcggaagaggtggccggaggaagagaggatccgatggcatacggagcgatgtttccaggatttggtggaatgcgccccggtttcgaaggaatgcctcataacccagccatgggaggtgactttactttggaatttgactcccctgtggcagcaaccaaggggcctgagaatgaagagggtggcgcacaaggcagccctatgccagaagcaaatccagataacctggaaaacccggcttttctcactgaacttgagcccgcgcctcatgcaggtctgctggccctgcctaaagatgatatcccaggccttccacgcagcccttcgggcaagatgaaagggctcccatccgtcactccagcggccgcggatccactcatgacccctgaattggcagacgtgtacagaacttatgatgcagatatgacgacctctgtcgatttccaggaagaagctacgatggacaccaccatggcacctaactctcttcagacttccatgccaggtaacaaggcccaagagcctgagatgatgcatgatgcgtggcacttccaagaacct

SEQ ID NO: 5941 - DNA, 1341 bp, synthetic construct
  misc_feature 1..1341: note = source = /note="Description of Artificial Sequence: Synthetic coding sequence"
  source 1..1341: mol_type = other DNA
atgagcgcatccaaaatcccactctttaagatgaaggatctgatcctgatcctttgcctccttgagatgtcgtttgccgtcccgttttttccccagcagtcaggaacgccgggaatggcatccctgagcttggaaaccatgagacaactgggaagccttcagcgacttaataccctttcgcaatactcacgctacggttttggtaagtccttcaactcgctgtggatgcatgggcttcttccccctcactcgagcctgccttggatgcgtccacgtgaacacgaaacccaacaatacgaatactccctgcctgttcatcctccaccactccccagccaacccagcctgaagccccagcaaccaggactgaagcccttccttcagtccgcagcagcaactaccaatcaagcaactgcacttaaggaagcgctccagccgcccatccacctgggtcatcttccactgcaagaaggagaactccctctggtgcagcaacaggtggcccctagcgacaagcctcccaagcctgaacttcctggagtggatttcgccgacccacaaggaccctcccttccgggaatggattttcctgacccccaaggaccgagccttccgggactggattttgcggatcctcaaggttctactatctttcagatagcacgcctgatttcacacggacctatgcctcaaaacaaacaatcccccctctaccctggtatgctttacgtgcccttcggagccaaccagctcaacgcaccagcaaggctgggaattatgtccagcgaagaggtggcgggaggaagagaagatcctatggcttacggggcaatgtttcctggctttggaggtatgcggccaggctttgagggcatgcctcataacccagcaatgggtggcgattttacgctggagttcgactcccccgtggctgcaactaagggaccagaaaatgaagagggaggcgcccagggatcaccgatgcctgaggcgaatccggacaaccttgagaatcctgcttttctgacggagctcgaaccggccccacatgccggactgcttgcactgccgaaggatgatattcctggactcccacgctcaccatcaggtaagatgaaaggccttccctcggtgactccagcggcagcagacccactcatgacccccgaactggctgatgtgtacagaacgtacgacgcagatatgaccacgtcggtggattttcaggaagaggcaactatggatactaccatggctcctaattccctccagacgtcgatgcctggtaataaggcccaggagcctgagatgatgcatgatgcatggcactttcaggaaccg

SEQ ID NO: 5942 - DNA, 1341 bp, synthetic construct
  misc_feature 1..1341: note = source = /note="Description of Artificial Sequence: Synthetic coding sequence"
  source 1..1341: mol_type = other DNA
atgagtgcctcaaaaattccgttgttcaaaatgaaggatctgattcttatattatgcctgctggagatgtccttcgctgtacctttcttcccgcagcagagtggcactccaggaatggcatccctctccctcgagactatgcgtcagctggggagtcttcaacgacttaatacactgagtcagtatagtaggtacggctttggaaagtctttcaactccctctggatgcacggtcttctgccaccgcacagttccttgccgtggatgcggcctagggagcatgaaactcagcagtacgaatattccctgccggttcatcctcctcctctcccaagccagccctcactgaaaccgcagcagccaggcctgaaaccctttctgcagtccgcggctgccacgaccaatcaggctacagccttgaaagaggccttacagccgcccatacacctgggacaccttcctctccaggagggggagctgccactggtgcagcagcaggtggcgccttcagacaaaccgccgaagccagagttgcctggtgtcgacttcgccgaccctcaggggccctctctgccgggcatggatttccccgatccgcaaggccctagcctgccgggcttggattttgccgatccccagggctccacaatattccagatcgctcggttgattagccacgggcccatgccgcaaaacaagcaaagcccactttacccgggcatgctgtacgttccattcggagccaatcaactgaatgccccagcgcgcttaggaatcatgtcgagcgaagaggtggccggaggtcgtgaggacccaatggcttacggcgctatgtttcccgggtttgggggaatgagacccgggttcgaagggatgcctcacaatcctgcaatgggtggcgactttaccctagagtttgatagcccagtggccgccaccaaggggcccgagaacgaagagggaggagctcagggctcccccatgccagaagctaatcctgacaacttggaaaaccccgcgttccttacagaactggagcctgcaccgcacgctgggttactcgctcttcccaaagacgatatcccaggcctcccccgatctccgtccggtaagatgaaagggctgcctagcgtaacacccgcagccgccgaccccctcatgacaccagaactggccgatgtgtaccgaacttatgacgcggatatgactacatctgttgactttcaggaggaggccactatggatacgaccatggcccctaacagtctacagacctctatgcctggaaacaaagctcaggagcccgagatgatgcacgacgcctggcactttcaggaacca

SEQ ID NO: 5943 - DNA, 1341 bp, synthetic construct
  misc_feature 1..1341: note = source = /note="Description of Artificial Sequence: Synthetic coding sequence"
  source 1..1341: mol_type = other DNA
atgtccgcatcgaagattccattatttaaaatgaaagatttgattttaattctttgcctcttagagatgtccttcgctgttccattctttccccagcaaagtgggacacctgggatggcgagcctctcactggaaacgatgcggcaactgggttctctgcagcggctgaacacactgtctcagtatagtcgctatgggtttggaaaatccttcaattctctatggatgcacggtttgttgccaccccacagttcactcccttggatgcgaccacgtgagcatgaaactcagcagtacgagtactcactcccagtacaccctccaccacttcccagccaaccaagtctgaagccccaacagcctgggttgaaacccttccttcaaagtgctgctgccacaacaaaccaggccactgcactcaaggaagcccttcaaccacctatccacctgggtcatctgccgttacaggaaggcgagcttcctctggttcagcagcaggttgccccttcagataaaccgcctaagcccgagctcccaggggtcgactttgccgatcctcagggcccaagcttgccaggcatggacttcccagacccccagggaccatccctacctgggctcgattttgccgacccccaagggagcacgatattccagatcgcacggttaataagtcatgggcccatgccgcaaaataagcagtcccccttgtatccaggcatgctgtacgtgccattcggcgcaaatcagctgaacgcccccgctcgtcttggcataatgtcaagcgaagaggtggcaggggggagggaggaccccatggcctatggtgcaatgttccccgggttcgggggaatgcgtccagggtttgagggcatgccacataacccggccatgggaggtgatttcacattggagttcgactcgccggtggccgcgactaaaggccccgaaaacgaagagggaggggcccagggctccccaatgcccgaggcgaatccggataacttggaaaatcccgcctttctgacagaactagagcctgcaccgcatgcggggctgttggccctgcccaaggatgacatcccaggattgcccagatccccctctggaaagatgaaaggtctgccgtctgtaaccccagcagcagcagaccccctgatgaccccagagctggctgacgtgtaccggacttacgatgctgacatgaccacatcagtagacttccaagaggaggctacgatggacactactatggcccccaactctcttcaaacatccatgccaggcaacaaagcacaggagcctgagatgatgcacgatgcttggcattttcaggaacct

SEQ ID NO: 5944 - DNA, 1341 bp, synthetic construct
  misc_feature 1..1341: note = source = /note="Description of Artificial Sequence: Synthetic coding sequence"
  source 1..1341: mol_type = other DNA
atgagcgcatcaaagattcctctgttcaaaatgaaagacttgatcctgattctgtgcctgttggaaatgagcttcgcggtgccattcttcccacagcagtcggggaccccggggatggcgtcgttgtcgctcgagactatgcgccaactgggctcgctccaaagactcaacactctctcacagtactcgcgctacggcttcggaaagtcatttaactccttgtggatgcacggtctgttgccacctcactcttcgctgccatggatgcgcccgcgtgaacatgagacgcaacaatacgaatactccttgccggtgcacccaccaccgctcccctcgcaaccgtccctcaagccgcagcaacccggcctcaagcctttcctgcagtcggcagcggcaactaccaatcaggccactgcgctgaaggaggcactccagcctccaatccatctcggccacctgccgctgcaggagggagaacttccgctggttcaacagcaggttgcgccttcggacaaaccccctaagccggaactgcctggcgtggatttcgctgatccccaaggtccgagcctgcccggaatggactttccggacccacagggaccatcgcttccaggactggacttcgccgacccgcagggctccactattttccagatcgcgcggctcatcagtcacggacctatgccacagaacaaacaatcgccactctaccctggaatgctgtacgtgcccttcggagctaatcaactcaacgcccctgctcgcctcggaatcatgagctcagaggaggtcgccggaggccgcgaggacccgatggcgtacggagccatgttcccgggattcgggggaatgcgacctggattcgagggaatgccgcacaaccccgcaatgggcggggatttcaccctggaattcgactccccggtcgcggcgactaagggccctgaaaacgaagaaggaggagcgcaaggaagccctatgcccgaggcgaatccagataatctcgaaaacccggccttcttgacggagctggaacctgcgccgcacgctgggctgctggcacttccgaaggacgacatcccgggcctgcctcgctccccctctggaaagatgaagggtctgccttccgtgaccccggctgctgctgacccgctgatgaccccagagctcgcagatgtgtatcgcacttacgacgcagacatgactacctcagtggactttcaggaagaagccactatggacaccaccatggcccctaactcactgcaaacctcgatgcctgggaacaaagcccaagagcctgagatgatgcatgacgcgtggcatttccaggaaccc

SEQ ID NO: 5945 - DNA, 1341 bp, synthetic construct
  misc_feature 1..1341: note = source = /note="Description of Artificial Sequence: Synthetic coding sequence"
  source 1..1341: mol_type = other DNA
atgagcgcatccaaaatcccactgtttaagatgaaagaccttatccttattctttgtctgcttgagatgtcgttcgccgtgccttttttcccacaacaatcaggaactcctggaatggcgagcctttcacttgaaaccatgagacaactcggttcgctgcaaagactcaacactctttcccagtactctcgatacggatttgggaagagctttaactccctgtggatgcatggactgcttccaccacattcgagcttgccttggatgcgaccgagagaacatgagactcaacagtatgaatactcgcttcctgtgcacccacctcctctgcctagccaaccttcgcttaagcctcagcagcctggtctgaagccatttcttcagtccgcggcagcgacgacgaaccaagccactgcacttaaagaggctctgcaaccacctatacatcttggacatctccctttgcaagaaggagaattgccacttgtgcagcaacaggtcgcgccctcggataaacctccaaagccggagttgcccggggtggatttcgcagacccccaaggaccttcactcccaggcatggatttccccgatccacaaggaccgtcgctgcctggcctcgattttgcagaccctcagggttcgaccatattccagatcgcccgacttatcagccatggaccaatgcctcaaaacaagcagtcaccgctttaccctggtatgctgtacgtcccattcggtgcaaaccaacttaacgccccagcacgcctcggtattatgtcctccgaagaagtcgccggtggcagagaggatcctatggcctacggagcaatgttccctggattcggtggaatgaggccaggattcgaggggatgcctcataaccccgcaatgggaggcgattttactttggagtttgattcaccagttgcggcaactaagggaccagaaaatgaagaggggggtgcacagggttcgccgatgccagaagccaacccagataatcttgaaaaccccgcctttcttactgaactcgaacccgcacctcatgcaggcctgctggccctccctaaggatgacattcccggcttgccacgaagcccatcaggtaagatgaagggacttccatcggtgaccccggccgcagcagatccgttgatgacccctgagctggcggatgtctaccggacttacgatgcagacatgaccacctcggtggattttcaagaagaagcaaccatggatactaccatggcgccgaatagcctccaaacttcaatgcctggtaataaggcgcaggagcctgaaatgatgcacgacgcgtggcatttccaggagcct

SEQ ID NO: 5946 - DNA, 1341 bp, synthetic construct
  misc_feature 1..1341: note = source = /note="Description of Artificial Sequence: Synthetic coding sequence"
  source 1..1341: mol_type = other DNA
atgtctgcatccaagattcctctcttcaagatgaaggacttgattctcatcctttgcctgctcgaaatgtctttcgcagtgcctttctttccccaacagagcggaacccctggtatggcatccctgagccttgagacaatgcgccagttgggcagtctgcaaaggctcaatacactgagtcagtactcacgctacggattcggcaagagctttaactccctgtggatgcacggtctcttgcctccacactctagtctcccttggatgagaccccgtgagcacgaaacccagcagtatgaatatagtctccccgtccacccacctcccctgccatcccaaccctcacttaagccccaacagcctggtctcaaaccattcctgcaatcagccgcagccaccactaatcaggcaaccgctttgaaggaggcactccagccaccaattcaccttggccatcttcctctccaagagggcgaactgcctcttgtccagcaacaagtcgccccatctgacaagccacccaagccagagttgcccggcgttgattttgcagatcctcagggaccctcacttcctggtatggacttccccgacccccaaggcccctctctccccggcttggatttcgcagatccacagggctctaccatctttcaaatcgctaggctcatcagccatggacctatgccccagaataagcagagccctttgtaccctggtatgctgtatgttcccttcggtgccaaccagcttaacgcccccgcaagattgggaatcatgtcatctgaggaagtcgccggaggccgcgaagaccccatggcctacggtgcaatgtttcctggtttcggtggcatgcgtccaggttttgaaggaatgccccacaatcctgcaatgggaggcgacttcacactcgaattcgactcacccgtggccgctacaaagggccctgaaaatgaggagggtggcgctcagggttcccctatgccagaagctaaccccgacaacctggaaaatcctgctttcttgacagagttggagcccgcaccacacgccggtcttctcgctcttcccaaagatgatatccccggcctccctcgctcccccagcggaaaaatgaagggtctgccatctgtaactcccgccgctgcagatcccttgatgacacccgagttggcagacgtgtaccgcacttatgacgcagacatgaccacaagtgttgattttcaggaggaggccactatggacacaaccatggcccccaacagtctgcaaacttcaatgcctggcaacaaggctcaggagcccgagatgatgcacgatgcttggcatttccaagaacca

SEQ ID NO: 5947 - DNA, 1341 bp, synthetic construct
  misc_feature 1..1341: note = source = /note="Description of Artificial Sequence: Synthetic coding sequence"
  source 1..1341: mol_type = other DNA
atgtccgcctccaagatcccgctgttcaagatgaaggatctgatcctcatcctgtgtctgctggagatgtcattcgccgtcccattctttccacaacagtcaggcactccaggtatggctagcctgtctctcgagacgatgcgccagctgggttcgctgcaaagactcaatacgctctcccaatactcaagatacggttttggcaaaagtttcaactcgctttggatgcatggactgctgcctcctcactcgtcgctgccgtggatgcggccccgcgagcacgaaactcagcagtacgaatactccctccccgttcatcctccgccactgccgtcccagccgtcactcaaaccgcagcagccggggctgaagccctttctgcaatccgctgccgcaactaccaatcaggccaccgctctcaaagaagctctgcaaccgccgatccatctgggccacctgccactccaggagggagagctgccgctggtgcagcaacaggtcgccccgagcgataagccgccgaaaccggaactgccgggcgtcgattttgccgatccacaggggccgtccctgccaggaatggacttcccagaccctcaaggtccttcgctgccggggctcgacttcgcggaccctcagggatcaactatattccaaattgcgcggttgatttcgcacggaccgatgccgcaaaacaagcagagcccgctctacccgggaatgctgtacgtgccattcggagcaaatcagctgaacgcaccggcgcggctgggaatcatgtcctcagaggaagtcgccggaggaagagaagatccaatggcttacggagctatgttcccgggctttggaggaatgaggcccggattcgaaggcatgcctcacaacccagccatgggaggcgacttcactctggagtttgattcgccagtggcggcgaccaagggacctgaaaatgaggaaggaggtgctcagggtagcccgatgccggaggctaacccggataacctggaaaacccagcatttctgacggaactggagcccgctccccacgctggactgctggcgcttccaaaggatgacatcccaggcctgccgcgctcaccgagcggaaagatgaagggactgccgtcagtgaccccggccgcagccgacccattgatgaccccggaactcgctgacgtctatagaacctacgatgccgacatgaccacttcagtggacttccaagaggaggccactatggacactactatggcgcctaattcactgcagacctccatgccgggaaataaggcccaggagccggaaatgatgcacgatgcatggcatttccaggaacct

SEQ ID NO: 5948 - DNA, 1341 bp, synthetic construct
  misc_feature 1..1341: note = source = /note="Description of Artificial Sequence: Synthetic coding sequence"
  source 1..1341: mol_type = other DNA
atgtcggcatcgaagataccattgttcaaaatgaaggatcttatcctgatcctgtgcctgctggaaatgtcgtttgctgtgcccttttttccgcaacagtccggcaccccaggaatggcctcgctgtcccttgaaaccatgcgccaactcggatctctgcagcggctcaatactcttagccagtattcgcgctacggattcggtaagtcgttcaactcgctgtggatgcatggactgctgccgccccattcttcgctcccgtggatgcgccctcgcgaacatgaaactcagcagtacgagtactcgcttccagtgcacccacctccactgccttcgcaacctagcctgaagccccagcaaccagggcttaaaccattcctgcaatccgcggcagctaccactaatcaagcaacggctctgaaagaagcccttcaaccgccgatccatctgggacacctgccgttgcaagagggagaactgccgctggtccagcagcaagtggccccatccgacaaaccaccgaaacctgaattgcccggcgttgacttcgcggacccacagggcccgtccctcccagggatggacttcccggatccgcaaggaccgtccctgccgggcttggatttcgctgatccgcagggatccacgatcttccagatcgcgagactcatctcacatggaccgatgccccagaataaacagagcccactctacccgggcatgctctacgtgccgtttggagcgaatcagctgaatgcacccgcgcggctgggaatcatgagctccgaggaggtggcgggcggtagggaagatccgatggcatacggagccatgttcccgggattcggaggtatgaggccgggattcgaggggatgccacacaaccctgctatgggcggggatttcaccctggaatttgatagcccagtggccgccactaagggccctgagaacgaggagggaggcgcgcaaggatcacctatgccggaggctaaccccgataacctcgagaaccctgcattcctgaccgagttggagcccgcgccccatgctgggcttcttgccctgccaaaagatgatatcccgggactgccgcgtagcccgagcgggaagatgaagggtctgccatcagtgacccccgctgccgccgaccccctgatgactcccgagctcgccgacgtctacaggacctatgacgcagacatgaccacctccgtcgatttccaggaggaggcgactatggacactaccatggctccgaactcactgcaaacctcgatgccgggaaacaaggcgcaagagccggagatgatgcatgatgcatggcactttcaggaaccg

SEQ ID NO: 5949 - DNA, 1341 bp, synthetic construct
  misc_feature 1..1341: note = source = /note="Description of Artificial Sequence: Synthetic coding sequence"
  source 1..1341: mol_type = other DNA
atgtcggcctccaagatccccctttttaaaatgaaagatctcatccttatactgtgcttgctggagatgtctttcgctgttcctttcttcccacagcaaagcgggacccctggtatggcttctctgagtcttgagaccatgagacagctggggtctcttcaacgcttgaacacactgtcccagtacagccggtacggcttcggcaagtcattcaacagtctgtggatgcacgggttactgcctccgcattcaagtctgccttggatgcgaccaagggagcatgaaacccagcagtatgaatactccctccctgtgcaccctccccctctccccagccagcctagcctcaagccacagcagcccggcttgaagccattcctccagtccgccgctgcaaccactaatcaggccacagcccttaaagaagctttacaacctccaattcatctcggccacttgcccctacaagagggtgagctgcctttggtgcaacagcaagtggccccatccgacaagcctcccaagcctgagttgcctggtgtggattttgctgacccacaagggccttctctcccgggcatggacttccccgatccacagggtcctagcctgcctggcctggacttcgccgatcctcagggctcaactattttccagatcgcacggttgatcagccatgggcccatgcctcagaacaagcagtcccccctttacccagggatgttatacgtcccctttggcgcaaatcagcttaacgctccagcccggctgggaatcatgtccagcgaagaagttgccggcggcagggaagacccgatggcctatggagccatgtttcccggatttgggggtatgcgccctggcttcgagggtatgccccataaccccgcaatgggtggagatttcaccttggaatttgatagccctgttgcagctactaagggacccgaaaacgaagaaggcggggcccagggtagccccatgcccgaggccaacccagataacctcgaaaaccccgcgtttctcaccgagttggaaccagcaccccacgccgggctgttggcactccccaaggacgatattcctggactcccccgcagcccgagcggtaaaatgaagggtttaccctctgtgacaccggccgccgccgatccccttatgacgcctgaactggccgatgtttacagaacctacgacgcagatatgactacgagtgttgatttccaggaggaggccactatggatactaccatggctcctaacagcctccaaacgtctatgccgggaaacaaagcacaggaacctgaaatgatgcatgacgcgtggcacttccaagaacca

SEQ ID NO: 5950 - DNA, 1341 bp, synthetic construct
  misc_feature 1..1341: note = source = /note="Description of Artificial Sequence: Synthetic coding sequence"
  source 1..1341: mol_type = other DNA
atgagcgcaagcaaaatacccctctttaagatgaaagacctcatcttgatcctttgcctcctggaaatgtccttcgcagtcccatttttcccacaacagagtgggactcccggaatggctagtttgtctcttgaaaccatgcgacaactgggttcactgcagagactcaacaccctgtcacagtatagtaggtatggtttcgggaaatcctttaacagcctctggatgcacggcctcctccccccgcacagctcactgccgtggatgagaccccgagagcatgaaacacagcagtacgagtacagcctgccagtgcacccgcctccactgcccagtcagccatccctgaaaccccagcaacctggtcttaagccgttcctgcagtcagccgccgcaacgaccaatcaggcgaccgccctgaaggaagctttgcagccaccaatccacctgggccacttgccccttcaggaaggtgaattgcctttggtgcaacagcaagtggctcctagcgataagcccccaaaacctgagttgcctggcgtcgatttcgctgacccccagggaccgtccttgccagggatggactttccagatcctcaaggaccttcactccctggacttgactttgcggaccctcagggctccacaatttttcagattgccagattgatttcacatgggcccatgccccagaataaacagagtcctctgtacccaggcatgctgtacgtaccgttcggcgcgaaccaattgaacgcacctgcccgcctgggaatcatgtcaagtgaagaagttgctggaggacgggaagacccaatggcctatggggcgatgtttccgggctttggcgggatgcggcccgggtttgaaggcatgccccataacccggcaatggggggcgactttacactggagtttgactctccggtcgccgccactaaagggcctgaaaatgaggaggggggtgcgcagggctctcccatgccagaagcgaatccggacaacctcgaaaatcccgcttttttgacagaattggagcccgcaccccatgctggactcctcgccctgcctaaggatgacatcccgggcctccctcgaagcccgtcaggcaagatgaagggactgccatctgtgacccccgcagcggccgatccgctcatgacccccgagttggccgatgtgtaccgcacttatgacgcggacatgaccacttctgtggatttccaagaggaggcgaccatggacaccaccatggcgccgaactcccttcagacttccatgcctggcaacaaagcccaagagccagaaatgatgcacgacgcctggcatttccaggaaccc

SEQ ID NO: 5951 - DNA, 1341 bp, synthetic construct
  misc_feature 1..1341: note = source = /note="Description of Artificial Sequence: Synthetic coding sequence"
  source 1..1341: mol_type = other DNA
atgtccgcttctaagataccgcttttcaagatgaaagaccttatccttattctttgtcttttggagatgtcgttcgcagttcccttttttcctcagcaaagcggaactccgggtatggcctctctctcgctggagacgatgagacagctcggatcactgcaacggctcaataccctgagccagtactccagatacggatttggtaagtcattcaattcgctttggatgcatggactcctcccacctcactcgagccttccgtggatgcgaccaagagaacatgaaacccagcaatacgaatattcacttcccgtccatcctccaccattgccttcgcaaccatcccttaagccccaacaaccggggcttaaaccgtttcttcaatcagcagcagcaactactaatcaagcaactgccctgaaggaggccctgcaacccccaatccatctcggacatctccctctgcaagaaggcgaacttcccctcgtgcagcagcaggtggcccccagcgacaagcctcctaagccagaactgcctggcgtggacttcgcagacccccaaggtccatcacttcccggaatggatttcccggatccccagggcccatcgctccccggattggactttgcagaccctcaggggagcaccatatttcagattgcacgcctgatatcgcatggacctatgccccagaacaaacagtcacccctttacccaggcatgctgtacgtgcctttcggcgcaaatcagctcaacgcgcccgcaagactcggaattatgtcctccgaggaagtggcaggcggtcgcgaggacccaatggcatacggtgctatgtttcccggttttggcggtatgcgccccggatttgaaggtatgcctcacaaccccgccatgggaggagatttcaccctggaattcgattcgcccgtcgcggctacgaagggtcctgaaaacgaggaagggggagctcaaggttcacccatgcctgaggcaaatcctgataacttggaaaatccagcgtttctgacggaacttgaacccgccccacatgccggcctgttggcactccccaaagacgatatacctgggctcccgcggtcacctagcggcaaaatgaagggcctcccctcggttacgcccgccgccgctgatcccctgatgactccggaactggcggatgtgtaccgtacgtacgatgcggatatgaccacctcggtcgattttcaagaagaagcaacgatggatactaccatggcacctaactccctgcaaacctccatgccaggaaacaaggcacaggagccagagatgatgcacgatgcctggcacttccaagaacct

SEQ ID NO: 5952 - DNA, 1341 bp, synthetic construct
  misc_feature 1..1341: note = source = /note="Description of Artificial Sequence: Synthetic coding sequence"
  source 1..1341: mol_type = other DNA
atgtccgccagcaaaatcccgctttttaagatgaaagatctgattctgatactttgcctgctggagatgagcttcgcagtaccattcttcccccaacagagcggcactcctggcatggcgtctctcagtctcgagaccatgaggcagctggggtcattacagcgcctgaataccctgagtcagtattccagatatggatttggcaagagcttcaatagtctctggatgcacggactgcttccaccacactcctctcttccatggatgcggccgcgggagcatgagacacaacagtatgaatattctttacctgtgcacccacctccacttcctagccaacctagcttgaagccacagcagcccgggctcaaaccattccttcagagcgcggcggccacaaccaatcaggccacagccctgaaggaggctctgcagccacccatacatttgggtcacctgccactccaagagggcgaactccctttggtccagcagcaagtggccccatctgacaagccaccgaaacctgaactgcccggcgttgactttgccgatccacaagggccctccctgcctggaatggactttccagatccgcaagggcccagtttgcccggcctggacttcgccgatccacaggggtccaccatattccaaatagccaggcttatcagtcacgggcctatgcctcagaacaagcagtcccccctgtacccaggcatgctctacgtgccattcggtgctaatcagctaaacgctccagccagactggggattatgtcctctgaagaagttgctggtgggagagaagaccctatggcctacggggccatgtttcccggctttggcggcatgcgtcctgggttcgagggcatgccacataaccctgctatgggcggcgattttaccctcgagttcgattcacctgttgccgccacgaagggcccagagaacgaggagggaggtgcccaagggtcccccatgcccgaggcaaacccggacaacctcgaaaatcccgcgttcctgaccgagctggagcccgcgcctcatgcaggcctgctggcattgcctaaggacgacatcccgggcctgcctcgctcgccatctggtaagatgaaggggctgccttccgttacccccgcagcagctgatccactgatgacacctgagctggcagacgtgtatcggacttacgacgccgacatgacaacctccgtggattttcaggaggaagccacaatggacaccacaatggctccgaattcccttcagacgtcgatgcctggcaacaaagcccaggaacccgagatgatgcatgacgcttggcattttcaggagcca

SEQ ID NO: 5953 - DNA, 1341 bp, synthetic construct
  misc_feature 1..1341: note = source = /note="Description of Artificial Sequence: Synthetic coding sequence"
  source 1..1341: mol_type = other DNA
atgtctgctagtaagattcccctgtttaagatgaaggatctgattttaatcctctgcctgctcgaaatgtccttcgctgtgcccttcttcccacagcaatccggcactccagggatggccagcctgtcactggaaacaatgagacaactaggcagcctccagagactgaacacactgagccaatacagcaggtacgggttcgggaagagcttcaacagcctgtggatgcacggcctgctacctcctcatagttctctcccatggatgcgtcccagagaacatgagacccagcagtatgaatatagcctgccagtgcaccctcccccactgccttctcagccaagtctgaagccacagcagccagggcttaagccatttctgcagagcgccgctgccactaccaaccaagccacagcactgaaagaggctctgcagccacccattcacctgggtcatctgccacttcaggagggagagctgccactggtgcagcaacaggttgccccatctgacaagccccctaaaccagagctgccaggcgtggacttcgcagatccacagggccctagtctgcccgggatggacttccccgatccacagggacctagtctgcctgggctggatttcgccgaccctcaggggtcaaccatatttcagattgcccgtctcattagccatggacctatgccacaaaataaacaatctcccttgtatccaggaatgctatacgttccatttggtgctaatcagctgaacgccccagctcggctagggattatgtccagcgaggaggttgctgggggacgggaagaccctatggcctatggcgctatgtttcctggctttggaggtatgagaccaggatttgaaggcatgcctcacaatccagcaatgggcggagatttcacactcgagttcgactctcctgtggccgctaccaaaggccctgagaatgaagagggcggtgcccaaggctctccaatgcctgaagccaatccagacaacctggaaaaccctgctttcttaactgagctagagcccgcccctcacgcaggcttattagctctgcctaaagacgacatacctgggctacctcgcagcccaagcggcaaaatgaaggggctgccttctgtgactccggctgctgctgaccctctgatgactcctgaactggcagacgtttaccggacctacgacgcagacatgaccacatctgtggacttccaggaagaagccactatggacacaacaatggcccccaattcactgcagacatccatgccaggcaataaagcccaagagccagaaatgatgcacgatgcctggcacttccaagagcct

SEQ ID NO: 5954 - DNA, 1341 bp, synthetic construct
  misc_feature 1..1341: note = source = /note="Description of Artificial Sequence: Synthetic coding sequence"
  source 1..1341: mol_type = other DNA
atgtccgcatccaaaatccctttgtttaagatgaaagatcttatccttatcttgtgtcttttggaaatgtcatttgcagtgccattctttcctcagcagtcgggtacgccaggtatggccagcctgtcgttggaaacgatgagacaactgggttccctgcaacgtttgaacaccctgagtcagtactcgaggtatgggtttgggaagtcgttcaatagcttgtggatgcatggtctgctgcccccacattcgtccctgccatggatgcggcccagagaacacgagactcaacaatacgagtacagcctgcccgtgcatcccccaccactgccatcccaaccaagcctgaaacctcagcagcctggcctcaagccctttcttcaatcggcagcggccactactaaccaagcaaccgctcttaaggaggcgctgcagccgccgattcatcttggacacttgcctttgcaggaaggtgaactgccccttgtccagcaacaggtcgcaccgtcagataagccccccaaacctgagctgccaggagtggacttcgcagacccccagggaccatcgctccctggtatggattttcctgaccctcaaggaccctctcttcctggactcgattttgccgatccgcaaggctcaactatattccaaattgctcgtctgatatcgcatggtccaatgccacagaacaaacaatctcctctttaccctggaatgctctacgtgccttttggtgcaaaccagctgaacgcgccagcacggctggggatcatgtcatcagaagaagtagcaggggggcgcgaagatcctatggcctatggggcaatgtttcctggctttggtgggatgcgcccggggttcgagggcatgccacataatccagccatggggggtgacttcaccttggagtttgactctcctgtggcggcaacgaagggccctgaaaatgaggaaggaggagcacagggttcaccaatgccggaagccaatccagataaccttgagaatccggcgttcttgacggagctcgaacccgcacctcacgcgggactccttgcacttcccaaggacgatattcccggactgccaaggtcgccatctggcaagatgaagggactcccttcggtgactccagccgcggcggatccacttatgacccccgagctcgcagacgtctacagaacctacgatgctgatatgaccacctcagtggactttcaagaagaagccactatggataccactatggctcccaactcccttcaaaccagcatgccagggaacaaggcacaggaacctgaaatgatgcatgacgcatggcacttccaagaacca

SEQ ID NO: 5955 - DNA, 618 bp, synthetic construct
  misc_feature 1..618: note = source = /note="Description of Artificial Sequence: Synthetic coding sequence"
  source 1..618: mol_type = other DNA
atgggaacgtggattcttttcgcatgcctggtaggcgcggcatttgccatgcctctgccgcctcatcctggacatccaggctatatcaacttttcctacgaaaattcacattcccaggcgattaatgtagacagaattgcactggttctgacgccattaaagtggtatcagtcaatgattaggccgccatattcgagctatgggtacgagccgatgggaggatggcttcatcaccaaattatacctgttgttagccaacaacatccattaactcatacacttcagtcgcatcatcacatccctgtagtcccggcccagcagccgcgggttagacaacaggcattaatgccggtacctgggcagcagagcatgacaccgactcaacatcatcaaccgaacctgcctctgccggcacaacagccgtttcagcctcagccggtgcagccacagccacatcagcccatgcagccgcagcctccagttcagcctatgcaaccacttctgcctcaaccgccgctcccgccaatgttcccgcttagaccgcttcctcctatccttcctgacttgcatctggaagcatggcccgccactgataagactaagcaggaagaagttgat

SEQ ID NO: 5956 - DNA, 618 bp, synthetic construct
  misc_feature 1..618: note = source = /note="Description of Artificial Sequence: Synthetic coding sequence"
  source 1..618: mol_type = other DNA
atgggtacctggattttattcgcctgccttgtgggcgcagcgttcgcaatgcccctgccaccccaccccggtcacccgggctacatcaatttttcctacgaaaattcccacagtcaggccatcaacgtggatcgcatagcgttggttctgacccccttgaagtggtaccagagtatgattcgtccaccctacagcagctatggttatgagccgatgggaggctggctgcaccaccaaataattcccgtggtgagtcagcagcatcccttgacacacactctgcagtcccatcatcatatacccgtggtgccggcgcagcaacccagggtccggcagcaggcacttatgcccgtacccggccaacagtctatgacgcccacacagcatcaccagccaaacctgccattgccagcgcagcagccctttcagccgcagccagttcagccccaaccccatcagccgatgcaaccccagccgccggtgcaaccaatgcaaccactcctacctcagccgccgctgccccctatgttcccacttcgcccactgccacccatcttgccagacctgcacctggaagcttggccggccacagacaagacgaagcaggaggaggttgat

SEQ ID NO: 5957 - DNA, 618 bp, synthetic construct
  misc_feature 1..618: note = source = /note="Description of Artificial Sequence: Synthetic coding sequence"
  source 1..618: mol_type = other DNA
atgggaacctggattctctttgcatgtctggtgggcgccgcctttgcgatgcctcttcccccgcaccctggccatccgggatacatcaacttctcctatgagaactctcactcccaggccattaacgtggacagaatcgctctcgtcctaactcccctgaagtggtatcagagcatgatacggccaccctactctagttatggctacgagcccatgggaggttggctgcaccatcagatcatccccgtggtgtctcaacaacacccactcacacacacccttcagagccatcaccacatacccgtggtgcctgcacagcaaccccgcgtgcggcagcaagccttaatgcccgtaccaggtcagcagagtatgacccctacccagcaccatcagcccaatctgcccctccccgcccaacaacccttccagcctcaaccagtgcagccacagcctcaccagcctatgcagccacagccccccgtccagcctatgcaaccgctactgccacagccaccactgcctccaatgttcccgcttaggcccctgccaccaatcctccccgacctccaccttgaagcatggccagcgactgataaaactaagcaggaagaggtggac

SEQ ID NO: 5958 - DNA, 618 bp, synthetic construct
  misc_feature 1..618: note = source = /note="Description of Artificial Sequence: Synthetic coding sequence"
  source 1..618: mol_type = other DNA
atgggtacatggatcttattcgcttgcctggtcggcgccgcattcgcaatgcccctgccgccacaccctgggcaccccggatacataaatttctcatatgagaatagccattcacaagcgattaacgtagacagaattgccttggtcctgacgccactgaagtggtatcagtctatgattagacctccgtatagttcgtatggttacgagccgatgggcggctggctgcatcaccagattatcccggtcgtgagccaacagcaccccctgactcacacattgcaaagccatcaccacatcccggttgtcccagcccaacagcccagagtgagacagcaagcattaatgcccgtgcccggacagcaatccatgacgcccacccagcaccatcaacctaatctacctctcccagctcagcagccatttcaacctcagccagtccaaccccagcctcatcaacctatgcaaccacagccccccgtgcagcctatgcagcctttactgccccagccacctctccccccaatgtttcctctcagacccctgccccccatactccctgatcttcacctggaggcttggcccgccactgacaaaacaaaacaagaggaggtggac

SEQ ID NO: 5959 - DNA, 618 bp, synthetic construct
  misc_feature 1..618: note = source = /note="Description of Artificial Sequence: Synthetic coding sequence"
  source 1..618: mol_type = other DNA
atgggtacttggattctctttgcctgtctggtgggcgcagcattcgccatgcctttgcctccacacccgggacatcctggatacataaacttttcatacgagaattcacactcgcaggcaattaacgtggacagaattgctcttgtcctgacccctctcaaatggtaccaatcgatgattagacctccttactcctcctatggatacgaaccgatgggtggttggctgcatcatcagattattccagtggtgtcgcaacagcatccactcacgcatacgctgcagtcgcatcaccatattcccgtcgtgccggcgcaacagccccgcgtgcgccagcaggctcttatgcctgtgcctggccaacaatccatgacgccaacccaacaccatcaaccgaatctccccctgcctgcgcaacaacccttccagccacaaccggtgcaaccacagcctcaccagcctatgcagccccagccacccgtgcaacccatgcaacccctgcttcctcaacctccattgccacccatgtttccactgaggccactcccaccgatcctcccagatctgcacttggaggcatggccagccacggataagaccaagcaggaagaagtcgac

SEQ ID NO: 5960 - DNA, 618 bp, synthetic construct
  misc_feature 1..618: note = source = /note="Description of Artificial Sequence: Synthetic coding sequence"
  source 1..618: mol_type = other DNA
atgggtacctggatactctttgcatgtctggtgggggcagccttcgctatgcctcttccaccccatccaggacatcctggttacatcaacttttcatacgaaaacagccactcacaggctatcaacgtcgataggattgcactggtgctgactccactcaagtggtaccagtccatgattagacccccatactcgtcctacggatacgaacctatggggggatggcttcatcatcagatcattcctgtcgtctcgcaacagcaccctctgactcatacccttcaatcacatcatcatattccagtggtgccagcccaacaacctcgagtgaggcaacaggcactcatgcctgtccccggacagcaatcaatgacgcctactcaacatcatcaaccaaatctgccgcttcccgcacaacaaccttttcaaccacagcctgtccagccacaaccccatcaacctatgcaacctcaaccccctgttcagcctatgcagcctcttctgccacagcctcctctgcctcctatgttcccacttcgtcctttgccacctattcttcctgatcttcacctcgaagcctggcctgcaaccgataagactaagcaagaagaggtcgac

SEQ ID NO: 5961 - DNA, 618 bp, synthetic construct
  misc_feature 1..618: note = source = /note="Description of Artificial Sequence: Synthetic coding sequence"
  source 1..618: mol_type = other DNA
atgggaacttggattctgttcgcatgtctggtgggggcagcatttgccatgccactgcctccccatcctggtcatccaggttacataaactttagctacgagaactctcattcccaagcgataaacgtggacagaatcgcactcgtccttacgcccctgaagtggtaccagtcgatgattcggccaccatactcgtcctacgggtacgaacctatgggcggatggctccaccatcagattatcccagtcgtgtcccaacaacatccacttactcataccctccaatcacaccaccatatccccgtcgttcccgcccaacagccgcgcgtgcgacagcaggcacttatgcctgtgcctggccaacagtcaatgactcccacccaacatcaccaaccaaacctgccgcttcctgcacagcaaccattccagccacagcctgtccaaccacaaccacatcagcctatgcaacctcaacctccagtccaaccgatgcagcctctgttgcctcagcctcctctgcctcccatgttccctcttcgacctcttcccccaattcttcctgatctgcatctggaggcctggcctgccaccgataagaccaaacaagaagaagtcgac

SEQ ID NO: 5962 - DNA, 618 bp, synthetic construct
  misc_feature 1..618: note = source = /note="Description of Artificial Sequence: Synthetic coding sequence"
  source 1..618: mol_type = other DNA
atgggtacatggatattatttgcttgcttagtgggcgcagcgtttgccatgcctctgcccccccatccagggcaccccgggtatatcaatttcagttatgagaattctcactctcaggctatcaatgtggacagaatcgccttagtcctaacgcctctgaagtggtaccaaagcatgatacggccgccctactcatcatatgggtacgagcccatgggagggtggctacaccaccagatcattcccgtcgtttcccagcagcaccctttgacgcacacgctccaatcccaccaccatattccagttgttccagcccagcaacctagggttcgccagcaggccctcatgccggtcccaggccagcagtctatgacaccaactcagcaccatcagccgaacctgcccctgccagcgcagcagcccttccaaccccagccggtgcagcctcaaccccatcagcctatgcaaccgcagccccccgtccaaccaatgcagcctctcttgcctcaacctcccctcccacctatgttccccctccgaccactgcctccgatactgcctgacttgcacttggaagcatggcctgccacggataagacgaaacaggaggaagttgac

SEQ ID NO: 5963 - DNA, 618 bp, synthetic construct
  misc_feature 1..618: note = source = /note="Description of Artificial Sequence: Synthetic coding sequence"
  source 1..618: mol_type = other DNA
atgggaacatggattttatttgcttgtttagttggtgctgcatttgctatgccattaccaccacatcctggtcatccaggatatataaattttagttatgagaattctcattctcaagcaattaatgttgatagaatcgctttagttctcactccattaaaatggtatcaatcaatgattcgtccaccatattcatcttatggatatgaacctatggggggatggttacatcatcaaattattcctgttgttagtcaacaacatccattaactcacacacttcaaagtcatcatcatataccagtagttccagctcaacaaccaagagtgaggcaacaagcattgatgccagttccaggacaacaatcaatgacaccaacacaacatcatcaaccaaatttaccattaccagcacaacaaccatttcaaccacaaccagttcaaccacaaccacatcaaccaatgcagccacaacctccagttcaaccaatgcaacctctcttaccacaaccaccattaccacctatgtttcctcttcgtccacttccaccaatattaccagatttacatcttgaagcatggccagcaacagataaaactaagcaagaagaagttgac

SEQ ID NO: 5964 - DNA, 618 bp, synthetic construct
  misc_feature 1..618: note = source = /note="Description of Artificial Sequence: Synthetic coding sequence"
  source 1..618: mol_type = other DNA
atgggtacctggatcctgttcgcatgcctggtcggtgccgcttttgccatgccactcccaccccacccaggccacccaggatatattaactttagctacgagaactcacacagtcaagctatcaatgtggacagaatcgcactggtgttgaccccccttaagtggtatcagtctatgatcaggcccccatacagctcctatggttacgaacctatgggtggctggctgcaccatcagatcatccctgtcgtttcccagcagcatcctctcacccacaccctccagagtcaccatcatatccccgttgttcccgcccagcaaccccgtgtccgtcaacaagccttgatgcccgtccccggacagcagtccatgaccccaacccagcatcatcagccaaacctccccctgcccgcacagcagccctttcagccacaacctgttcagccacagccccaccagcccatgcagccacaaccccccgtccagccaatgcaaccacttctcccccaacctccacttccacctatgttccccctgaggcccctcccaccaatccttcctgatttgcacctcgaggcttggcctgccactgacaagacaaagcaggaagaggtggat

SEQ ID NO: 5965 - DNA, 618 bp, synthetic construct
  misc_feature 1..618: note = source = /note="Description of Artificial Sequence: Synthetic coding sequence"
  source 1..618: mol_type = other DNA
atgggaacgtggattctgttcgcatgtttggtgggtgcagcatttgcaatgcctctgcctccacatcccgggcacccaggctacatcaacttctcttatgagaatagccattcccaggcgattaatgtagatcggattgcgctcgtgcttacccccctcaagtggtaccagtcgatgattcgccctccgtactcatcatacggctacgaacccatgggcggatggctccatcatcaaatcattccagtggtatcccaacaacatcctctgacccacactctgcaatcgcaccaccatatccctgttgtgcccgcccagcagccgagggtgagacagcaagcacttatgcccgtgcctggacaacaatccatgaccccgacccagcatcaccaacctaacctcccgctgcctgcgcagcaaccatttcaacctcaaccagtgcagccgcaacctcaccaacctatgcaaccacagcccccggtccagccaatgcagccccttctcccacagcctcctcttccaccaatgtttcctcttcgtcctctcccgccgatcttgccggacctgcaccttgaggcgtggcccgccactgacaaaactaagcaagaagaagtcgat

SEQ ID NO: 5966 - DNA, 618 bp, synthetic construct
  misc_feature 1..618: note = source = /note="Description of Artificial Sequence: Synthetic coding sequence"
  source 1..618: mol_type = other DNA
atgggaacttggatcttgtttgcctgcctggtgggagcggcgtttgcaatgccgctgcccccacaccctggacacccaggttacatcaacttcagctatgagaatagccatagtcaagctattaacgtggatagaatcgctctggtgctgacccccctgaagtggtaccaatcaatgatacgcccaccgtacagttcctatgggtacgaaccgatgggagggtggctccaccaccagataatccccgtggtgtcccaacagcacccactcacacataccctgcaatcacaccaccacatacccgtcgtccccgcccagcaaccccgggtgagacagcaggccctcatgccggtcccaggccagcagtccatgacacccacccagcaccatcagcccaatcttcctctgcccgcccagcagcccttccagccccagccagtgcagccccagccccaccagcccatgcagccccagccgcccgtacagccgatgcagccattattgccacaaccaccgctgccacctatgttccctttacgccccctgccaccaattctcccagacctgcacctcgaagcttggcccgcaaccgataagaccaaacaggaggaggtggat

SEQ ID NO: 5967 - DNA, 618 bp, synthetic construct
  misc_feature 1..618: note = source = /note="Description of Artificial Sequence: Synthetic coding sequence"
  source 1..618: mol_type = other DNA
atgggaacctggattctgttcgcctgccttgtgggcgcagcctttgctatgcctctgccccctcaccctggacaccctggctacatcaacttctcttatgaaaactcacactctcaagccatcaatgtcgaccgcatagctctggtgctaacacctctgaagtggtaccagtctatgatccggccaccctatagtagttatggctatgaaccaatgggcggctggctgcaccaccagatcatccctgttgtgagtcagcagcatcctttgactcatacactgcagagccatcatcacattcctgttgtgccagcccagcagccgagggtgcgtcagcaagccctgatgccagtgcctggtcagcagtctatgacccccacccaacatcaccagccaaatctacccctcccggcccagcagccctttcagccacagcctgtccagccacagccccatcagcctatgcagccccagccccctgtgcagcctatgcagcccctactgccccagcctcctttgccaccaatgttcccactgcggcctctgcctccaattctccctgacctgcacctggaagcatggccagctactgacaagaccaaacaggaagaggtggat

SEQ ID NO: 5968 - DNA, 618 bp, synthetic construct
  misc_feature 1..618: note = source = /note="Description of Artificial Sequence: Synthetic coding sequence"
  source 1..618: mol_type = other DNA
atgggaacctggattctgttcgcctgtttggtgggagcagcattcgcaatgccgttacccccacatcccggacaccccgggtatataaatttctcttatgagaattcccattcacaggccattaacgtggataggattgcactggtgctgaccccactgaaatggtatcaaagcatgatccggccaccttacagctcttatggatatgagcctatgggtggttggttgcaccaccaaatcattccagtggtctcgcaacaacatccactcacccatacccttcagagccaccaccatatccccgtggtaccggcccagcagcctagggtaaggcagcaagccctgatgccggtgccgggacagcagtctatgacacccacgcaacatcatcagcctaacttgcctctgccggctcagcagccgttccagcctcaacccgtgcagcctcagccgcaccaaccaatgcagccacagcctcccgtgcagcccatgcagccgctccttccgcaaccccccctgccccctatgtttcccctgaggccactgccacctattttgcccgatctgcacttagaagcctggccagcaaccgacaagactaagcaggaggaggtggac

SEQ ID NO: 5969 - DNA, 618 bp, synthetic construct
  misc_feature 1..618: note = source = /note="Description of Artificial Sequence: Synthetic coding sequence"
  source 1..618: mol_type = other DNA
atgggaacctggattctctttgcctgtttggtaggagctgcttttgcgatgccattgccccctcatcctggccaccccggatacatcaatttttcctacgagaacagccacagccaggcgatcaacgtggatcggatcgctcttgtgcttaccccactgaagtggtaccaatccatgatccgtccgccatattcaagctatggctatgagcctatgggcggttggttacatcaccagattatcccagtcgtgtctcaacagcacccactgacccacacactgcagagccatcaccatatccccgtcgtccccgctcaacagccaagagtcaggcagcaggctctgatgcctgtccccggccaacagtctatgacaccaacccagcatcatcagcccaatttgccgctgcccgcccaacagccatttcagccccagcctgttcaaccacagcctcaccaacccatgcagccacagcccccggtccaacccatgcagccactgctccctcagccacccttgccaccaatgtttccactgagaccactgccacctatcctccccgacttgcacctcgaggcttggcctgctaccgataagactaagcaggaggaggtggat

SEQ ID NO: 5970 - DNA, 618 bp, synthetic construct
  misc_feature 1..618: note = source = /note="Description of Artificial Sequence: Synthetic coding sequence"
  source 1..618: mol_type = other DNA
atgggcacctggatactgttcgcatgcctggtgggagctgcgtttgccatgcctttgccaccccacccgggacaccccgggtatattaacttctcctacgaaaacagtcattcccaggccatcaatgtggatcggatcgcgctagtgctcaccccactgaagtggtatcagagtatgatccgccccccttattcttcctacggttatgagccaatgggagggtggctgcatcaccagatcatacctgtcgtgagccagcagcatcctttaacacacaccctgcaatcacatcaccacatacccgtggtacccgcccaacagccccgcgtccgacaacaggctctcatgcccgtgcccggccagcaatctatgacaccaacacagcaccaccagccaaatctgcctctgccagcacagcagccattccagccccagccagtacaacctcaaccgcatcagcctatgcagcctcagcctccagtccagccgatgcagcccctgcttccccagccaccactcccacccatgtttcctttacgccctttgccccccatactgccagatttgcatctggaggcatggcctgctacagataagacgaagcaggaggaagtggac

SEQ ID NO: 5971 - DNA, 618 bp, synthetic construct
  misc_feature 1..618: note = source = /note="Description of Artificial Sequence: Synthetic coding sequence"
  source 1..618: mol_type = other DNA
atggggacctggattctgtttgcgtgcttagtgggagccgccttcgccatgcccctacccccacatccaggtcacccagggtatattaacttcagttacgagaattcacacagtcaagccattaacgttgaccggatcgctctcgtgctgactccccttaagtggtaccagagtatgatacggcccccgtatagttcctacggttacgagcccatgggaggctggttgcatcatcaaattatccccgttgtctcacaacaacatcctctgacccacacactccagtcacatcatcatataccggtggtaccagctcagcagccacgggtgaggcaacaggctctaatgccagtacctggacagcagtccatgactcccacacaacaccatcagccgaatttgcctctgccagctcagcaaccgtttcaaccccagcccgtacagccgcagccacaccagcctatgcagccccaaccgccagtgcagccaatgcaacccctactgccccaacccccgctgccacctatgtttcccctcagaccccttccccccattctgccagacctgcacctggaggcatggcctgcaacagataaaacgaagcaagaggaggtcgat

SEQ ID NO: 5972 - DNA, 618 bp, synthetic construct
  misc_feature 1..618: note = source = /note="Description of Artificial Sequence: Synthetic coding sequence"
  source 1..618: mol_type = other DNA
atgggaacgtggatcctgtttgcttgtctggtaggagcggcgttcgcaatgcctctgcccccacatcctggccatccggggtatattaatttttcttatgaaaatagccattctcaggccatcaacgtcgatagaatcgcactggtgctgacccccctgaagtggtaccagtctatgatccgcccaccttactccagttatggctacgagccaatgggtggctggctccaccaccagattatccccgttgtgtcacagcagcatcccctaactcacacccttcagtctcatcatcatattccggtagtaccagcacaacaacctagggtcagacagcaggctttaatgccggtaccggggcagcagtcaatgacgcctacacagcatcaccagccaaacctgccgttgcctgcccagcagccctttcaaccacagcccgtgcagcctcagccgcaccagccaatgcagccacagccacctgtccagcctatgcagccgctactcccccagccccccctgccccctatgtttcctcttcgtccactaccgccgatcctccccgacctccacctggaggcgtggcctgctacggacaagaccaaacaggaagaggtggat

SEQ ID NO: 5973 - DNA, 618 bp, synthetic construct
  misc_feature 1..618: note = source = /note="Description of Artificial Sequence: Synthetic coding sequence"
  source 1..618: mol_type = other DNA
atgggcacctggattctgttcgcctgcctggtgggcgcggcgttcgctatgcccctccctccacatcccgggcatcccggctacatcaacttcagctatgagaactctcatagccaggctatcaatgtcgacagaatcgccctagtcctaacaccgctgaaatggtaccagagcatgatccggcccccgtacagtagctacgggtatgagcccatggggggctggctgcaccaccagattatccccgttgtgagccagcaacatcctcttacacacacactgcagtctcaccatcatattcccgtcgtgcctgcccagcagccccgcgtgcggcagcaagctctgatgcccgtccctggacagcagagtatgaccccgacgcagcaccatcagcctaacttacccctgccggcacagcagccattccagccccagcccgtccaaccccagccccaccagcccatgcaacctcagcctcctgtccagcccatgcagccacttcttccccagcctcccttgccccccatgttccctttgaggccactgccccctatattgccagacctacatctggaagcctggccagccactgacaaaactaaacaggaggaagttgac

SEQ ID NO: 5974 - DNA, 618 bp, synthetic construct
  misc_feature 1..618: note = source = /note="Description of Artificial Sequence: Synthetic coding sequence"
  source 1..618: mol_type = other DNA
atgggtacttggatactcttcgcctgcctggtgggtgcagcgtttgctatgccactccctccgcacccagggcatcccggttatatcaacttctcgtacgaaaactcccacagccaggcaataaatgtggatcggatcgccctggtcctgacccctctgaagtggtaccagagtatgatcaggcccccttactcatcttatggatatgagcccatgggagggtggcttcaccatcagatcatccctgttgtcagtcagcaacaccccctgacccataccctgcaaagccaccaccacatccccgtggttcccgctcaacagcctcgagttaggcagcaggctcttatgcctgtccctggccagcagtctatgactcctacccagcaccaccagcccaacctccccctacctgctcagcaaccattccagccacaaccagtacaaccccagccgcatcaacccatgcagccccagcctcccgttcagcccatgcagccgttgctcccccaacctcctctgccacccatgtttccacttaggccacttccacccattctccctgatcttcacctggaagcttggccagcaacagataagaccaaacaggaagaagtggac

SEQ ID NO: 5975 - DNA, 618 bp, synthetic construct
  misc_feature 1..618: note = source = /note="Description of Artificial Sequence: Synthetic coding sequence"
  source 1..618: mol_type = other DNA
atgggaacatggattctgtttgcctgcctggtgggcgcggccttcgcaatgccactgccaccccatcctggtcacccggggtacatcaatttttcgtacgaaaattctcatagccaggccattaatgtagaccgaatcgccctggtgctcacacctttgaaatggtaccagagtatgatccggccgccctattcttcctacggttatgaaccaatgggaggttggctccaccaccagattataccagtggtcagtcagcaacaccccctgacacacactcttcagagccaccatcacattcctgtggtgcccgcgcagcagccaagggttcgacagcaggccttgatgcccgttccgggccagcaaagtatgaccccaacccaacaccatcagcccaacctacctctgcctgcacaacagccttttcaaccacaacccgtacagccacagccacatcagcccatgcagccacagcctcccgtccagcccatgcaaccgttgcttccgcagccccctctgcctcccatgttccctctgaggccactgccaccaattctccccgacctgcacctcgaagcgtggccagccaccgataagaccaaacaggaggaagtggac

SEQ ID NO: 5976 - DNA, 618 bp, synthetic construct
  misc_feature 1..618: note = source = /note="Description of Artificial Sequence: Synthetic coding sequence"
  source 1..618: mol_type = other DNA
atgggtacgtggatactatttgcgtgtttagtaggtgcggcgtttgcgatgccgctaccgccgcatccgggtcatccgggttatataaatttttcgtatgaaaattcgcattcgcaagcgataaatgttgatcgtatagcgctagttctaacgccgctaaaatggtatcaatcgatgatacgaccgccgtattcgtcgtatggttatgaaccgatgggtggttggctacatcatcaaataataccggtagtatcgcaacaacatccgctaacgcatacgttacaatcgcatcatcatataccggttgttccggcgcaacaaccgcgtgtacgacaacaagcgctaatgccggtaccgggtcaacaatcgatgacgccgacgcaacatcatcaaccgaatttaccgttaccggcgcaacaaccgtttcaaccgcaaccggtacaaccgcaaccgcatcaaccgatgcaaccgcaaccgccggtacaaccgatgcaaccgctattaccgcaaccgccgctaccgccgatgtttccgctacgtccgttaccgccgatattaccggatttacatttagaagcgtggccggcgacggataaaacgaaacaagaagaagttgat

SEQ ID NO: 5977 - DNA, 618 bp, synthetic construct
  misc_feature 1..618: note = source = /note="Description of Artificial Sequence: Synthetic coding sequence"
  source 1..618: mol_type = other DNA
atgggcacttggatcctcttcgcgtgtctcgtcggcgcagcgttcgccatgccccttcccccccatccaggccacccgggctacatcaatttctcgtatgagaactcgcattcccaggccatcaacgtcgaccgcatcgctctagtgctgacccccctcaagtggtaccagagcatgatccgccccccctactccagctatgggtacgaacccatgggcggttggctgcaccatcaaatcatacccgtagtgagccaacaacaccccctgacccatactctgcaatcccaccaccacatccccgtcgttccggcgcaacagccaagagtccgccagcaggctctgatgccggtccccgggcagcagtcgatgacaccgacgcagcaccaccagcctaatctgcctttgcccgcccagcagcccttccagccccagcccgtccagccccagccacaccagcccatgcagccccagccccctgttcagcctatgcaaccgctcctcccgcagcccccgctccctcctatgttccccctgcgtccgctgccgcccatcctgcccgatctccacttggaagcctggccggccaccgacaagacgaagcaagaggaggtcgat

SEQ ID NO: 5978 - DNA, 618 bp, synthetic construct
  misc_feature 1..618: note = source = /note="Description of Artificial Sequence: Synthetic coding sequence"
  source 1..618: mol_type = other DNA
atgggaacatggatcttattcgcttgtctggtgggggccgcttttgcaatgcctcttcccccacatcctggacacccaggctacattaacttttcttacgagaatagccacagccaggctatcaatgtggacaggatcgctcttgtgctcacccccctgaagtggtatcagagtatgatccgcccaccatattccagctatggctatgaacccatggggggctggctgcaccaccaaatcataccagtggtctcccagcagcacccattgacacacacactccagagccaccatcacatcccagtcgtccctgcacagcaacccagggtgaggcagcaggctcttatgccagttcccggccagcagtctatgactccaacccaacaccatcagccaaatctgccacttcccgcacaacagccttttcagccccaaccagtccagccccagccacaccaacctatgcaaccccagccccccgtgcaacctatgcagccacttcttcctcaaccacctctgcctcccatgtttccacttagaccactcccccccatcctgccagatttgcacttagaagcttggccagccacggataaaacaaagcaagaagaggtggat

SEQ ID NO: 5979 - DNA, 618 bp, synthetic construct
  misc_feature 1..618: note = source = /note="Description of Artificial Sequence: Synthetic coding sequence"
  source 1..618: mol_type = other DNA
atgggcacctggatattgtttgcctgcctggtgggggctgcattcgccatgccactgcctccacacccgggccatccaggatacatcaacttctcttatgaaaatagccattcacaagcaattaatgttgaccggatcgcgctggtgttgaccccattgaagtggtaccagtcaatgatcagacccccgtactcttcctatggctacgagccaatgggagggtggctgcaccaccagatcatccctgtggtctcacagcagcatcccctcacgcataccctgcagtcccaccaccacatcccagtcgtgcctgcgcagcaaccacgggtccggcagcaggccctcatgcccgtgccaggccagcagtctatgacgccgactcagcatcaccaaccaaacctccctctccccgcacagcagccattccagccacaaccggtccaaccccagccccaccagcccatgcagcctcagcctcccgtacagcctatgcagcccctcctgccacaaccaccactcccaccgatgtttccactgcgacctctgccccccatcctcccagacctccacctcgaggcttggcccgcgacagacaaaaccaagcaggaggaggtggat

SEQ ID NO: 5980 - DNA, 618 bp, synthetic construct
  misc_feature 1..618: note = source = /note="Description of Artificial Sequence: Synthetic coding sequence"
  source 1..618: mol_type = other DNA
atggggacctggattctgtttgcgtgcctggtgggagcagcctttgccatgccacttccaccacacccgggacacccaggatacattaacttttcctatgagaacagccactcacaagcaattaacgtggacaggatcgcactggtgcttactcctctgaagtggtaccaatccatgattaggccaccgtactcgtcgtatggatacgagcctatgggcggatggcttcatcatcaaatcatacctgtcgtgtcgcaacagcatccactgacccacacccttcagtcgcaccaccatatccctgtggtcccagctcaacaacctcgtgtgcgccagcaggccttgatgcctgtgcctggccagcaatccatgacgccaacccaacatcatcaaccaaaccttccgcttccggcacaacagccattccagcctcaaccagtgcaaccgcagcctcaccaaccaatgcagccgcagcctccggtgcagccaatgcaaccccttctcccccaacctcctctcccacctatgtttccacttagaccacttcctcccattttgcctgatctccatttggaagcctggcctgcgaccgataagaccaaacaagaagaagtggat

SEQ ID NO: 5981 - DNA, 618 bp, synthetic construct
  misc_feature 1..618: note = source = /note="Description of Artificial Sequence: Synthetic coding sequence"
  source 1..618: mol_type = other DNA
atgggaacctggatcctgtttgcgtgcctggtgggtgcagcctttgccatgcctctgccgccccatccaggtcatccagggtacattaacttttcctacgaaaactcgcactcccaagcaattaacgtcgataggatcgcactggtgctcactccactcaagtggtaccagtcaatgatccgtcctccttactcctcgtacgggtacgagcctatgggcggatggcttcaccatcagattattccagtggtgtcccagcaacatcctcttacccacactctgcagtcgcatcaccacattcccgtggtgcctgcccaacaaccgcgcgtgcggcaacaagcactgatgccagttccagggcaacaatcgatgacccctactcagcaccaccaaccaaacctgccactgcctgcccagcaacctttccagcctcaacctgtgcagccacagccacatcaacccatgcaaccccagccaccagtccaacctatgcaaccacttctgccacagcccccacttccacctatgttcccgcttcgtcccctgcctccaattctccccgatcttcatttggaggcatggccagcaacggataagaccaaacaggaagaagtggac

SEQ ID NO: 5982 - DNA, 618 bp, synthetic construct
  misc_feature 1..618: note = source = /note="Description of Artificial Sequence: Synthetic coding sequence"
  source 1..618: mol_type = other DNA
atgggaacctggatcctgtttgcctgtctggttggagccgcgtttgctatgcctcttcctccccacccgggccatcccggctatatcaatttcagctacgagaattcccatagtcaggcaatcaatgtggaccgaattgccctggtgcttactccactgaagtggtaccaatctatgatccggcccccctattcttcatacggatacgagcctatgggcgggtggctgcaccatcaaatcattccagtcgtcagccagcagcaccctttgactcacacactgcagagccaccaccacattcctgtggtgcctgctcaacagccccgagtgagacaacaggcgctcatgcctgtgccggggcagcagagcatgaccccgactcagcaccatcagcctaacttgcccttgcctgcccagcaaccattccagccacaacctgtgcagccacagcctcaccagcctatgcagccgcaaccacccgtgcagccgatgcagcccctgctgccacagccccccctcccccccatgtttcccctccgcccactgccgcccatactgcccgacttgcatctcgaagcttggcccgctacagacaaaaccaagcaagaggaggtggac

SEQ ID NO: 5983 - DNA, 618 bp, synthetic construct
  misc_feature 1..618: note = source = /note="Description of Artificial Sequence: Synthetic coding sequence"
  source 1..618: mol_type = other DNA
atgggcacctggatcctgtttgcgtgcctggtgggagcagcatttgcgatgcctctgccaccgcacccgggacaccctggatatatcaatttctcatacgagaacagccattcacaagcgatcaacgtggatcgcatcgcgctggtcctcactccgctcaagtggtaccaatcaatgattcggccaccatactcctcatacggatacgaaccaatgggcggctggctccatcatcagatcattcccgtggtgtcccagcaacatccgctgacccatactctccagagccaccaccatatcccagtggtccccgcccaacagcctcgggtccgccaacaggccctgatgccggtccccggacagcagtcgatgaccccgacgcagcaccaccaaccgaatctgccactgccggctcagcaacctttccagcctcaaccggtgcagccgcaaccgcaccaaccgatgcaaccccagccgcctgttcagccaatgcaaccgctcttgccacagccaccccttccgccgatgttcccactgaggccactccctccaattctgccggatctgcacctcgaggcatggccggccaccgacaagaccaaacaagaggaggtcgac

SEQ ID NO: 5984 - DNA, 618 bp, synthetic construct
  misc_feature 1..618: note = source = /note="Description of Artificial Sequence: Synthetic coding sequence"
  source 1..618: mol_type = other DNA
atgggtacgtggattctgttcgcatgcctggtgggggcggcgttcgctatgccgctgccgccgcaccctggccatccaggctacatcaatttcagctatgagaattcccacagccaggccattaatgtggatcgcatcgccctggtgctgacccctctgaagtggtaccagtctatgattcgtccgccatattcaagctacggttatgagcctatgggcggatggctgcaccaccagatcattccagtcgttagccagcaacatcctctgacccacacccttcagagccatcatcacatccctgtggtaccagctcagcaaccgcgcgttcgccagcaggcactgatgccggtcccgggccaacagagcatgactccaacgcagcatcatcagcctaacctcccattgccggcccaacagcccttccaaccacagccagtgcagccgcagcctcaccagccgatgcagcctcagcctccggtgcagccaatgcagcccctgttgccgcaacctccgcttccgccgatgttcccgcttaggccactgccgccaatactgccagatcttcacctggaggcatggcctgccacggataagaccaagcaggaggaagtggac

SEQ ID NO: 5985 - DNA, 618 bp, synthetic construct
  misc_feature 1..618: note = source = /note="Description of Artificial Sequence: Synthetic coding sequence"
  source 1..618: mol_type = other DNA
atgggaacctggattctttttgcatgtcttgtgggtgcagcatttgctatgcctctgccaccacaccctggccacccaggctacatcaacttcagctatgagaactcacactcacaggcaatcaacgtggataggatcgcgcttgtgctgacccctcttaaatggtaccaatcgatgattcgtccaccctacagctcgtacggttacgagcctatgggtggttggctgcatcatcagataattcccgtggtgtcccagcagcatccactcacccatacccttcaaagccatcaccatattcctgtcgttcctgcacagcagccacgggtccgacagcaggcgctgatgcccgtgccgggacaacaatcaatgacccctactcagcaccatcagccaaacctgccactgccagcacagcaaccatttcagcctcaacctgtccaaccacaacctcaccaaccaatgcagccacaaccccccgtgcagcctatgcaaccactcctgccacaacctcccctgccacctatgttcccacttaggcctttgccccctatactcccagatctccacctcgaggcatggccagccaccgataagactaagcaggaagaagtggat

SEQ ID NO: 5986 - DNA, 618 bp, synthetic construct
  misc_feature 1..618: note = source = /note="Description of Artificial Sequence: Synthetic coding sequence"
  source 1..618: mol_type = other DNA
atgggtacgtggatcctcttcgcctgtctcgtcggagcggccttcgcaatgccgttgccgccgcatccggggcacccaggatacattaacttctcctatgaaaattctcacagccaagctatcaacgtggatcggatcgctctggtcctgacccctctgaagtggtaccagagcatgatcagaccgccttactcgtcatacggctatgagccgatggggggctggctgcaccatcagataataccggttgtctcgcagcagcatccgctgactcataccctgcaaagccaccatcacatcccagtggttcctgcccagcagcctcgggtgcgccaacaggccctgatgccggtgcctggccaacaatcgatgactccgactcagcaccaccagccgaatctcccgctgccagcacaacagccgtttcagccacaacccgtgcagccgcagccacatcaacccatgcagccgcaacccccggtgcagccaatgcagccactgcttccccaaccacctctccctcccatgttcccgctgcggccgctgcctccgatcttgccggatcttcaccttgaagcgtggccggcgaccgacaagaccaagcaagaggaagtggac

SEQ ID NO: 5987 - DNA, 618 bp, synthetic construct
  misc_feature 1..618: note = source = /note="Description of Artificial Sequence: Synthetic coding sequence"
  source 1..618: mol_type = other DNA
atgggaacctggatcttgtttgcttgtctggtgggggccgcgtttgccatgcctctcccaccccaccctggccatccgggctacatcaacttctcgtacgaaaacagccactcccaggcgattaacgtcgacaggatcgccctcgtgcttaccccactgaagtggtaccagtcaatgattcgcccgccatactccagctatggatacgaaccaatgggagggtggctgcaccaccaaatcatcccggtggtgtcgcagcagcacccgctgactcacaccctgcagtcccaccaccacatcccggtcgtgccggcccaacaacctcgcgtccgccagcaggcgttgatgcctgtgccaggccaacagtcgatgacgcctactcagcatcatcagccaaaccttccgctgccggcgcagcagccattccagcctcagccggtgcaaccacagccacaccagccgatgcagccacaaccgcctgtgcaaccaatgcagccgctcctcccccaaccacctttgcccccaatgttccccttgcgtccgctcccgccgatcctcccagatctgcatctggaggcgtggcctgccaccgacaagactaagcaagaggaagtggat

SEQ ID NO: 5988 - DNA, 618 bp, synthetic construct
  misc_feature 1..618: note = source = /note="Description of Artificial Sequence: Synthetic coding sequence"
  source 1..618: mol_type = other DNA
atggggacgtggatcctcttcgcctgcctggtgggtgctgcctttgccatgccgctcccgccgcacccagggcatccaggctacatcaacttctcatacgaaaactcgcatagccaagcgatcaatgtggatagaatcgctctggtcctgaccccattgaagtggtaccagtcaatgatccggccgccgtacagttcatacggatatgagccaatgggaggatggctgcaccatcagattatcccagttgtgtcgcagcagcaccctctgacccacaccctgcaatcccatcatcacatacccgtggtgcctgcgcagcagccccgagtgcgtcagcaggcgctcatgccggtcccgggacagcaatccatgactcccactcaacaccatcagccgaacctccctctgcccgcccaacaacccttccagccacaaccagttcagcctcaaccacaccagcctatgcagccccaaccgccggtacaaccaatgcagccgcttctgccgcaacctccactgccccctatgttcccgctccgcccccttccgccaatcctgcctgacctccacttggaagcatggccagcaactgataaaaccaagcaagaggaagtggac

SEQ ID NO: 5989 - DNA, 618 bp, synthetic construct
  misc_feature 1..618: note = source = /note="Description of Artificial Sequence: Synthetic coding sequence"
  source 1..618: mol_type = other DNA
atgggcacttggatcctttttgcatgcctggtgggggcggcattcgctatgcctttgcccccgcatccagggcatcccggttacattaacttctcctacgaaaattctcactcacaggcgatcaacgtggaccggatcgccttggtgctcactccgctcaagtggtaccaatcaatgatcagaccaccttacagctcctacggatatgagccaatgggaggatggctgcaccatcagatcatcccagtcgtgtcgcagcagcatccgctcacgcatactctgcaaagccaccaccatattccagttgtgccagcccagcaaccgcgcgtgaggcagcaagcactgatgcctgtcccaggacaacagtcgatgacgccaactcagcatcatcaacctaatctgccgctgccggcccagcagcctttccagccccagccagtgcaaccgcaaccgcaccagcctatgcagccccagccgccggtgcagccgatgcagccactgttgccacaaccgccgctcccgccgatgtttccgctgaggcccctgccgccaattctgccggacttgcacttggaggcctggccggccaccgacaagactaagcaggaggaggtggat

SEQ ID NO: 5990 - DNA, 618 bp, synthetic construct
  misc_feature 1..618: note = source = /note="Description of Artificial Sequence: Synthetic coding sequence"
  source 1..618: mol_type = other DNA
atgggaacctggattctctttgcctgcctcgttggcgcggcattcgctatgcctctccctccccatccagggcaccctggatacattaatttctcgtatgagaattcccatagccaggcgataaatgttgatcggattgccctcgtccttacaccactaaagtggtatcagtccatgattcgaccgccatattcatcttatggctacgagcctatggggggctggcttcaccaccaaattattcctgtcgtctctcaacaacacccacttactcacacgttgcaatctcaccaccatatcccagttgtacctgcacagcagcctagagtccggcagcaagcacttatgccagtgccaggccagcagagcatgacccccactcagcatcaccaacctaatctgccccttccagctcaacaacccttccagccccaacccgtccagccccagccccatcagcccatgcagccccagccgccagtgcaacctatgcaacccttgcttccccaacccccactgccccctatgttcccactgaggccactgccacctattttacccgacctacatcttgaggcgtggcctgcaacagataagactaagcaggaggaagtcgat

SEQ ID NO: 5991 - DNA, 618 bp, synthetic construct
  misc_feature 1..618: note = source = /note="Description of Artificial Sequence: Synthetic coding sequence"
  source 1..618: mol_type = other DNA
atgggcacttggattctgttcgcctgcctcgtcggcgccgcgtttgcgatgccgctccctccgcacccggggcatccgggatacatcaacttctcgtacgaaaactcgcattcacaagcgatcaacgtggaccgcatcgccctggtgctcactcctctgaagtggtatcagtccatgattcgcccaccgtactccagctacggttacgagccaatgggaggatggctccatcaccagatcatccctgtggtgagccaacagcatccgctgacccataccctccagtcgcaccaccacatcccagtcgtgcctgctcagcagcctcgggtcaggcagcaggccttgatgccggtgccaggacaacagtcaatgacgccgacccagcatcaccaacctaatctccccctgcccgctcaacaaccattccagccgcagcctgtccagccccaaccgcaccagccgatgcaaccacaaccaccggtgcaaccaatgcagccactgcttccccagccgccgttgcccccaatgttcccgcttagaccgctgcctccgatcctgccggacctgcacctggaagcatggccagcaaccgataaaactaagcaggaagaggttgat

SEQ ID NO: 5992 - DNA, 618 bp, synthetic construct
  misc_feature 1..618: note = source = /note="Description of Artificial Sequence: Synthetic coding sequence"
  source 1..618: mol_type = other DNA
atgggaacttggatcctgtttgcctgtctcgtaggcgcagcatttgccatgccactcccaccacatcccggtcaccccggatacatcaacttctcgtacgaaaactcgcactcgcaggctattaacgtggaccgcattgcgcttgtgctcactcccttgaagtggtaccagtccatgatccgccctccctactcgagctacggatatgaacccatggggggatggctccatcatcagattataccggtggtgtcccagcaacacccgcttacccacactctgcaatcccatcaccacattcccgtggtccctgcacagcagcctagagtccgacaacaggccctgatgccagtgcctggtcagcaatctatgactcctacccaacatcatcaaccaaaccttcctcttccagcacaacaaccctttcagcctcagcctgtgcagccacagcctcatcagcctatgcaaccacagcctccagtccaaccgatgcagccacttctgccacaacctccattgccccctatgttccctcttagaccacttccgccgatccttccagatcttcatctcgaggcctggccggccaccgacaagaccaagcaagaagaggtggat

SEQ ID NO: 5993 - DNA, 618 bp, synthetic construct
  misc_feature 1..618: note = source = /note="Description of Artificial Sequence: Synthetic coding sequence"
  source 1..618: mol_type = other DNA
atggggacttggatccttttcgcttgtctcgtaggagccgcctttgctatgcccctgcctccacacccaggacatcctggatacataaatttttcttatgagaactcccattctcaggctatcaatgtagataggattgccctggtcttaacacccctgaaatggtatcagtctatgatcaggccaccttattcttcttatgggtacgaacccatgggggggtggctccatcatcagatcatacctgttgtatctcagcagcatcctttgactcatactctacagtctcatcaccacataccagtggtgcctgcccagcagccgcgagtacgccagcaggcactcatgccagtgccaggacagcaatctatgacacccacacagcaccaccagcccaacctgcccctcccagcccagcagcccttccagccccagccagtacaaccacagcctcaccagcccatgcagcctcagcctccagtgcagcctatgcagcctctccttccccagccacctctgccccccatgttccccctaagaccactgccccctatactacctgatcttcatttggaggcttggcccgcaactgataaaactaaacaggaagaagttgat

SEQ ID NO: 5994 - DNA, 618 bp, synthetic construct
  misc_feature 1..618: note = source = /note="Description of Artificial Sequence: Synthetic coding sequence"
  source 1..618: mol_type = other DNA
atgggaacctggatcctgttcgcctgcctggtcggcgccgcattcgcgatgcccttgccgccgcacccaggccacccgggatacatcaacttctcatacgaaaactcgcattcccaggctatcaatgtggatcgcattgccttggtgctgaccccccttaaatggtatcagtcgatgatcagaccgccatactccagttacggatacgagccaatgggtgggtggttgcaccaccagatcatccctgtggtttctcaacagcatccgttgacccacactctccaatcccaccatcatattccggtcgtgccggctcagcaaccacgcgtcaggcaacaggcactgatgcctgttccaggacagcagtcgatgacgccaactcagcaccatcaaccaaacttgccgctcccggcacagcaaccatttcagccgcagccggtgcaacctcaaccgcaccagccgatgcagccccaacctccggtccaaccaatgcaaccacttctgccgcagcccccgctccctccaatgttcccgctgcgtccgctcccgccaatactcccggacctgcatctggaagcctggcccgccaccgacaagaccaagcaggaagaagtggac

SEQ ID NO: 5995 - DNA, 618 bp, synthetic construct
  misc_feature 1..618: note = source = /note="Description of Artificial Sequence: Synthetic coding sequence"
  source 1..618: mol_type = other DNA
atggggacatggattctattcgcctgtctggtcggtgctgctttcgcaatgccactgcctccccatccaggacaccccggttatattaatttctcatacgagaatagccattcccaagctattaatgttgacaggatcgctctcgtgcttacgccactgaagtggtaccagtcgatgatacgccctccctacagcagctacgggtatgagcctatgggaggatggctgcaccatcagattatccccgtagttagccagcagcaccccctaactcacacgctccagtcacatcaccatattcccgtcgtgccagcacagcaacccagagttaggcaacaggcactgatgcctgttcccggccagcaatctatgacccctacacaacatcatcagccgaacctaccattaccagcccaacagccgttccagccccagccagtccagcctcaaccccatcagcctatgcagccccagccaccggtgcagccaatgcagccactgttacctcaaccaccactcccccctatgtttccactgaggccattgccacccatactcccagacctgcatctggaagcctggcctgccaccgacaagacgaagcaggaggaggtggac

SEQ ID NO: 5996 - DNA, 618 bp, synthetic construct
  misc_feature 1..618: note = source = /note="Description of Artificial Sequence: Synthetic coding sequence"
  source 1..618: mol_type = other DNA
atggggacttggatcctttttgcatgtctcgtgggtgccgcatttgcgatgcctctccctcctcaccctggccaccccggatacattaacttttcttatgagaactcacattcacaggcaattaacgtggacagaattgcactcgttcttacccctctgaagtggtaccaatcgatgattcgcccaccgtacagctcctacgggtacgagccgatgggaggttggttgcatcatcagattataccggtggtgtcgcaacaacacccgcttactcacacgcttcagtcgcatcatcatataccagtcgtcccagcacagcaacctcgtgtgcgtcaacaagctctgatgccggtgccaggacaacaatccatgaccccgactcaacaccatcagccaaatctgccgcttccggctcagcagccttttcaacctcaacccgtgcaaccacagccgcaccaaccaatgcaaccacaacctccagtgcaaccaatgcagccactgctgcctcagccccctctcccgcccatgtttcccctcagaccactgcctcccatccttcctgatcttcatctggaggcgtggccagcgactgacaagaccaaacaggaagaggtcgat

SEQ ID NO: 5997 - DNA, 618 bp, synthetic construct
  misc_feature 1..618: note = source = /note="Description of Artificial Sequence: Synthetic coding sequence"
  source 1..618: mol_type = other DNA
atgggaacctggattttgtttgcgtgcttggttggcgcggccttcgccatgcctctacctccacatcctgggcatccgggctacatcaatttttcgtatgaaaattcacactcacaggccatcaatgtggatcgcatcgccctggttctgacaccactgaagtggtatcagagcatgatccgcccgccctactcatcgtatggatacgagcccatgggaggatggctccaccatcagataattcccgtggtatcacagcagcacccacttacgcataccttgcaaagccatcatcacatacctgttgtgcccgctcaacagcctcgggtgcgccagcaggctctcatgcccgtgcccggtcagcagtcaatgacacccacccagcaccaccaacccaatctccccttgccagcccagcagccattccaacctcagccggtgcagcctcaaccccatcagcctatgcagcctcaaccccccgtccaaccaatgcaacccctgctgcctcagccaccgttacccccaatgttcccactgcgcccgcttcccccaattctcccggatctgcaccttgaagcctggccggcgaccgacaaaacaaagcaggaagaagtagat

SEQ ID NO: 5998 - DNA, 618 bp, synthetic construct
  misc_feature 1..618: note = source = /note="Description of Artificial Sequence: Synthetic coding sequence"
  source 1..618: mol_type = other DNA
atggggacatggatcttattcgcatgtctagtgggagctgccttcgcaatgcctttgccaccccacccaggacaccccgggtacatcaacttttcctatgaaaactcccattcccaggccattaatgtggatcgaatcgccctcgtgttgactcccctcaaatggtatcagtctatgatccggcctccatatagttcttatggatatgaacccatggggggatggctccatcatcaaatcattcccgtcgtgtctcaacagcatcccctgacacacacattgcagagtcaccatcacattcctgtggtccctgctcagcagcccagagtgagacagcaagccttaatgcccgtaccaggacagcagtctatgacacccactcagcatcaccagcctaacctgccattacctgcgcagcagccttttcaaccacaacctgtgcagccacagcctcatcagcccatgcagccacagcctcccgttcagccaatgcagccactcctcccacagcctcccctccctccaatgtttcccctacggccacttcctccaatattgcctgatcttcaccttgaggcctggcctgccacagataaaacaaaacaggaagaagtggat

SEQ ID NO: 5999 - DNA, 618 bp, synthetic construct
  misc_feature 1..618: note = source = /note="Description of Artificial Sequence: Synthetic coding sequence"
  source 1..618: mol_type = other DNA
atgggaacctggattctttttgcgtgtctggtgggagctgcttttgccatgccgctcccccctcatccaggacacccggggtacataaacttttcatacgaaaattcccactcccaagcaatcaacgtggacaggattgcactggtcctgacccctcttaagtggtaccagtcgatgatccgcccaccttactcatcgtatggatacgagccgatggggggatggctccatcaccagattatccccgtggtcagccagcaacatccgctgactcatactcttcagtcgcaccaccatattcccgtggtgcctgcacaacagccacgtgtgagacaacaggctctcatgcctgtgcccggacaacaaagcatgacccctactcagcatcatcaacctaacctgccacttccagcccagcagccttttcagcctcaaccagtgcagcctcaaccgcatcagccaatgcagcctcagcctcctgtgcaaccaatgcagccactccttcctcaaccacctctcccgccaatgttccctctgcgacctttgcctcccatcctgcctgacctccatctggaagcatggccagccaccgataaaaccaaacaagaggaagtggac

SEQ ID NO: 6000 - DNA, 618 bp, synthetic construct
  misc_feature 1..618: note = source = /note="Description of Artificial Sequence: Synthetic coding sequence"
  source 1..618: mol_type = other DNA
atgggcacttggatcctcttcgcatgtctggtgggagctgcgttcgccatgccactgccaccacacccaggccaccccggatacatcaactttagctacgaaaattcgcactcacaagccatcaatgtggacagaatcgctctcgtcttgactccgcttaagtggtatcaatctatgatccgcccaccctactcctcatacgggtacgaacccatggggggttggctgcaccatcagatcatcccggtcgtgagccaacagcatccccttactcacaccctgcagtcccaccatcacatccctgttgtgcctgcccagcagcccagagtgcgccaacaagcgttgatgccggtgccaggacagcagtccatgacccctactcagcaccaccaaccgaacctcccactgccggcgcagcagccttttcaaccacaacctgtgcagccacaaccgcatcagccaatgcagcctcagccgcccgtgcaacctatgcagccgctgctgccacagcctccgctcccgccgatgttcccgcttaggccactgccccctatccttccggatctgcacctggaagcgtggcccgcaactgacaaaactaaacaggaggaggtcgac

SEQ ID NO: 6001 - DNA, 618 bp, synthetic construct
  misc_feature 1..618: note = source = /note="Description of Artificial Sequence: Synthetic coding sequence"
  source 1..618: mol_type = other DNA
atgggaacctggatcttgttcgcatgcctcgttggagccgccttcgccatgccactgccaccgcacccgggccacccgggctacatcaatttcagctacgaaaacagccactcacaggccattaacgtggaccggatagccctggtgctgaccccactcaagtggtaccaatcgatgatccggccaccttactcttcctacggttacgagccgatgggagggtggctgcatcatcaaatcatcccagtggtatcacagcaacatccgctgactcatacgctccagagccaccaccacatcccggttgtcccagcccagcaaccccgcgttcgccagcaagcactgatgcctgtcccaggacagcagagcatgacgccgactcagcaccatcaaccgaacctgcccctgccggcgcaacagccgtttcagccacagcctgtccaacctcaaccacaccagcctatgcagcctcaacctcccgtgcagccgatgcaaccgctcctcccacaaccaccattgccgccaatgttcccccttagacctctgccgcctatcctgcctgatctgcacttggaggcctggcctgcgaccgacaagaccaaacaggaagaagtcgat

SEQ ID NO: 6002 - DNA, 618 bp, synthetic construct
  misc_feature 1..618: note = source = /note="Description of Artificial Sequence: Synthetic coding sequence"
  source 1..618: mol_type = other DNA
atgggaacctggattttgtttgcttgtctggtgggggccgctttcgcaatgccgctgcctccacatccaggacaccccggctatattaacttttcttacgaaaactcgcactctcaagccattaacgtggatagaatcgcacttgtcctaaccccccttaagtggtatcagtcaatgattcggccaccctatagtagttatgggtacgagcctatgggagggtggcttcatcaccaaataattcctgtagtgagccagcagcatcccctcacgcacacattacagtctcatcatcacatccccgtagtgccagcccaacaaccacgggtgcgtcagcaggccctcatgcctgtgcccgggcagcagagcatgaccccaacccagcaccaccagccgaacctccccctgccggctcagcaaccgttccagccgcagccagtgcagcctcagcctcatcaacccatgcagccccagcctccagtccaacccatgcagccactcttacctcagcctcccctaccaccaatgtttcccttgcgtccactgccaccgatccttcccgatttacacctcgaggcctggcccgcaaccgacaagaccaagcaggaggaggtcgac

SEQ ID NO: 6003 - DNA, 618 bp, synthetic construct
  misc_feature 1..618: note = source = /note="Description of Artificial Sequence: Synthetic coding sequence"
  source 1..618: mol_type = other DNA
atgggaacctggatcctctttgcgtgccttgtgggagccgcattcgccatgccgctgccgccccacccgggtcatccggggtacatcaacttctcatacgaaaactctcattcgcaggcgatcaatgtcgacaggattgcgctcgtgcttacccctctgaagtggtaccagtcaatgatccggccaccatacagctcctatggatacgagccgatggggggctggttgcatcaccagatcattccggtggtgtcacaacagcatccgctgactcacacgctccagtcccaccaccacatccccgtggtgccggcgcaacagcctcgcgtacggcaacaagccttgatgccagtgccaggtcagcagagcatgacgcctacccaacaccaccagccaaatctcccgctgcctgcccagcaacccttccaaccacagccagtacaaccgcagccacatcagcccatgcagcctcaaccaccagtgcaaccgatgcagccgctcctgcctcagcccccgctgcccccgatgtttcccctgcgcccccttccaccgatcctcccggatctgcatttggaagcctggccggcaacggacaagaccaaacaagaggaggtcgat

SEQ ID NO: 6004 - DNA, 618 bp, synthetic construct
  misc_feature 1..618: note = source = /note="Description of Artificial Sequence: Synthetic coding sequence"
  source 1..618: mol_type = other DNA
atgggcacttggatcctgttcgcctgcctggttggcgccgcgtttgctatgccgctcccgccgcatccagggcatccgggatacataaactttagctacgaaaattcacattcgcaggcaatcaatgtcgataggatcgctctggtgctgactccgcttaagtggtatcaatcaatgatcagaccgccctattccagctacggatacgagcctatgggagggtggcttcaccaccagatcattccggtcgtctcgcagcaacacccgctcacccacaccctgcagtcccaccatcacatcccagtggtgccagcacaacagcctcgtgtgcgccagcaggcccttatgccagtgcctggacagcaatcaatgacgcccacgcagcatcaccagccgaacctccctttgcctgcgcagcaaccatttcaaccgcagcccgtgcagccccagccccatcagccaatgcagccccaaccgcctgtccaaccgatgcagcctctgctgccgcagcccccgctgccaccaatgttccctctgcgaccgctccctcctattctgccagaccttcatcttgaagcgtggccggctactgataaaaccaagcaggaggaagtggac

SEQ ID NO: 6005 - DNA, 618 bp, synthetic construct
  misc_feature 1..618: note = source = /note="Description of Artificial Sequence: Synthetic coding sequence"
  source 1..618: mol_type = other DNA
atgggcacgtggatactcttcgcgtgtcttgttggagcagccttcgcaatgccccttcccccacatccggggcacccaggttacatcaacttttcctatgaaaatagccattctcaagccattaacgtggaccggatcgcacttgtgctcacccctttgaagtggtaccagtccatgatccgacccccttactcatcttacggatacgaacctatggggggatggctgcatcaccagattatcccggtagtctcacagcaacaccccttgactcacaccctgcagtcgcatcatcatattcctgtggtcccagcgcaacaaccacgcgtcagacagcaggctctgatgccagtgcctggtcagcaatcgatgaccccgacccaacatcatcaaccaaacctgcccctgccagcacagcagccgtttcaaccacaacccgtgcaaccgcagccgcatcagcctatgcaacctcagcctccggttcaaccgatgcagcccttgctgcctcaaccgcccctcccgccgatgtttccactgcggccactccctccaattcttccagatcttcaccttgaagcctggccagcaactgataaaaccaagcaagaggaggtcgac

SEQ ID NO: 6006 - DNA, 618 bp, synthetic construct
  misc_feature 1..618: note = source = /note="Description of Artificial Sequence: Synthetic coding sequence"
  source 1..618: mol_type = other DNA
atgggaacctggattctttttgcctgtcttgtgggagcagcatttgcaatgccattgcctccccacccaggacaccccggatacatcaacttctcctacgagaattcgcattcacaggccattaacgtcgatcgaattgcacttgtcctgacgcctcttaagtggtaccagtctatgatcagacccccatactcgtcgtacggttatgaacctatggggggctggttgcatcatcagataatcccagtcgtctcgcagcaacaccccctgactcacaccctgcaatcccaccatcatattcccgtcgtgcctgcgcaacaaccacgggtgagacagcaagccctgatgcctgtgcccggtcaacaatccatgactcccactcagcatcatcagccaaacctccctctgcctgcgcagcagccatttcaacctcaacccgtccaacctcagccacaccagccaatgcaaccacaaccgcctgtgcaaccgatgcaaccacttcttccccagcccccgcttccacctatgttccctttgcggccgcttcctccgatcctgccagacttgcatctggaagcatggcccgcaactgataagaccaagcaggaagaagtcgac

SEQ ID NO: 6007 - DNA, 618 bp, synthetic construct; identical to SEQ ID NO: 5990
  misc_feature 1..618: note = source = /note="Description of Artificial Sequence: Synthetic coding sequence"
  source 1..618: mol_type = other DNA

SEQ ID NO: 6008 - DNA, 618 bp, synthetic construct
  misc_feature 1..618: note = source = /note="Description of Artificial Sequence: Synthetic coding sequence"
  source 1..618: mol_type = other DNA
atggggacgtggatccttttcgcctgcctggtcggtgccgcattcgctatgccattgcctccccatcctggacacccaggatacattaacttttcgtacgagaattcccattcgcaagccatcaacgtggatcggatcgcgttggtgctgactccactgaagtggtaccagtcgatgattcgccccccgtacagctcatacggctatgaaccgatgggaggctggcttcaccatcagattataccagtggtgtctcagcagcacccgctgacgcacactctccagtcccatcaccatatcccggttgtcccagcccagcagccgcgggtgagacagcaagcactgatgccggtcccgggacaacagtccatgacccctacccaacaccaccaacccaacctgccactgcctgcccagcagcctttccagccacagccagtccagcctcagccacatcagccaatgcagcctcaaccacccgtgcagccgatgcaaccgctgctccctcaaccgccgttgccgcccatgttcccactgcgcccgctcccccctatcctgccagatctccacctcgaagcgtggcctgcgaccgacaagaccaaacaagaggaagtggac

SEQ ID NO: 6009 - DNA, 618 bp, synthetic construct
  misc_feature 1..618: note = source = /note="Description of Artificial Sequence: Synthetic coding sequence"
  source 1..618: mol_type = other DNA
atgggcacctggatactctttgcgtgtctcgttggagccgcctttgctatgccccttcccccacacccaggacaccccggctacatcaatttttcatacgagaactctcactctcaggccataaatgtcgaccgtatcgcactagtgctgacaccacttaaatggtatcagagtatgatacgcccaccgtacagcagctacggttatgagcccatgggcgggtggctgcaccatcagatcattcctgttgtatctcagcagcaccctctgacacacaccctgcagtctcatcaccatatcccggtcgtccccgctcagcagcccagggttagacagcaggctctgatgcctgtgcctgggcagcaaagcatgactccgacccagcaccaccagcccaatctaccattgcccgcacagcagcccttccagccccagcccgtccaaccccagcctcaccagccaatgcaaccccagccaccagttcagcccatgcagcctctgttgccccagccaccacttcctccaatgtttcccctgaggccgcttcctcctatactgcctgatcttcacttggaagcgtggccagctaccgataaaaccaaacaggaggaggttgac

SEQ ID NO: 6010 - DNA, 618 bp, synthetic construct
  misc_feature 1..618: note = source = /note="Description of Artificial Sequence: Synthetic coding sequence"
  source 1..618: mol_type = other DNA
atgggaacctggatcttgttcgcatgcctggttggagcggctttcgctatgcctctcccgccacatcctgggcatccaggctacattaacttctcctatgaaaattcccactcgcaagcaatcaatgtcgatagaatcgccctggtgctcaccccgctgaagtggtaccagtcaatgatccggcccccgtattcaagctacggatacgaacctatgggcggatggctccatcaccagatcattccggttgtctcgcaacaacatcccctgacgcacactctgcaatcccaccatcacatcccggtggtgccggcgcagcagccgcgcgtccggcaacaagcactcatgccggtcccgggccaacagagcatgacccctacccaacaccatcaaccaaaccttccattgcctgcccaacaacccttccagccgcagcctgtgcaaccacagccacatcagccgatgcagccccagccaccggtccaaccaatgcaaccacttctcccgcagccgccactgccgccgatgtttcctctgcggccactccctccgatcctgccggacctgcatctggaagcctggcccgccaccgacaagactaagcaggaggaagtagat

SEQ ID NO: 6011 - DNA, 618 bp, synthetic construct
  misc_feature 1..618: note = source = /note="Description of Artificial Sequence: Synthetic coding sequence"
  source 1..618: mol_type = other DNA
atggggacctggatcttgtttgcttgcctggtgggggcagcgttcgcgatgccactgcctccccacccgggacacccaggatacatcaacttcagctacgagaatagccattcacaggctatcaacgtggaccgcattgcactcgtgctcaccccgctgaagtggtaccagtcgatgattcggcctccttactcctcgtacgggtacgagcccatgggcggatggctgcaccaccaaatcatccctgtcgtgtcccaacagcacccacttactcacactctccagtcccatcatcacataccagttgtgccggcccagcagccccgggtgcggcagcaggcgctcatgccggtgccgggacaacagagcatgactccgacccagcatcaccagcctaaccttccactcccggcccaacagccattccagccccaaccggtgcagccacagccacatcaacctatgcagccgcagccgccagtgcagcctatgcaacccctcctgccgcaaccgccactgccgccaatgttcccgctgcgcccgctccccccgatcctgcctgatctccacttggaagcatggccggccacggacaagactaagcaggaggaagtcgat

SEQ ID NO: 6012 - DNA, 618 bp, synthetic construct
  misc_feature 1..618: note = source = /note="Description of Artificial Sequence: Synthetic coding sequence"
  source 1..618: mol_type = other DNA
atggggacctggatactttttgcatgtctcgtgggtgcagcgttcgcgatgccactgcctccccatcctggacaccctggttacatcaacttcagctatgaaaatagccattcccaagcaatcaacgtggatcgtattgcgttggtccttacccctcttaaatggtatcagtcgatgatcagacctccctactcctcgtacggttacgagcctatgggtggctggcttcatcatcagattattccggtcgtgtcacaacaacatccactgactcataccctccaatcacatcaccacatcccagttgtgcctgcacaacaacctcgcgtgaggcagcaagcactcatgcccgtgcccggccagcaatccatgactcctacccaacaccatcagccgaacctccctctccctgcccaacaaccatttcagcctcagccagtgcaacctcaaccgcaccagcctatgcaaccgcagccccctgttcaacctatgcaaccactgctgccgcaaccccccttgccaccaatgtttcctctgaggccgctgcccccaattctgcctgaccttcatcttgaagcatggcccgctactgacaagaccaagcaagaagaagtggat

SEQ ID NO: 6013 - DNA, 618 bp, synthetic construct
  misc_feature 1..618: note = source = /note="Description of Artificial Sequence: Synthetic coding sequence"
  source 1..618: mol_type = other DNA
atgggaacttggattttatttgcctgcctcgttggggctgcttttgcaatgccattgccgccacatcctggacatccaggttacattaatttctcttacgaaaactcccactcacaagctatcaatgttgatcgtatcgcacttgtacttacgccactgaagtggtaccagtcgatgatccgacctccatattcttcttatgggtatgagccaatgggaggctggttgcatcatcaaattatacctgtagtgagtcaacagcacccattgacccacacattacaaagtcaccaccacattccagtcgtccctgcgcaacagccccgcgtgagacagcaggcacttatgcccgttccaggccaacaaagcatgaccccgacacagcaccaccaaccaaacctgccacttccagctcagcaaccgtttcaaccacaaccagtgcaaccgcagccgcaccagccaatgcagccacaacctccagtgcaaccaatgcaaccgttgcttcctcagccgccgttgccaccgatgtttccattgcggcccttaccaccaattctaccggatttgcatttggaggcatggcctgcaacagacaaaaccaaacaagaggaggtagat

SEQ ID NO: 6014 - DNA, 618 bp, synthetic construct
  misc_feature 1..618: note = source = /note="Description of Artificial Sequence: Synthetic coding sequence"
  source 1..618: mol_type = other DNA
atgggaacgtggatccttttcgcttgtctcgtcggggcagccttcgcaatgcccctgcctccacacccgggccacccaggttacatcaacttctcatacgagaattcccatagccaagcaatcaacgtggacagaattgcccttgtcctgaccccactcaaatggtatcaatccatgatcaggcccccctatagctcctacgggtatgaaccaatggggggctggttgcatcaccaaattatccctgtggtcagccagcaacatccgttgacccacactctacagagtcaccaccatatccccgttgtgccggcccagcagcccagagtgcggcaacaggcgttgatgcccgtgcccggccaacaatccatgacgcccactcaacaccaccagccaaatttaccactcccagcacaacagcccttccagccccagccagtgcagcctcagccccatcaaccaatgcagccacagccaccggtccagcctatgcagcctctgctgccgcagccgccactgccacctatgttcccattgcggccccttccacccattcttccagacctccacctggaggcatggccagccacggacaaaaccaagcaggaggaggtggat

SEQ ID NO: 6015 - DNA, 618 bp, synthetic construct
  misc_feature 1..618: note = source = /note="Description of Artificial Sequence: Synthetic coding sequence"
  source 1..618: mol_type = other DNA
atggggacttggatcctgttcgcctgtctcgtgggagcagcattcgctatgccgctgccaccacatcccggacaccccggatacattaatttttcttacgagaacagtcattcccaggccatcaatgttgatcggatcgcactcgtgttgacacccctcaaatggtaccagtcgatgattcgcccaccctacagctcttacgggtatgagcccatggggggatggctgcaccatcaaattatcccagttgtctcacagcagcatcctctaactcacactttgcagtcgcaccaccatatccccgtcgtgccagcccagcaacctcgagtccgtcaacaggcacttatgcccgtcccaggacagcagtcaatgacccctacccaacaccaccagcccaatctgccgttgccagcccagcagcctttccaaccccagcccgtacagcctcaaccccaccagcctatgcagccccagcctcccgtccagcctatgcagcctctgctgcctcagcccccgttaccgcccatgttccctctacggccgctcccccctatcctgccagaccttcatctcgaagcttggcctgctactgacaaaaccaaacaggaagaggtcgac

SEQ ID NO: 6016 - DNA, 618 bp, synthetic construct
  misc_feature 1..618: note = source = /note="Description of Artificial Sequence: Synthetic coding sequence"
  source 1..618: mol_type = other DNA
atgggaacatggattcttttcgcgtgtctggttggtgcggcatttgctatgccgctcccacctcatccgggacaccctgggtatatcaacttctcgtatgagaattcacattctcaggcgatcaatgtcgaccgcattgcacttgttttgaccccattgaaatggtatcaatccatgatccgacctccttactcttcgtacggctatgaaccgatgggtggatggctgcatcatcaaattatccctgttgtgtctcaacagcacccactcacacataccttacaaagccatcatcacattcccgtagtgcccgctcagcaaccccgagtccgacagcaagctttgatgcccgttcctgggcaacagtcaatgacaccgacccaacatcatcagcctaacctccctttgccagcccaacagcccttccagccgcaaccggtgcagcctcagccgcaccagccaatgcaacctcaaccacccgttcagccgatgcagccgttactgccgcagcctcctttgcctccaatgtttccactacgtccattaccccctatactgcccgacctacacttggaggcgtggcccgcaaccgataaaacgaagcaggaggaagtcgac

SEQ ID NO: 6017 - DNA, 618 bp, synthetic construct
  misc_feature 1..618: note = source = /note="Description of Artificial Sequence: Synthetic coding sequence"
  source 1..618: mol_type = other DNA
atgggaacttggattttgttcgcttgcctggttggagccgcatttgctatgcccttgcccccacacccgggtcacccaggatacattaacttttcatatgagaacagccatagccaagccattaacgtggatcgaattgcactggtcctgactcctctcaagtggtaccagagcatgatcaggcctccatacagcagctatggatatgaaccaatggggggctggctccaccatcagatcattcctgttgtctctcagcagcatcctctgacccataccctgcagagccaccatcatattcctgttgtacccgcacagcaaccccgcgtgcgacagcaagccctgatgcccgtgcccgggcagcagtcaatgacgcccacccaacaccaccagcccaatctgcctctccccgcccagcagcccttccaaccacagcccgtgcagcctcagccacaccagcctatgcaaccgcagccccctgttcaacccatgcagcctctgctgccccagcctcccttaccccctatgttccccctacggcccctgccaccgattcttccggatctgcacttggaggcctggcctgcaacggataagacaaaacaggaagaagtagat

SEQ ID NO: 6018 - DNA, 618 bp, synthetic construct
  misc_feature 1..618: note = source = /note="Description of Artificial Sequence: Synthetic coding sequence"
  source 1..618: mol_type = other DNA
atgggaacctggatcctcttcgcctgcctggtgggtgccgcgtttgctatgcccctgccgcctcacccaggccacccaggctatatcaatttctcctacgaaaactcccactcacaagctatcaatgtggatcgcattgcactggttctgaccccgctgaagtggtaccagagcatgattcggccaccgtactcctcctacggttacgaacctatgggagggtggttgcatcatcaaatcatcccggtcgtgtcacaacagcatccactgacccatactctccagagccatcatcatatcccagtggtgccagctcagcagccgcgggtgcgtcaacaggcgctgatgccagtgccgggacaacagtccatgaccccgacgcagcaccaccagccgaacctgccactgccagcccagcaacccttccaaccccaacccgttcagccgcaaccgcaccagccgatgcagccgcagcctccggtgcagccgatgcaacctctgttgccgcaaccaccgctcccgcctatgtttccactccgaccactgccgccaatcctgccggacctgcacctggaggcctggcccgctactgataagaccaaacaggaagaggtggac

SEQ ID NO: 6019 - DNA, 618 bp, synthetic construct
  misc_feature 1..618: note = source = /note="Description of Artificial Sequence: Synthetic coding sequence"
  source 1..618: mol_type = other DNA
atgggaacatggattctcttcgcttgtctcgttggagctgcgttcgccatgcccctcccgccgcacccaggacaccccggctacatcaacttctcatatgaaaacagccatagtcaggcgatcaacgtggacagaatcgctttggtgttgacccccctcaagtggtaccagtccatgatccgccccccctactcatcttacggttacgagcccatgggtggctggctgcatcaccaaattatccccgtcgtgagccaacagcaccctctgactcataccttgcaatctcatcatcatatccccgtggtccctgcccagcagcccagggtgcgccaacaggcccttatgcctgttccaggtcagcagtctatgacccctacacaacaccatcaaccaaatctccccctgcccgcgcagcagcctttccagcctcagccggtgcagccccaaccccaccaacccatgcagcctcaacccccggtgcaacctatgcaaccactgctcccacagccgccgctccctccaatgttccctttgaggcccctgcccccaatcctcccagatctgcacctggaagcgtggcctgctactgataagaccaagcaggaggaagtggac

SEQ ID NO: 6020 - DNA, 618 bp, synthetic construct
  misc_feature 1..618: note = source = /note="Description of Artificial Sequence: Synthetic coding sequence"
  source 1..618: mol_type = other DNA
atggggacgtggatactgttcgcctgtctggtcggcgcagccttcgctatgcctctgcctccacatccgggacaccccggctacatcaatttttcttacgaaaattcccactcccaggcaattaatgtagacaggatcgccttggtgctgactcccctgaagtggtaccagtccatgatccgccctccttattcatcttacggctatgagcctatgggcggttggcttcaccaccagatcattccagtggtcagccagcaacacccactcactcatacccttcagagtcaccatcacatcccggtggtacccgctcagcagccccgggtccgtcaacaggccctgatgcctgtaccaggccagcaatctatgaccccaactcaacatcaccagcccaacttgcctctgccagcacagcagcctttccagccccagcccgtgcaaccccagcctcaccaacccatgcagccccagccacccgttcagccaatgcagcccctacttccacagccaccccttccacctatgtttcctttaagacctctgcctcccatccttcccgatctccatttggaggcctggccagcaactgataaaactaagcaggaggaggtggac

SEQ ID NO: 6021 - DNA, 618 bp, synthetic construct
  misc_feature 1..618: note = source = /note="Description of Artificial Sequence: Synthetic coding sequence"
  source 1..618: mol_type = other DNA
atgggcacctggatcttgttcgcctgcctggttggagcagcattcgccatgcctcttccaccgcatccgggccacccgggttacatcaactttagttacgaaaactcgcacagccaggcaatcaacgtcgatagaatcgccctggtgctcactcctctgaagtggtaccaaagcatgatccgcccaccatactcatcatacggctacgagccgatgggcgggtggctgcaccatcagattatcccggtcgtgagccagcagcacccactgacccacaccctgcaatcgcaccaccatatcccagtggtgccagcccagcagccacgggtccgccagcaggcgctgatgccggtgcccggccagcaatcaatgactccaactcagcaccatcaaccgaacctgccactcccagcccagcaacctttccaaccgcagcctgtgcagccccagccacatcaacccatgcaacctcaaccgcctgtgcaaccgatgcaaccactcctcccgcaaccgccgctcccaccgatgttccctctccgcccgttgccgcccatcctgccggatctgcacctggaagcgtggccggcaactgacaagactaaacaggaggaagtggac

SEQ ID NO: 6022 - DNA, 618 bp, synthetic construct
  misc_feature 1..618: note = source = /note="Description of Artificial Sequence: Synthetic coding sequence"
  source 1..618: mol_type = other DNA
atgggcacgtggattcttttcgcatgtctggtgggcgctgcgtttgcgatgcctctcccaccccaccctggacaccctggctacattaacttctcttacgaaaattctcactcacaagctattaatgtagaccgaatcgctttagtgctgacccctcttaaatggtaccagtcaatgatacgaccgccgtatagcagttatggttacgaaccaatgggcgggtggctccaccaccagattatcccagtggtgtcacagcagcatcccctgactcacaccctccagagtcatcaccacatccctgtggttcccgcccaacagcccagggtcagacagcaggctttaatgcccgtgccaggacaacagtccatgactccgacccagcatcatcagccaaatttgccactgcctgcccaacagcccttccagccgcaaccggtccagccacaaccgcatcaaccgatgcagcctcaaccaccggtgcagccgatgcaacctctgctgccacagccgccactcccacctatgtttcctctgagacctctccctcctatcctgccggatctgcacttggaagcttggccagccacggacaaaacaaagcaagaggaagttgac

SEQ ID NO: 6023 - DNA, 618 bp, synthetic construct
  misc_feature 1..618: note = source = /note="Description of Artificial Sequence: Synthetic coding sequence"
  source 1..618: mol_type = other DNA
atgggtacgtggattctgttcgcgtgtctggtgggagccgcctttgcgatgccccttcccccccatcctgggcatcccggatacattaatttctcttacgagaactcccattcacaggcgattaatgttgaccgaatcgctctggtgttgacgccactcaagtggtaccagagtatgatccgacctccatactcctcttacgggtacgagccaatgggcggctggctgcaccatcaaataatccccgttgtaagtcaacaacatccgctgactcataccctgcagtcacaccatcatattcccgtggtcccagcccagcagcctagggtgaggcagcaagccctgatgcccgtccccggacaacagtccatgactcctactcaacatcaccagccaaacctgccactgcctgcccagcaacccttccagccacaacccgtgcaaccacagccacatcagcccatgcagcctcagccccctgtacagcccatgcagcctctgcttccccagcctccgctgccccccatgtttcctctgcgtccactaccaccaatcttgcccgaccttcacctggaagcttggcctgccaccgataagacaaagcaggaggaagtggac

SEQ ID NO: 6024 - DNA, 618 bp, synthetic construct
  misc_feature 1..618: note = source = /note="Description of Artificial Sequence: Synthetic coding sequence"
  source 1..618: mol_type = other DNA
atgggaacatggatactattcgcctgtctggttggggccgcatttgctatgcccctgcctccgcatcctggtcatccaggatacattaatttcagctacgagaactcccattcacaggcgataaacgttgaccgaatagctctggttctgactccattaaagtggtaccagtccatgataagaccaccatactcgagctacgggtatgaacccatgggcggatggctgcaccaccagatcataccagtggtttcgcaacaacatcctctcacacatacgcttcagagccaccaccacattcctgttgtacccgcccagcaacctcgtgtccgtcagcaggcactcatgcctgttcccggccagcagagtatgacacctacacagcaccaccagccgaacctgccgctgccagcccagcagcccttccagccacaacctgtccaaccacagccccaccaacccatgcagccgcagcctccagtgcagccaatgcagccgttgctcccacaacctccactgccacccatgttccccctgcgtcctctgccaccaattctgcccgatttacatctggaggcatggcccgctactgataaaacgaagcaggaggaagttgat

SEQ ID NO: 6025 - DNA, 618 bp, synthetic construct
  misc_feature 1..618: note = source = /note="Description of Artificial Sequence: Synthetic coding sequence"
  source 1..618: mol_type = other DNA
atggggacctggattctgtttgcatgtctggtgggtgcggcatttgctatgcccctgccacctcaccctggacatcctggttacataaacttcagctacgaaaattctcattcccaggccattaatgtggacagaattgctctggtcttgacccctttgaagtggtaccaatccatgattcggcccccttactcctcgtacgggtatgagccaatgggaggttggctgcatcatcagattatccctgtagtctcccagcaacacccgctcactcacactcttcaaagccatcaccatatccctgtggtgcctgcgcaacaaccccgcgtccgacaacaagcacttatgcctgtgccaggccaacaatccatgacccccacccaacatcaccagcccaatctcccgctcccagcacaacaaccattccagcctcaaccggttcaaccccaaccccaccagcctatgcagccacagcctcccgtccaacccatgcagcctctccttccacaacctcccctgccgcctatgttccccctcaggcctctccctcccatcctgcccgatctccatcttgaggcatggcccgcaactgataagactaaacaagaagaagtggac

SEQ ID NO: 6026 - DNA, 618 bp, synthetic construct
  misc_feature 1..618: note = source = /note="Description of Artificial Sequence: Synthetic coding sequence"
  source 1..618: mol_type = other DNA
atgggcacatggatcctgtttgcgtgtttggtgggggctgcattcgccatgccccttccccctcaccctgggcacccaggctacataaatttttcctacgaaaattctcacagtcaagcgattaatgtagaccggatcgcactggtgcttacaccactgaaatggtatcaatcaatgatacgacccccatatagctcctatggctacgagccaatgggtggctggctgcatcatcagataatcccagtggtttctcagcagcatcctctcacccacacactgcaatctcaccaccacatcccagttgtgccggcacagcagcctcgggtgaggcaacaagcgttgatgcctgtgcctgggcagcagtcaatgacacccacacaacaccatcagcccaacctgccactccccgcacagcagcccttccaaccccagccagtgcaaccccagccacatcagccgatgcagccacagcccccagtgcagccaatgcaacccctccttccgcagcccccactgccaccaatgttccctcttcgtcctctcccacctatcctcccagatcttcatctggaggcttggccggccacagacaaaaccaagcaggaagaggtcgat

SEQ ID NO: 6027 - DNA, 618 bp, synthetic construct
  misc_feature 1..618: note = source = /note="Description of Artificial Sequence: Synthetic coding sequence"
  source 1..618: mol_type = other DNA
atgggcacgtggatcctgttcgcctgcctggttggagcagccttcgctatgcctctgccacctcatccaggacaccccggatacatcaatttcagttacgagaattcacacagccaggccattaatgtggatcggatcgctctggtccttactccacttaaatggtatcaatccatgattagaccaccctatagcagctatgggtacgaaccaatggggggatggttgcaccaccagatcatacccgttgttagccagcagcatccactgacgcatacactccagtcacaccatcacatccccgtggtgccagcacagcaacctcgcgtgaggcagcaggctcttatgcccgtgcccggtcagcaatccatgacacccacacaacatcaccagcctaacttgcccctccctgctcaacagcccttccagccacagccagtgcagccccagccacaccagcccatgcaaccacagcccccagtgcagcctatgcaacctctgctcccgcagcctccactccctcctatgtttccactgagaccactcccacctatcctgcccgacctgcacttggaggcctggcctgcgaccgataagactaaacaggaggaagtggat

SEQ ID NO: 6028 - DNA, 618 bp, synthetic construct
  misc_feature 1..618: note = source = /note="Description of Artificial Sequence: Synthetic coding sequence"
  source 1..618: mol_type = other DNA
atggggacctggatcttattcgcatgtttggtaggcgctgcttttgcaatgccgttgcccccccacccaggccaccctggctatattaatttctcttacgaaaattcacactcccaagcgataaacgtggacaggattgctctggtgcttaccccacttaagtggtaccagtcaatgatacgtcccccttattcttcctatggttacgagccgatgggcggttggctgcaccatcagatcatacccgtcgtgagccagcaacacccactgacacacacactgcagtcgcaccaccatatccccgtggtgcctgctcagcagccgagggttcggcagcaggccctcatgccagtgcccggacagcagtctatgacaccaactcagcaccaccagcctaatcttccccttccagcccagcagccgtttcagccccagccggtgcagccccagcctcaccagcccatgcagccccagccccccgttcagcccatgcagccactgttgccgcagcctccgctgccgcccatgtttccgttgaggccactgcccccaatactgccggacctccacctggaagcatggccggccaccgacaagaccaagcaggaggaggttgac

SEQ ID NO: 6029 - DNA, 618 bp, synthetic construct
  misc_feature 1..618: note = source = /note="Description of Artificial Sequence: Synthetic coding sequence"
  source 1..618: mol_type = other DNA
atggggacatggatactgttcgcatgtcttgtcggggcagccttcgccatgcccctcccccctcaccccgggcacccaggctacatcaacttcagctacgaaaattctcattctcaagcaattaacgtcgatcgaattgccctcgtcctgaccccgcttaagtggtaccagagtatgattcgcccaccctactcaagttacggctacgaacccatgggtggttggttgcatcaccagattatccccgtcgtgagccagcagcatcctctgacccacactcttcaatcacaccaccacattccggtggttcccgcccaacaaccacgggtgcgccagcaggccttaatgcccgtgcccggacaacaatctatgactccgacccagcaccaccagcccaatctccccctgcccgcccagcagccatttcagccccaaccggtgcagccccaaccacatcagcccatgcagccacagccgcccgtgcagcccatgcaaccactgctgccgcagcctcctctgcctcccatgttccctttgcgaccactccctcctatcttgcccgacctacacctggaggcctggcccgccaccgataaaacgaagcaggaggaggtggac

SEQ ID NO: 6030 - DNA, 618 bp, synthetic construct
  misc_feature 1..618: note = source = /note="Description of Artificial Sequence: Synthetic coding sequence"
  source 1..618: mol_type = other DNA
atgggaacctggatcctgttcgcatgtctggtgggtgcagcttttgcaatgccactgcccccacaccccggacatccgggatacattaacttctcgtacgaaaatagccatagccaggccataaacgttgataggatcgcactcgtgctcacccccctcaagtggtaccaatccatgatacgacccccttactcgagctacggatatgagccgatgggtggatggcttcatcatcaaatcattccagtcgtttcgcagcagcacccgcttactcatactctgcagtcccatcatcatattccagtggtcccagcacaacagcctcgcgtgagacaacaggccctcatgccagtccctggacagcaatccatgacccctacccaacaccatcaacctaacctcccgcttcctgctcagcagccatttcagcctcagccagtgcaaccacagcctcaccagccgatgcagccgcaaccaccagtgcaacctatgcaacctcttctcccacaacctccactcccgccaatgtttccactgcgtcctcttccacccatcctcccggacctccacctcgaagcatggcctgcaaccgataagaccaagcaagaggaagtggat

SEQ ID NO: 6031 - DNA, 618 bp, synthetic construct
  misc_feature 1..618: note = source = /note="Description of Artificial Sequence: Synthetic coding sequence"
  source 1..618: mol_type = other DNA
atgggaacctggatcctatttgcctgcttggtaggggccgcctttgctatgccattaccaccacaccccggccatcccggctatatcaattttagttacgagaattcccatagccaagcaatcaatgtggatcgaattgcccttgtgctgactcctctgaagtggtaccagagcatgatcaggcccccctactccagctacggctatgagccaatgggaggatggctgcaccaccagataattccagtcgtctcccagcagcatccactgacccacactctccagtcccaccaccacattccagtggtgcctgcacagcagccacgtgtgcgccagcaggccttaatgcctgtgccaggccagcagagcatgactccgacacagcatcatcaacccaatttaccactgcctgcacagcagccattccagccacagccagttcaaccacagccgcaccagcccatgcaacctcagccccctgttcaaccgatgcagccgctgttgccacaacctccgctgcccccaatgttcccgttaagaccattgcccccaattttgccagaccttcacctggaagcttggccagctactgataaaactaaacaggaggaggtagac

SEQ ID NO: 6032 - DNA, 618 bp, synthetic construct
  misc_feature 1..618: note = source = /note="Description of Artificial Sequence: Synthetic coding sequence"
  source 1..618: mol_type = other DNA
atgggaacatggattctgtttgcctgcttggttggcgcagcctttgcgatgcccctgccgcctcaccccggccaccccggatatataaatttctcatatgaaaattctcattctcaggccataaacgtcgataggatcgccctggtgctgacgccgctgaaatggtatcagtctatgatcaggcccccctattcctcttacgggtatgaacccatgggtgggtggttgcaccaccaaatcatccctgtcgtgtctcagcaacaccccttgacccatactctgcagtcccatcatcacattcccgtagtaccggcacagcagcccagggtgagacagcaggccctcatgcccgtccctgggcaacaatccatgactcccacccagcaccatcagcctaacctacctctgcctgcacagcagccatttcagccgcagcctgtccagccgcagccgcaccagccgatgcaacctcagcccccagtgcagccaatgcaacccctgttacctcaaccccctctgcctcctatgtttccgctgcgacccctgcctccaatcttgccagacctgcaccttgaggcctggcccgctaccgataagacgaagcaggaggaggttgat

SEQ ID NO: 6033 - DNA, 618 bp, synthetic construct
  misc_feature 1..618: note = source = /note="Description of Artificial Sequence: Synthetic coding sequence"
  source 1..618: mol_type = other DNA
atgggcacgtggatcctcttcgcatgtctggtgggcgccgcctttgcgatgccgctgcccccgcacccaggacacccaggatacatcaatttttcctacgaaaactcgcattcgcaggccatcaacgtggaccggattgcgctggtgctgactccgctgaagtggtaccagtcaatgattagaccaccctactcgagctacggctacgaaccgatggggggctggcttcaccatcagatcatcccggtggtgtcccaacagcacccgcttactcacaccctgcagagccaccatcacatcccagtcgtcccagcacagcaaccacgcgtgcggcagcaggcgctcatgccagtgcctggacagcaatcgatgacccctactcagcatcaccagcccaacctcccactgccagcgcagcaacctttccagcctcagccggtccagccacagccgcaccagccgatgcagccccagccaccggtccaaccaatgcaaccactgctgcctcagccgcctctgccgccgatgttcccgctgcgccccctccctcccatccttccggatctgcatctggaggcatggcccgctactgacaagacgaagcaggaagaagtcgat

SEQ ID NO: 6034 - DNA, 618 bp, synthetic construct
  misc_feature 1..618: note = source = /note="Description of Artificial Sequence: Synthetic coding sequence"
  source 1..618: mol_type = other DNA
atgggaacctggatcctgttcgcatgcctggtcggcgccgcgttcgctatgcctcttccgccacatccaggacatccagggtacatcaacttttcctacgaaaactcgcatagccaggccatcaacgtcgaccgcattgccctcgtccttactcccctcaagtggtatcagtcaatgatccgcccgccctacagctcgtacggatacgaacccatgggtgggtggcttcaccaccagattatccctgtggtgtcacaacagcaccccctcacgcacactctgcagagccaccaccacatcccggtcgtgccggcccagcagccacgcgtccggcagcaagcccttatgcctgtgccaggacagcagtcgatgacgcctacccagcaccatcagccgaacctgccactgcctgctcagcaaccattccagccgcagcccgtgcagccgcagcctcaccagccaatgcaaccgcagcctccagtgcagccgatgcagccgctgctgccgcaaccaccgctgccgcctatgtttccactgaggccgctgccacctatcctcccagacctccacttggaggcatggcctgctaccgacaagaccaagcaggaagaagtggat

SEQ ID NO: 6035 - DNA, 618 bp, synthetic construct
  misc_feature 1..618: note = source = /note="Description of Artificial Sequence: Synthetic coding sequence"
  source 1..618: mol_type = other DNA
atgggcacgtggatactgtttgcctgtctcgtgggcgccgcctttgctatgcctttgccgccacatcctggtcatcctggctacataaactttagctacgagaactctcattctcaggccataaacgtcgaccgcattgctttggtcctgaccccccttaagtggtatcagagcatgattcgaccaccttattccagctatggctatgagccaatgggagggtggctgcatcaccagataatccccgtggtttcccaacagcaccctttgacccacacactccagtcccaccatcacatccctgtggttccggcacagcagccccgggtgcgccagcaggccctgatgccagtcccgggccaacagtctatgacccctacccagcatcaccagcccaacctgccactgccagcgcagcagcctttccagcctcagcctgttcaaccacagccccatcaaccaatgcagccccagcctcccgtgcaaccaatgcagccactcctgccacagcccccgctgcctccaatgttcccactgagaccgctccctcctattctgcccgaccttcatcttgaggcttggccggctacggataagacaaagcaggaagaggtggac

SEQ ID NO: 6036 - DNA, 618 bp, synthetic construct
  misc_feature 1..618: note = source = /note="Description of Artificial Sequence: Synthetic coding sequence"
  source 1..618: mol_type = other DNA
atgggaacatggatcttatttgcctgtctcgtgggagccgccttcgccatgcctctgccacctcatcctgggcatcctggctacatcaacttctcctatgagaactcacactcccaggcgatcaacgtcgatagaattgctttggtgcttacacccttaaagtggtaccagagcatgattagacctccctattccagctacggctacgagcccatgggggggtggttacaccaccagatcataccagtcgtgagccaacagcatccccttacacacacactccagagtcaccatcacatccctgtggtgccggctcagcagccccgagtgcgacaacaggcccttatgcctgttcctggccagcagtcaatgacccccactcagcaccaccagccaaacttgccgctcccagcgcagcagccatttcagcctcagcctgtccaacctcagccgcaccagccgatgcagccgcagcctcccgtgcagccaatgcagcccctgctgcctcaaccgcctcttccccccatgtttcccctgaggcctcttccaccaatactcccagacctccaccttgaggcctggccggcgactgataaaacaaagcaggaggaagttgat

SEQ ID NO: 6037 - DNA, 618 bp, synthetic construct
  misc_feature 1..618: note = source = /note="Description of Artificial Sequence: Synthetic coding sequence"
  source 1..618: mol_type = other DNA
atgggaacctggattctcttcgcctgcctggttggagctgcatttgccatgccgttgcctccgcatccgggacatccaggatacatcaacttttcctacgagaactcacactcgcaagcaatcaatgtggacaggattgcactcgtcctgaccccgttgaagtggtaccaatccatgatcagacccccgtattcctcctacggatacgaaccaatgggaggctggctccatcatcaaatcattccagtcgtctcgcaacagcaccctctcacgcacaccctgcaatcacatcaccacataccagtcgtccctgcgcagcaaccgcgggtgcgccaacaggcacttatgccagtccctggtcaacagtcgatgactccaacccagcaccaccaaccgaatctcccacttccggcgcagcagcccttccagccacaaccggttcagccacaaccacatcagccgatgcagccacaacctccggtgcagcctatgcagccgctcctcccgcagccgccactgccaccgatgttcccgttgcgtcccctgccacccatcctgcctgacctgcatctggaagcctggccagccactgataagaccaagcaagaggaagtggac

SEQ ID NO: 6038 - DNA, 618 bp, synthetic construct
  misc_feature 1..618: note = source = /note="Description of Artificial Sequence: Synthetic coding sequence"
  source 1..618: mol_type = other DNA
atgggaacatggattttgttcgcttgtctcgttggcgctgcctttgcaatgccactccccccacatcctggacatcccggttacatcaattttagctacgaaaatagtcattcccaagcgattaacgttgataggattgctctcgttcttacacctctaaagtggtaccagtcaatgataaggcctccttactcttcatatggatatgaacctatgggaggttggcttcaccaccaaattatcccagttgtttcccagcaacaccccctcacacacaccttgcagagccatcaccatattcctgtggttcctgcccaacaaccgagagttagacagcaagctcttatgccagttcctgggcaacaaagcatgactccgacgcaacaccaccaaccaaacttaccattgcctgctcaacagcccttccaacctcagcctgttcaacctcaaccacaccaacctatgcagccccaacctcctgtgcagcctatgcaaccccttcttccacagccgcctctaccgccaatgtttcctctacgaccacttccaccgatcttgccagatttacatctagaggcgtggcctgccaccgataagacaaagcaagaagaggttgac

SEQ ID NO: 6039 - DNA, 618 bp, synthetic construct
  misc_feature 1..618: note = source = /note="Description of Artificial Sequence: Synthetic coding sequence"
  source 1..618: mol_type = other DNA
atggggacctggatactctttgcctgtttggtgggggcggcatttgcgatgccgcttccgccacacccgggccatcctgggtacattaacttttcatacgaaaacagccattcgcaagccataaacgtggataggattgcactggtccttactcctctgaaatggtatcagtctatgattaggcctccgtactcctcctacggatacgagccaatgggtggttggcttcaccaccagatcatccctgtggtttcgcagcaacacccactgacccatacgctccaatcgcatcatcatattcctgtcgtgcctgcacagcaacctcgagtgcgccagcaagctctgatgccagtgcctggccagcaatcaatgactcctacccaacatcaccaaccaaatctgcctcttccggcacaacagcctttccaaccacagcctgtgcagcctcagccccatcagcctatgcagccccaaccgccagtccaacccatgcagccactgctgcctcaaccaccacttccccctatgttcccactccgtccgcttcctcccattctcccggatctgcatcttgaagcgtggccagccaccgacaagactaagcaagaagaggtggac

SEQ ID NO: 6040 - DNA, 618 bp, synthetic construct
  misc_feature 1..618: note = source = /note="Description of Artificial Sequence: Synthetic coding sequence"
  source 1..618: mol_type = other DNA
atgggaacttggatactgtttgcatgccttgtgggtgcagcctttgcaatgcctcttcctcctcatccgggacatcctggttacatcaatttctcatacgaaaactcacattctcaagcaattaacgtcgatcgcatcgccttggtactcaccccattgaaatggtatcaatccatgatacggccgccgtactcctcctacggttacgagccgatggggggttggctgcatcatcagattatacctgtcgtgtcgcaacaacatcctctgacccacacgcttcagtcacatcaccacattcctgtggtcccggcccaacaaccccgagtccggcagcaagcactgatgcccgtgccagggcagcaatcaatgacgccaacccagcaccaccaacctaacctcccacttcccgctcaacaaccttttcagcctcagcccgtgcagccccagcctcatcagcccatgcagccacaaccgccagtgcaacctatgcagcctctccttccacagcccccacttcctccaatgttccccctgcgcccactgccccctattctgcctgatcttcatctcgaagcatggcccgcgaccgacaagaccaagcaagaagaggtggat

SEQ ID NO: 6041 - DNA, 618 bp, synthetic construct
  misc_feature 1..618: note = source = /note="Description of Artificial Sequence: Synthetic coding sequence"
  source 1..618: mol_type = other DNA
atggggacctggatactttttgcttgtctggtgggagccgcctttgctatgcctcttccaccacaccccggacatcccgggtacattaacttctcttatgagaactctcattcccaggctatcaatgtggatagaatcgcgctcgtcttgactcctctaaagtggtatcaaagtatgatccgacccccttacagcagctatggatatgagccaatgggcggatggttgcatcaccagatcatacccgtggtgagccagcaacatccgcttacccatactttacagtcacatcatcacatacccgtggttcccgcacagcagccccgtgttcggcagcaggccctgatgccagtgcccggccagcagagcatgaccccaacgcagcatcatcaacctaacctccccctgccggctcagcagccctttcagcctcagccagttcagcctcagccacaccaaccgatgcagccacagccacccgtacagcctatgcagccactgcttcctcagccgcccctccccccgatgtttccactaagaccactcccgcccattcttccggatttacatctggaggcctggcctgccaccgacaagacaaagcaggaagaggtggat

SEQ ID NO: 6042 - DNA, 4596 bp, synthetic construct
  misc_feature 1..4596: note = source = /note="Description of Artificial Sequence: Synthetic coding sequence"
  source 1..4596: mol_type = other DNA
atgggtcactccaagcagatccgcattttactattaaatgagatggagaagctcgagaaaacactgtttcggttggagcagggatacgagctacaatttaggctcggaccaactctccagggaaaagccgtgactgtctataccaactatcccttccctggcgaaacttttaatcgcgaaaaattccggagtctcgattgggagaatcccactgaaagggaagatgactcggataaatactgtaagctcaacctccagcagagtggcagttttcagtactatttcctgcaaggaaacgagaagtctggcggtggatatattgttgtagaccctatcctgagggtcggcgcggataaccacgtgctgccgctggactgcgtgaccctgcagaccttcctggcaaaatgcttgggtcccttcgatgagtgggagagtcgtctgagagtcgccaaggagtcagggtacaatatgattcattttactccccttcagacattgggtttatcaagaagctgttacagtctcgccaaccagctggagctgaacccagactttagtcgacccaatagaaaatatacatggaatgacgtggggcagctcgtcgagaaacttaaaaaggaatggaacgtaatttgtatcactgacgtggtgtacaatcacacagcagctaattctaagtggattcaagagcatccggagtgcgcatacaatttggtcaattctccacacttgaagcccgcatgggtgctagaccgcgccttgtggaggtttagctgcgatgtggcagagggaaaatataaagagaagggcatccccgcactaattgagaacgaccaccacatgaactcaatcagaaaaatcatttgggaagacatctttcccaagctcaagttatgggaattctttcaggtggatgtgaataaggccgtcgaacagtttcgaaggctgttaacacaggaaaacagaagggttacgaagagcgacccaaatcagcatctcactattatccaagatccagaatacaggcggttcggatgcaccgtggatatgaacattgccctcactacatttatcccccacgataagggcccggcggccattgaagaatgttgcaactggtttcacaaaaggatggaggaactcaattctgaaaaacacaggctgattaactaccaccaggaacaggctgtgaattgcctgctgggcaacgtattctacgagcggctcgccggccatggccctaagcttgggcctgtcactcggaaacatcctctggtaacccgttattttacattccctttcgaagagatcgattttagtatggaggagtcaatgattcatctgcccaacaaggcctgtttccttatggcccacaacgggtgggttatgggggatgacccactgaggaactttgccgaacccggctctgaagtgtacctgcggcgcgagctgatatgctggggcgacagcgtgaaactgagatatggcaacaagcctgaagactgcccttatctgtgggctcatatgaaaaagtacacagagatcacagcgacgtacttccagggggtgagactggacaactgccatagtacacccctccacgtcgctgaatacatgctcgacgccgctcgcaatctgcagcctaatttgtacgtcgtggcagagctgttcactggttccgaggacctggacaatgtatttgtcacacggttgggcatctctagtctgattagggaggccatgtctgcatataatagccacgaagagggacggttagtgtataggtacgggggggagccggtcggaagttttgtacagccctgtctgaggcccctgatgccagctatcgcacatgccctgtttatggacataacccatgacaatgagtgccctatagtccataggtctgcatacgatgcattacccagtactacaatcgtgtccatggcctgttgcgcttccggaagtacccgggggtacgatgagctggtgccccatcagatctcagtggtatctgaggagcggttttatacaaaatggaacccggaggcccttccaagtaacaccggggaagtgaatttccaatctgggatcatcgctgctcgctgtgccataagcaagcttcatcaggagctgggcgccaagggtttcatccaggtctacgtggaccaggtggacgaggatattgtggccgtcacacgccactccccatcaatccatcagtccgtggtggcagtctctcggacagccttccgtaaccccaagaccagtttttatagtaaggaagtgcctcagatgtgcattccaggaaagatagaagaagtcgtcctcgaggctagaactatagagcgcaatacgaagccctaccgaaaggacgagaatagcattaatggaactccagacatcaccgtcgagattagagagcatatccagctcaatgagagcaaaatcgtcaaacaggctggcgtggcaaccaaggggcctaacgaatatatccaagagatcgaattcgagaatttatcccccggctccgtcatcatctttagagtgtcactagacccccatgctcaggtcgcagtgggtattcttaggaaccacctgacccagttttccccacactttaaaagcggatccctcgccgtggacaacgcggatcccattcttaagattccgttcgcctctctggcttcacggttgacgctagcagaattgaatcagatactttaccggtgtgaaagcgaggagaaggaggacggcgggggatgttatgatattcctaactggtccgctctgaaatacgccggcctacaaggcttgatgtcagtgttagctgagatccgaccgaaaaacgaccttggccaccccttctgcaataatcttaggtccggtgattggatgatcgattatgtgagtaacagattgatttcccgttccggaaccatcgccgaagtcggcaagtggctgcaggccatgtttttttatctgaagcaaatccctaggtatctcataccttgctactttgacgccattctgattggagcctatacaacccttctagatactgcttggaagcagatgagctcctttgtgcagaacggatctacatttgtcaaacacctgagcttgggtagcgtgcaactttgcggcgttggtaagttcccgagtcttcccatactaagccctgccctgatggacgtgccgtataggctcaatgaaattacgaaagagaaggagcagtgttgcgtttccctggcggcaggactgcctcatttctccagtggtattttccgttgctgggggcgggacacattcatagctctgaggggcattctcctgatcactggtagatatgtggaggcccggaacatcattctagcctttgcgggtactttgcgccatggtcttattccaaacctgcttggggagggaatttatgcccggtacaattgccgagacgccgtttggtggtggctgcagtgcatccaggactactgcaagatggtacccaatggtctggatatcctcaaatgccccgtgagcagaatgtaccctacggacgactccgcccccctgccagcaggcacacttgaccaacctctcttcgaggttatccaggaagccatgcagaaacacatgcaggggattcagtttcgcgagcggaacgctggtcctcaaattgatcgcaacatgaaggacgagggtttcaatataaccgcgggggttgacgaggaaactgggttcgtttatggggggaaccgctttaactgtggtacttggatggacaagatgggtgagagcgacagagctcgaaaccgaggcattccagctacacctcgggatggcagcgccgtggaaatcgtgggcctgtctaagagtgccgtcaggtggctcctggagcttagtaaaaagaacatcttcccgtaccatgaagtcacagtgaaacggcacggtaaagctatcaaagtctcatatgacgaatggaataggaaaattcaggacaatttcgaaaagctattccacgtcagcgaggaccccagcgatctgaacgagaagcatccgaatcttgtgcataaaagggggatttataaggactcctatggtgctagcagcccttggtgtgactatcagcttaggcccaactttactattgcgatggtcgtcgcaccagagttgtttactactgagaaggcctggaaagcactggagatcgcggaaaaaaaactgcttggacccctcgggatgaaaaccctggacccggatgatatggtgtattgcggcatctatgacaacgccctggacaatgataactacaacttggcaaaaggatttaactatcatcagggcccggaatggttgtggcctatcggctatttccttcgcgccaaactctatttctctcggctcatggggccagaaaccacagcaaagacaattgtcttggtgaaaaatgtgctgtctcgacactatgtacacctagagaggagcccttggaagggactccccgaattgacaaatgagaacgcccagtattgtccctttagctgcgagacccaagcatggagcatcgcaacaatcctagagaccttgtacgatctg

SEQ ID NO: 6043 - DNA, 4596 bp, synthetic construct
  misc_feature 1..4596: note = source = /note="Description of Artificial Sequence: Synthetic coding sequence"
  source 1..4596: mol_type = other DNA
atgggacactccaagcagattcgtatcctgctgctgaatgaaatggaaaagctggagaaaaccctgttccggctggaacagggatacgaactccaatttaggctgggaccgactcttcaaggcaaagcggtgactgtctacaccaactatccgtttccgggtgaaacgttcaatcgggaaaagtttcggagcctggactgggaaaacccaacggaacgcgaggacgactccgataagtattgtaagctcaacctgcagcagagcggctcgttccagtactactttctccagggtaacgagaagtccggaggaggatacatcgtggtggacccgatcctccgcgtgggtgccgataatcacgtcctgccactcgactgtgtgactctccaaaccttcctcgccaaatgcctgggaccgttcgatgagtgggagagccggctgcgcgtcgccaaggagtcggggtacaacatgattcatttcactcctctgcagaccttggggctcagccggtcctgctactccctcgcaaaccagctggaactgaacccggatttttcccgcccaaacagaaaatacacgtggaacgatgtcggtcagctcgtggagaaactgaagaaggaatggaatgtgatctgcatcaccgacgtggtctacaatcacaccgcggcaaattcaaagtggatccaagaacacccggagtgcgcgtacaacctcgtcaactcacctcacctcaagccagcttgggtgctcgatcgggcactgtggaggttctcgtgtgatgtggcagaagggaagtataaggagaaagggattcctgcactgatcgaaaatgaccatcacatgaattcaatcaggaaaatcatctgggaggacatttttccaaagctgaagctgtgggaattctttcaggtcgatgtgaacaaggctgtggagcaattcaggcgactgcttacccaggaaaatcggcgggtcaccaagtcggatccaaaccaacacctgaccatcatccaggacccggagtaccggcgatttggttgcaccgttgacatgaatatcgcgcttactacttttatcccccatgataaggggcctgcggcgatcgaagaatgctgcaactggtttcataagcgcatggaggaactgaactcggaaaaacatcggctcatcaactaccatcaggagcaggcggtcaactgtctgctgggaaatgtgttttatgagcggttggccggacatggtccgaaacttggaccggtgactaggaagcaccctctggtgacccgctactttaccttccccttcgaggaaattgatttttccatggaagagagcatgatccacctccctaataaggcgtgttttctgatggcccacaacgggtgggtgatgggagacgaccctctgcgcaatttcgcagaacctggtagcgaggtctacctccggcgggagctgatctgttggggggattcggtgaaactccgctacggcaacaagccggaggactgcccgtacttgtgggcacatatgaagaaatacaccgaaataaccgcgacttactttcagggggtgaggctggacaactgccactccactcctttgcatgtggccgagtacatgctggacgcggcacgcaacctgcagccgaatctctacgtggtggccgaacttttcaccggttccgaagatctggacaatgtgttcgtgaccagactgggcatcagctcactcatccgggaggctatgagcgcctataactcgcacgaggagggaaggctggtctatcggtacggcggagagccagtgggatccttcgtgcaaccgtgccttcggccgctgatgccagcaatcgcccacgcactctttatggacatcacccatgataacgaatgcccaatcgtccatcgcagcgcatatgacgcactgccgtctactaccattgtctccatggcgtgttgtgcatctgggtcgactcgggggtacgacgaactcgtcccccaccaaatctccgtcgtgagcgaagagcggttttacaccaaatggaacccagaagcgctcccgtcgaataccggtgaggtgaacttccaatcaggcatcatcgccgctcgctgtgccatcagcaagctgcatcaggaactgggagcaaaaggattcatccaggtgtacgtggaccaggtggatgaggacattgtggctgtgactcgccattccccgagtattcaccaatccgtagtggcagtgtcgcgcactgccttccggaacccgaaaacctcattttactcaaaggaggtcccgcaaatgtgcatccctggaaagatcgaggaggtggttctggaagcccgaactatcgagcggaacaccaagccgtaccgtaaggatgaaaattcgattaacggcactccggacatcaccgtggagattcgggagcatatccaactcaatgaatcaaagatcgttaagcaagccggagtggcaactaaaggaccgaatgagtacatccaagagattgaattcgaaaacctgtccccgggttccgtgatcatctttagggtgtcactggacccacacgcccaagtggcggtcggaatcctgcggaaccatctgactcagttctcgccgcacttcaagtcaggatcactcgccgtggacaacgccgaccccattctgaagatcccgttcgcgagcctcgcctcacggttgactctcgccgaacttaaccagatcctgtaccgctgcgaatcggaggagaaggaggatggcggaggatgctacgacatccctaactggagcgccctgaaatacgctggtctgcagggactcatgagcgttctggctgaaatccgccccaagaacgacctgggacacccattctgtaataacctgcgttcgggagactggatgatcgattacgtgtccaatcggctgatctcccgctctggcaccattgctgaggtgggcaaatggctgcaggctatgttcttttaccttaagcagatcccgcgctatctgattccgtgttacttcgatgcgatcctgatcggagcttacactaccctgctggacactgcgtggaagcagatgtcatcgttcgtccagaacgggtccacttttgtgaagcacctctccctgggttccgttcagctttgcggagtcggcaagttcccgagcctgcctatactttcaccagccctgatggacgtaccttatcgcctgaacgaaatcactaaggagaaggaacaatgctgcgtgtcactggctgccgggctgccacatttcagctcgggaatcttccggtgttggggccgagacacctttatcgctctgcggggcatccttctcattactggtcggtacgtggaagcccgcaacatcatcctcgccttcgccggaaccctcagacatggcctgatcccaaacctcctcggtgaagggatctacgcacgctacaactgtcgggatgctgtctggtggtggctgcaatgcatccaagattactgcaagatggtgccgaatggactggatatcttgaagtgcccggtgtcccggatgtacccaacggatgactcagctccgctgcctgctggaaccctcgatcagccgttgttcgaagtgatccaggaagccatgcaaaagcacatgcagggaatccaattcagagagaggaacgccggcccacaaatcgaccgcaatatgaaggacgagggcttcaacattaccgctggagtagatgaggaaactgggttcgtctatggaggcaaccggtttaactgtggaacttggatggacaaaatgggggagtccgatagagcacgcaaccggggaatccctgctaccccgcgcgacggatcggcagtggaaatcgtgggactctccaagtccgcagttcgctggctgctggagctgtccaagaagaacattttcccttaccatgaagtgacggtgaagagacatggaaaggccattaaagtctcgtacgatgaatggaaccgcaaaattcaggacaatttcgaaaagctcttccacgtgtcagaagatccatccgaccttaatgagaagcatccgaacctggtgcacaaaagaggaatctacaaggactcctacggagccagctccccctggtgcgattaccagctgaggccgaatttcacgatcgcgatggtggtcgcccctgaacttttcacgaccgagaaggcctggaaggccctggaaattgcagagaagaagctgctcggaccccttggaatgaaaactctcgaccctgatgatatggtttactgcggtatctacgacaacgccctggacaacgacaactacaacctcgccaagggcttcaactaccaccaaggaccggagtggctttggccgatcggttacttcctgagagctaagctgtacttttcccggttgatgggacccgagactactgccaagacgatcgttctggtgaaaaacgtgctgtcaagacactatgtccatctggaaagatcaccgtggaaagggctgcccgagctgactaatgagaatgcccagtactgcccattctcgtgcgaaacccaggcttggtccatcgcgacgatcctggagacgctctacgacctg

SEQ ID NO: 6044 - DNA, 4596 bp, synthetic construct
  misc_feature 1..4596: note = source = /note="Description of Artificial Sequence: Synthetic coding sequence"
  source 1..4596: mol_type = other DNA
atgggccattccaaacagatacgtatcctgctactgaacgaaatggagaagcttgaaaagactctcttccgactggaacaaggctatgagctgcagttccgtctgggccctacgcttcagggcaaggcggtcacagtctatacgaactaccccttccccggagagacattcaatcgtgagaaatttcggagcctagattgggagaacccgacagaacgtgaagatgactctgacaaatactgcaagttgaatctgcagcagagtggctcatttcagtactatttcctgcaggggaatgaaaagagtggaggaggctacatcgtggttgacccaatcttacgcgtgggtgccgacaaccacgtactgcctctggactgcgtgactcttcagacatttttggccaaatgcctgggcccctttgatgagtgggaatccaggctgagagtggcaaaggaatctggttacaacatgatccattttacaccattgcagacactcgggttgagtcggtcttgttattcactcgcaaaccaactcgaactgaaccccgacttttcacgccctaacagaaaatacacctggaatgatgtgggacaactagttgagaagctgaagaaggagtggaatgtcatctgtataacagatgtggtgtataaccatacagccgctaacagcaagtggatccaggagcatcctgaatgtgcatacaacctcgtgaattcgccacatctgaagccagcctgggtccttgatcgcgccttgtggcggttctcttgtgatgttgccgaaggaaagtataaagaaaaaggaattcctgccctcatcgagaatgaccatcatatgaacagcattagaaaaataatttgggaagatatcttcccgaagctgaaattatgggaattcttccaggtggacgtcaacaaagccgtggaacaattcagacgattgttgacccaggaaaacaggcgcgtgacaaagtctgaccctaaccagcacctcaccattatccaggatcctgagtacaggcggttcggctgtaccgtagatatgaacattgcactgacaactttcatcccacacgacaagggccccgctgccattgaggagtgctgtaattggttccataagaggatggaagagctgaatagcgagaaacaccgtctcataaactaccaccaggagcaggcggtcaactgcctactcggcaacgtcttctatgagcggttggcggggcacggcccgaagctgggtcctgtgactcgaaaacacccgctggtgacaagatacttcaccttcccttttgaggagattgacttttcaatggaggaaagcatgattcacttgccaaataaagcctgcttccttatggcacataacggatgggtgatgggggatgacccgctacggaacttcgcggagcctggatcagaggtgtatctgcgaagggagctaatatgctggggtgacagtgtgaagctgaggtacggtaataagcccgaagactgtccctatctgtgggctcacatgaagaaatataccgagatcaccgccacttatttccaaggagtgcggctggataactgccactctacccctctacacgtcgcagagtacatgcttgacgcagctaggaacctccaaccaaatctgtacgtggtggccgagctgtttaccggatctgaagacctggataacgtgttcgttacacgcctgggcatttcaagtttgatccgggaagcgatgtcagcatataactcacatgaggagggacgccttgtgtaccggtacggcggtgagcctgttggaagctttgttcagccgtgtctcaggccattgatgcctgccatcgctcacgcactcttcatggatataacccacgacaacgaatgtcctatcgtgcaccgttcagcttacgatgcactgccaagtaccacaattgtctcgatggcttgttgcgccagcgggagtactagagggtacgacgaacttgtgccccatcagatttctgtggtgtctgaggaaaggttttacacaaagtggaatcccgaggccttgccaagtaacaccggcgaggtgaattttcaatctggcattattgccgcgcgttgtgcgatcagcaaattgcatcaagaactgggcgcgaagggtttcatccaggtttacgtcgaccaggttgatgaggatatcgtagctgttacccggcactctccctctatacaccagtcagtcgtggcggtatcaaggactgctttcagaaacccaaagacttctttctacagcaaagaagtgccccagatgtgtatccccggcaagattgaagaggtcgtgctcgaggccagaaccatagaaagaaataccaagccttatcgaaaggatgaaaattccatcaacggcacaccagacattacagtggaaattagagagcacatccagctgaacgagtccaagattgtgaagcaggcaggcgtcgctaccaaggggccgaacgagtacattcaagagatagagttcgagaacctttctcccggttctgttattatattccgtgtgtcgctagacccacacgcacaggtggccgtgggcatcctgcgtaaccacctgacacaattctccccccatttcaaaagtggctccctggcagtggataatgcagaccccatcctgaagattcctttcgcaagtctggcttctaggctcactctggcggagctaaatcagatactgtatcggtgtgaaagcgaggagaaagaggacggcggagggtgttacgacatcccgaattggtccgctttgaagtacgccggattgcaaggattgatgtccgtcttagccgagattcgacccaaaaacgacctgggccatcccttctgcaataatctgagatcgggagactggatgatcgattacgtctctaacaggttgatctcccggagcggtactattgcagaggtgggaaagtggctccaggccatgttcttttacctgaaacagattccccgctacctcatcccatgctacttcgatgctatattaatcggcgcctatacaaccctgttagatacagcctggaaacaaatgtcctccttcgtgcaaaacggatcgacattcgtcaaacacctgtctctggggtccgtgcaactgtgcggggtgggaaagttcccaagtctacccatactgtctcccgctttgatggacgtcccgtaccgcctcaacgaaattacgaaggagaaagagcagtgttgcgtgagcctggctgccgggctgcctcacttcagttccgggatctttcgctgctggggacgtgacacttttatcgcactgagggggatcctgttaatcaccggtaggtacgtagaagcccgcaatataattcttgctttcgcaggtaccctcaggcacggactgataccgaatttgctgggcgagggtatttatgcccggtataattgccgcgacgctgtgtggtggtggcttcaatgcatccaggattattgcaaaatggtgcccaacgggctggatatactcaagtgtccagtgagccgtatgtatcccacggatgactcagctccgttgcccgccgggaccctggatcagccgctcttcgaagtgatccaggaagctatgcaaaaacatatgcagggcatacagttcagagagcgcaatgccgggccgcagattgatcgaaacatgaaagacgaaggtttcaacattaccgctggagttgatgaagaaacaggcttcgtctatggcgggaaccggtttaactgtgggacttggatggataaaatgggcgaaagcgaccgcgcacgaaatagaggcatccccgccacaccacgcgatgggtcagccgtagaaatcgtcgggctgtcaaaaagcgctgtgagatggctgctggagcttagcaagaagaatatattcccataccacgaggtaaccgttaaaagacacggtaaggcaatcaaagtctcatatgacgagtggaatcgaaagatccaagacaatttcgaaaagctattccacgtgtccgaggatccttccgacctcaatgaaaaacacccgaacctcgtgcacaaaagggggatttataaagacagctacggagctagcagcccatggtgcgactatcagttaaggccaaacttcactattgctatggtagtggcaccagaactattcactacagagaaagcctggaaggcactggagattgccgagaagaagctactgggcccgctaggcatgaagacccttgatcccgatgatatggtgtattgtggcatctatgacaatgcattggacaacgacaactataacctggctaaaggattcaactatcatcagggccctgaatggctttggccaatcggctacttcctgagagccaaactctatttttcacgcttgatgggacctgaaacaaccgctaaaactatcgttctggtgaagaatgtgctgtctaggcattacgttcatcttgaaaggtcaccatggaaaggcctgcccgagctgactaatgaaaacgcccagtactgcccattctcctgcgagacacaggcgtggtcgatcgcgactattctggaaactctttacgatctg

SEQ ID NO: 6045 - DNA, 4596 bp, synthetic construct
  misc_feature 1..4596: note = source = /note="Description of Artificial Sequence: Synthetic coding sequence"
  source 1..4596: mol_type = other DNA
atgggacacagtaagcagattagaatcctgctgctcaatgaaatggaaaagctagagaagactctctttcggctcgaacagggttatgaattgcagttccgactgggacccacactgcagggtaaagcagttactgtatatacaaactatcctttccccggagaaacctttaatagagaaaagttcagatcactcgactgggagaaccctacagaacgtgaggatgactccgacaaatactgtaagttaaacctccagcagtctggcagtttccagtactactttctgcaggggaatgagaagagcgggggtgggtacatcgttgttgatcccattctgagggtgggagccgataaccatgtgctgcctcttgactgcgtaactttacaaaccttcctggcaaagtgtctgggcccatttgacgaatgggaatccagattgagagtggcaaaggaaagcgggtacaacatgattcacttcactccgttgcagaccctcggtctttccaggagctgctattccctggcaaaccagctggaacttaatcctgactttagtagaccgaataggaagtatacatggaatgacgtgggacagctcgttgagaagcttaaaaaggagtggaacgtcatatgcattacggatgtggtgtacaaccataccgctgccaactccaaatggatccaggagcatccggagtgtgcctacaatctggtgaattctcctcatctgaagcctgcatgggtgctggaccgcgctctttggcgcttcagctgcgacgtggctgaggggaaatataaagagaagggcatcccagcactgatcgaaaatgaccatcatatgaattcaattcgcaaaatcatctgggaggacatctttcccaagctgaagttgtgggaatttttccaggtagatgttaataaagcagtggaacagttccgccggttgttgactcaggaaaataggcgcgtgacgaagtccgaccccaaccaacacctgacaataatacaagatcccgagtaccggcgtttcggttgcacggttgatatgaacatagcactcaccacttttattccgcacgacaaggggcctgcagcaattgaggagtgctgtaactggtttcataaacgcatggaagaactgaactctgagaagcaccgtctcatcaactaccatcaggagcaggccgtgaattgtctgcttggcaatgtgttctatgagcgactggcgggacacggcccgaaactgggccccgtcactcggaagcatccactggtcacaagatatttcacatttccgtttgaggagatcgacttcagtatggaggagagcatgattcatctccccaacaaggcctgtttccttatggcgcataacgggtgggtgatgggagacgacccactgcgtaacttcgctgagccggggtccgaagtttacctcagacgagagcttatttgctggggggactccgttaagttgaggtatggcaacaaaccagaagactgtccctacctgtgggctcacatgaaaaaatatactgaaattacagcaacatattttcagggtgtccggctggataattgccactcaacacccctccacgtagccgagtacatgctggatgcagccagaaaccttcaacctaacttatacgtggttgccgagctctttacgggaagtgaggacctggataacgtgttcgtcactcgacttggcatctctagcttgattcgcgaggctatgtccgcctacaacagccatgaggagggccggctcgtgtaccggtacggcggagagcccgttggctcatttgtccagccctgtctcaggccactgatgcctgcaatagcccacgccctgttcatggatatcacccatgacaacgagtgcccaattgttcaccggagtgcctatgatgccctgcctagtacaacaattgtttccatggcatgttgtgcctcaggtagcactagagggtacgacgagctggtgccacaccagattagcgtggtatcggaggagaggttctacactaagtggaaccccgaggctctgccatctaacacgggagaagttaactttcagtccggaatcatcgccgcaaggtgtgccatatctaagctgcaccaggagctgggcgcaaagggcttcatccaagtgtatgttgatcaggttgacgaggacatcgtagccgtaactcggcactccccctcaattcaccagagtgtggtggcggtttctcgaacagccttccggaaccctaaaacctccttctacagcaaggaggtcccgcagatgtgtataccaggcaagattgaagaagttgtgctcgaggcccggaccattgagcgaaatacaaagccctatcgaaaggatgaaaacagtataaacggcaccccggatatcaccgtggagatccgtgagcacatccagctgaacgaatcaaagatcgtgaaacaggccggcgtggctactaaggggccgaacgaatatattcaggagattgaattcgagaacctgagtccgggctctgtgatcatctttcgggtctccctcgacccccacgcccaagtggctgtcggtatcctacgcaatcatcttacacagttctccccacactttaagtcaggatccctggccgtcgacaatgccgatcccattttgaaaattcctttcgcgtccttggcctcacggctgacactggcggagctgaatcagatcctgtaccgctgtgagagcgaggaaaaagaagatggcggaggatgctacgatatccctaattggagtgcactcaagtacgccgggcttcagggactgatgagcgtgctggccgaaatacgcccgaaaaatgatctaggtcatcccttctgcaataatttgcggtcgggtgattggatgatcgattacgtcagcaaccggctgatttctcggagcggaacaatcgccgaagtagggaaatggctgcaggctatgtttttctacctcaagcagatcccccgttatctgatcccttgctactttgacgccattctgatcggggcctacacaacactgctcgacacagcttggaaacagatgagcagtttcgttcagaacgggtcgactttcgttaagcatctctctctgggatcggtgcagctatgtggcgttggaaaatttccatcactacccatcctgagcccagctcttatggatgttccttatcgactgaatgaaataacaaaggagaaggagcagtgctgcgtcagtctagccgccggccttcctcacttcagcagcggtatctttcgatgctgggggagggacacgtttatcgccttaagggggatcctactgatcaccggaaggtacgtggaggctagaaacatcatactggccttcgcaggcaccctacggcacgggctgattcctaacctgctcggcgagggtatctatgctcggtacaactgcagagacgccgtctggtggtggcttcagtgcattcaggattattgtaaaatggtgcccaacggcctggacattttgaaatgccctgtatcaaggatgtacccaaccgacgactccgcccccttgccggcaggaacattagatcagcctttgtttgaggtgatacaggaggccatgcagaaacacatgcagggaattcagtttcgggaaaggaacgccggccctcagatcgatagaaatatgaaggatgagggcttcaacatcaccgccggtgttgatgaggagacagggttcgtttatggggggaataggtttaattgcgggacctggatggataaaatgggcgagagcgaccgcgcaaggaatcgcggaatacctgcgacacctagggacggtagtgcggtcgagatcgtcggcctgtcaaaaagcgccgtcaggtggctgctggaactcagcaaaaagaatatatttccttaccatgaagtaacggtgaaacgccacgggaaggcaattaaggtgtcctacgatgagtggaacaggaagattcaggacaacttcgaaaaactgttccatgtatctgaggatccaagcgatctcaacgagaagcatcctaaccttgtccacaagaggggcatttacaaggatagctatggcgcctctagtccctggtgcgattaccagcttagacccaacttcacaatcgcaatggtggtggcaccggaacttttcaccaccgagaaggcgtggaaggccctcgagatcgccgagaaaaagctcttaggtcctctgggcatgaagactctggacccagatgacatggtgtactgcgggatttacgataacgcactggacaacgacaattacaacttagccaagggattcaactatcatcagggccccgaatggttgtggcccataggctatttcctcagggccaagctctacttcagcagactgatgggaccagaaacaaccgctaagactatcgtgctagtcaagaatgttctgagtcggcactatgtgcatctggagcgatctccgtggaaagggcttcctgagctgactaacgagaatgcacaatactgcccattttcatgtgaaacacaggcctggtcaatcgcaactattctggagaccctctatgatctg

SEQ ID NO: 6046 - DNA, 4596 bp, synthetic construct
  misc_feature 1..4596: note = source = /note="Description of Artificial Sequence: Synthetic coding sequence"
  source 1..4596: mol_type = other DNA
atgggccattccaagcaaattcgcatcctcctgttgaatgagatggaaaaactggagaagaccctgtttcgcttggagcagggttatgaactgcagttcagattagggcccactttacagggaaaagcggtcactgtatacacgaactacccttttccaggggagacttttaaccgggagaaattcagatcccttgattgggagaaccccacagaaagagaggacgactcagataagtattgcaaactgaacttacaacagtcgggatcattccagtattacttcctgcaaggaaacgagaagtcggggggaggctacatagtcgtagatcccatccttcgtgtaggggctgataaccatgtgttgccgttggattgtgtgactcttcagacattcttagccaaatgtctaggcccctttgatgaatgggagagcagacttagagttgcgaaagagtctgggtacaacatgatacattttacacctcttcagaccctgggcttaagtagatcctgctactctctggcgaaccagcttgagctgaaccctgacttcagccggccaaataggaagtatacgtggaacgacgttggccagcttgtggaaaaactgaagaaagaatggaatgtgatatgtataaccgacgtggtgtacaaccacaccgcagcaaactccaagtggattcaggagcaccctgagtgcgcttacaatttagtcaactccccccacttgaaaccggcctgggtcttagacagagctctgtggagattcagttgcgatgtagccgagggcaagtataaggagaaaggcatccccgcccttatcgagaacgaccaccacatgaattctattcggaagatcatatgggaagacatattccccaaactcaagctgtgggagttcttccaggtcgacgtaaacaaggctgtcgaacagttcaggcggcttctaacccaggaaaatagaagagtgacgaaatctgacccaaatcagcatttaacgattatacaagaccccgagtatcggcgctttggctgcaccgtggacatgaatatagctttgactacattcatcccccatgacaagggccccgcagccatagaggaatgctgcaactggttccacaagcgaatggaagaattgaatagcgaaaagcatagactgatcaactaccatcaagagcaggccgtgaactgtctactaggcaatgttttctacgagcggctcgctggacatggccccaaactcggtcctgtcacacgtaagcaccccctggtaacgcgttacttcactttccccttcgaagaaatagacttcagcatggaagaatctatgattcatctgcccaacaaggcctgtttcttgatggctcataatgggtgggtgatgggagacgaccctttgcgtaacttcgccgagcctgggtccgaagtgtaccttcgtagggaactcatttgctggggtgattcagtaaagttgagatacggaaacaagcctgaagactgcccgtatctgtgggcccacatgaagaagtacacggagatcaccgcaacatatttccagggcgtccgtctcgacaattgtcattccacccctctgcacgtggcagaatacatgttagacgcagccaggaacctccagcctaacctgtacgtcgtcgctgagctctttactggtagtgaagatttggataatgtgtttgttactagattgggcatcagctccctgattcgagaggccatgagtgcctataactcacacgaggagggaagactggtgtatagatacggtggcgaacccgtgggttcattcgtgcagccatgcctcagaccacttatgccagcaatcgcccatgcgctgttcatggatatcactcacgacaatgaatgtccaattgtgcaccggtccgcgtacgacgcattaccctcgaccacaatcgtttctatggcctgttgtgcttccggtagtactaggggttatgatgagctagtgccccaccagatttccgtggtctctgaagaaagattctataccaagtggaaccccgaggcacttcctagtaataccggagaagttaatttccagagcggaattatcgcagcccgatgtgcgatctcaaaactgcatcaggagcttggagccaagggcttcatacaagtctatgtggaccaggttgatgaggatattgtcgctgtgaccaggcatagcccctccatccaccagtccgtggtcgcggtcagccggacagcattcaggaaccccaagacgtccttttacagcaaagaagtcccacaaatgtgcatccccggcaaaattgaagaagttgtattggaggcccggacaatcgagcgaaacacaaaaccgtacaggaaagacgagaactcaatcaatggcacacccgatataaccgtggaaatacgcgaacatattcagctgaacgagtctaaaattgtcaagcaggccggtgtcgcaaccaagggacctaacgagtacatccaggaaatagaattcgagaatctttctcctggctccgtcatcattttcagggtgagtctggaccctcacgcccaggtagccgtgggcatcttacggaaccaccttacgcagtttagcccccattttaagagtggatcgcttgccgtggataacgccgatcccattctaaaaattccattcgcatccctggcgtctagactcactttggcagaattgaaccagatcctctacaggtgcgaatctgaggaaaaggaagatggtggcggctgctacgacataccaaattggagcgcgctgaagtatgctgggctgcagggcctgatgtctgttctcgcagaaatacgcccaaaaaatgatctgggtcaccctttctgtaataatctgcggagcggtgattggatgatcgactacgtttctaatcgcctgatatctcgatcaggaacaatcgccgaggtcggtaagtggctccaagccatgtttttctacctgaagcagattccccgctacctcataccatgctatttcgatgccattctgatcggagcatacacaacactactggacaccgcatggaagcagatgtcatcattcgtgcagaacggcagcacgtttgttaagcatctgagcctggggagtgtgcagttatgcggagttggaaaatttcccagtcttccaattctcagtcccgccttgatggatgtgccttataggctgaatgaaataacaaaagaaaaggagcagtgttgtgtttccctggctgctggcttgccccatttcagcagtggaatcttccgttgttgggggagggacacctttatcgccctgcgcggtattttgctcattactggtcgctatgttgaggccagaaacataattctagccttcgcgggaactcttaggcacggtttgatcccaaacttgttgggcgagggaatttatgctaggtataattgtagggacgcagtgtggtggtggctccaatgcattcaagattactgtaagatggttccaaatggtttggacatcctaaagtgtcccgtttcgagaatgtaccctacagatgatagcgcccccctccccgctggcaccctggatcagcctttattcgaagtgatccaggaagctatgcagaagcacatgcagggcatccagttcagggagcggaacgcaggaccccagatcgacagaaacatgaaagatgagggtttcaatatcactgccggggtggacgaggagaccgggttcgtgtatggcgggaaccgcttcaactgcggcacctggatggataagatgggggagtcagatcgggcccgcaatcgaggcattccagccacaccgagagacgggagcgccgtagagattgtcggtttaagtaagtccgccgtacgctggctcttggagctttcgaagaaaaacatcttcccatatcacgaggtcactgtgaagagacatggtaaagctatcaaggtttcttatgacgagtggaatcggaaaattcaggacaatttcgaaaagctgttccatgtatccgaggacccctctgatcttaatgagaagcatcccaacctggttcacaagcgaggcatctacaaagacagctacggcgcgtcatctccttggtgcgactatcagcttcgtccaaacttcacaattgctatggtagtcgcacctgagctgttcaccactgagaaggcatggaaggcattagaaatcgcggaaaagaaattgctcggtcccttgggcatgaagacgctggatcctgacgatatggtatactgtggaatatacgataacgcgctggataacgacaactacaatctggctaagggattcaactatcaccaggggccagagtggctttggcctattgggtacttcttgagagcgaagttatatttttccagactcatgggtcccgagacaacagctaagacaatagttctggttaaaaacgtcctctctcggcactatgtgcaccttgagaggtctccatggaaaggtctccccgaactgacaaatgagaacgctcaatactgtccgtttagctgcgagacccaggcttggtcgatagcgactatcctcgagactctctatgacttg

SEQ ID NO: 6047 - DNA, 4596 bp, synthetic construct
  misc_feature 1..4596: note = source = /note="Description of Artificial Sequence: Synthetic coding sequence"
  source 1..4596: mol_type = other DNA
atgggccactccaaacaaatccggattctgcttctgaacgagatggaaaagttggaaaagactctgttccggctcgaacagggatacgaactgcagtttcgactcggtcccacgttgcagggaaaagcagtgaccgtctacaccaattaccctttcccgggtgaaacgtttaaccgagaaaagtttcgatccttggactgggagaaccctactgagcgggaagatgattccgacaagtactgtaaactcaacctccagcaatccggttcgttccagtactacttcctccaaggcaacgaaaaatcgggagggggctacatagtcgtggatccaatccttcgcgtgggagcagacaaccatgtgcttccgcttgactgtgtcactctgcagacgttccttgctaagtgtctcgggcccttcgacgagtgggaatcgcgtcttagagtggcaaaggagtcaggctacaacatgattcactttaccccgctgcagaccctcggactttcgcgcagctgttactcgctggcaaatcaactggaactgaaccccgattttagcagacctaaccgcaagtatacctggaacgatgtggggcaactggtggaaaagttgaagaaagaatggaacgtgatctgtattaccgatgtggtgtacaatcatactgctgccaacagcaagtggattcaggagcatcctgagtgtgcatacaaccttgtgaatagcccacatctcaagcctgcgtgggtcctggaccgtgcactctggcggttctcctgtgatgtggccgaaggaaagtacaaggagaagggaataccagcactgattgagaatgatcaccatatgaattcgatccgaaagattatctgggaagatatctttccaaagctgaaactgtgggagttttttcaagtggatgtgaataaggcagtggaacagtttaggcgactgctcacccaggaaaatcggagggtgactaagtcagacccgaatcagcatctgaccataattcaggaccctgaatacaggcggtttggatgcaccgtggacatgaatatcgcattgaccactttcatcccccatgataagggtcctgcggctatagaagaatgttgcaactggttccacaagcgcatggaggaactcaattcggaaaaacatcgtctgatcaattaccatcaagagcaagccgtcaattgccttctggggaatgtcttttatgaaagactcgccggacacggaccaaaactcggaccggtgacgagaaagcatccactcgttactagatacttcaccttccccttcgaagaaatcgactttagcatggaagagagcatgattcacctgcctaacaaggcctgttttctgatggcacataacggctgggtgatgggagacgacccactgcggaactttgcagaaccaggctcggaagtgtacctccgacgtgaactgatctgttggggagatagcgtgaaactcagatatggaaataagccagaagattgtccgtatctgtgggcgcatatgaagaagtacactgagattaccgctacctactttcaaggtgtgcgacttgataactgccatagcacccccctgcatgtggcagaatacatgctcgatgcagcgagaaatcttcagccaaatctttacgtcgtggctgaactctttaccggttcggaggacctcgataatgtgttcgtcaccagactcggaatttcctctttgattcgggaggcgatgtccgcctacaactcgcatgaggaaggacggcttgtgtacagatacggtggtgaaccagtcggctcatttgtgcaaccctgcctccgacctctgatgcccgcgatagcgcatgcacttttcatggatatcacccacgataacgaatgtccaattgtccaccggtcagcatacgacgcactgccatctacgactattgtctcaatggcctgttgtgccagcggtagcactcgaggctacgatgagttggtgccacatcagatatcggtcgtctcagaagaaaggttctacactaagtggaaccctgaggccttgccatccaacaccggagaggtgaattttcaaagcggtattatcgcggccagatgcgccatttcaaaactgcaccaagaacttggggcaaaggggtttatccaagtctatgtggaccaagttgatgaagatattgtggcagtgactagacactccccttcaatccatcaatcggtggtggcagtctcgaggaccgcctttcgcaaccccaaaacttccttttactcaaaagaagtgcctcaaatgtgcattcctggcaaaatcgaagaagtcgtgctggaggcaagaactattgaacgcaacacgaagccttaccgcaaagacgaaaattccatcaatggtactcctgatattactgtggaaattagagagcatattcaacttaatgagtcgaaaatcgtgaaacaggcaggggtggccacgaagggacctaacgagtacattcaagaaatcgaatttgaaaacttgtcccctggatccgtgatcatctttcgcgtgtcattggacccacacgcccaagtggccgtgggtattctgcggaatcaccttacccagttttccccacatttcaaatcaggttcactggccgtggataatgcggaccctatacttaagattccatttgcctcccttgcatcccggcttacccttgcagaactcaaccagatattgtacagatgcgagtccgaggagaaggaggacgggggaggatgctacgatattcctaattggtcagcactgaagtacgcagggcttcaaggattgatgagcgtgttggcggagatcaggcctaaaaacgatcttggtcatccattctgtaacaatcttcggtcgggcgattggatgatagattacgtctcgaacagactgatttcgcggtccggtactatcgcagaggtgggaaagtggctgcaggcaatgtttttctacctgaagcagatccccagataccttattccgtgctactttgacgctattctcattggtgcatataccaccctgctggataccgcgtggaagcagatgagctcgtttgtgcaaaatggctccacctttgtgaaacatctgtcgctgggctcggtgcaactttgtggagtggggaagtttccaagccttccaatcctgagcccagcccttatggacgtgccgtacaggcttaacgaaatcaccaaggaaaaagagcagtgctgtgtcagccttgccgctggactcccgcacttttcgtcgggaatctttcgttgttggggtagagacacttttatcgcactgagagggatactgctcatcactggccggtatgtggaagcaagaaacataatcctggcatttgcggggaccctgcggcatggactcattcctaatcttctgggcgaggggatatacgcccggtacaactgtagggacgcagtgtggtggtggctgcagtgtatccaagactactgtaagatggtgcccaatggtttggatatacttaagtgtcctgtctcgcggatgtatcctactgatgactcggcaccccttcctgctgggactctggatcagcctctcttcgaggtgatacaggaggcaatgcagaagcatatgcaaggaattcagttccgtgaaagaaatgctggacctcaaattgatcgcaacatgaaggatgaaggatttaacatcaccgcgggggttgatgaggaaaccggatttgtgtacggaggtaaccggttcaactgtggtacctggatggataagatgggagaatcggaccgtgcgcgaaaccgaggaattccggctactcctagagatgggagcgccgtggaaattgtgggtctgtcaaagtcggcagtgcgttggctgctggagctcagcaaaaagaacatcttcccttatcacgaagtgaccgtgaagagacatggcaaggcgataaaggtgagctacgacgagtggaatcggaaaattcaggataactttgagaaactgttccatgtctcggaggacccttcggatttgaacgaaaaacacccaaacctcgtgcataagcgcggtatttacaaggactcgtacggagcttcctcgccctggtgcgactaccaactcagacccaatttcactattgcgatggtggtggcccctgagttgtttaccactgagaaggcatggaaagcacttgagattgcagaaaagaaacttctcggaccactgggtatgaaaactctcgaccctgacgacatggtctactgtgggatttacgataacgcactggataatgataactacaacctggccaagggtttcaattatcaccagggacccgaatggctttggcctattggatactttctgcgcgcgaaactgtacttttcaagacttatgggacctgagacgactgcaaagactattgtcctcgtgaaaaatgtcctgtcccgacattacgtccatctggagcgctccccgtggaagggcctgcccgagctcaccaacgagaacgcacagtactgtccattttcgtgtgaaacgcaagcatggtcaatcgcaactatccttgaaactctctacgatctg

SEQ ID NO: 6048 - DNA, 4596 bp, synthetic construct
  misc_feature 1..4596: note = source = /note="Description of Artificial Sequence: Synthetic coding sequence"
  source 1..4596: mol_type = other DNA
atggggcactcgaagcagatccgcattctcctacttaacgagatggagaaacttgagaaaacattgttccgtctcgagcagggctacgagcttcagttcagattaggtcccaccctgcagggaaaggccgtgaccgtgtacactaactaccctttccccggagagaccttcaatcgtgagaagtttaggtcccttgactgggagaaccccacagaacgtgaagacgattcggacaagtactgtaagctgaacctgcagcaatccggctctttccaatactactttttacagggcaacgagaagtccgggggtggttatatcgtcgttgaccccattcttcgtgttggtgcggataaccatgtcttgccgctcgattgcgtcaccctgcagacatttttggctaagtgcctgggcccctttgatgagtgggagagccgcctgcgcgtcgccaaggagtccggttataacatgattcacttcactccgctgcaaacactaggtctgagccgcagttgctattccttggcgaatcagttggagctgaaccccgacttcagcaggcctaaccgtaagtatacttggaacgacgtgggtcagctggtggagaagttgaagaaggagtggaatgttatctgcataacggacgtcgtttacaaccatacggcagcaaattccaagtggatccaagagcatcccgagtgcgcatacaacctcgtcaactctcctcaccttaagcccgcgtgggtcctcgatcgggccctttggcgtttcagctgcgatgtcgctgaaggcaagtataaagagaagggcatccccgccctgatcgagaatgaccaccacatgaacagcattcgcaagatcatatgggaggatatcttccccaaactcaagctctgggagttcttccaagttgatgtcaataaggcggtcgaacagttcagacgcctcctaacgcaggaaaatcggcgcgtgaccaagtccgacccgaaccagcaccttactatcattcaggacccggaatatcgtcgattcggatgtactgtggacatgaacattgccctcacaaccttcatccctcatgacaagggccccgccgccatcgaggagtgctgtaactggttccataaacgtatggaagagttgaattctgagaagcaccgccttatcaattaccaccaggagcaggctgttaactgcctgctgggcaacgttttctacgagagactggccgggcacggccccaagttgggtcccgtcacccgcaagcacccactggttacccgttacttcacattccccttcgaggagatcgacttctcgatggaagaatcgatgattcacctgccgaacaaggcttgtttcctgatggcccacaatggctgggtcatgggtgatgatccgctgcgaaactttgctgagcccggttcggaggtctatctccgtcgtgagctgatttgctggggtgactcggtcaagctccggtacggtaacaagcccgaggactgcccgtacttgtgggctcacatgaagaagtacaccgagatcacggccacctatttccagggagtgcgcctggacaattgtcattccacccctctgcatgttgccgagtacatgctggatgcggcgcgcaacctgcagccgaacctctacgtggtggccgagttgtttaccggctctgaggacctggacaatgtcttcgtgacccgtctgggcatatcctccctgatccgcgaggctatgagtgcctacaactcccacgaggagggccgcctcgtctatcgttatggcggtgaacccgtaggttcctttgtacagccgtgtctgcgtcctttgatgcccgcgatcgcccacgctctttttatggatatcacgcacgacaacgaatgccccatcgtgcataggtcagcgtacgatgccctgccctccaccaccatcgtctcaatggcctgttgtgcctcaggctcaacacgcggctacgacgagctcgtcccccaccaaatttccgtggtttccgaggagcgcttctataccaagtggaacccggaggcgcttccgtccaatactggcgaggtcaacttccaatccggtatcattgcggctcggtgcgccatttccaagctccaccaggaactgggcgccaagggctttatccaggtctacgtggatcaggtcgacgaggacattgtggctgtcacacgccacagcccctcgatccaccagtccgttgtcgccgtgtcccgtacggcgtttcgcaatcccaagacttccttttactctaaggaggtgcctcaaatgtgcatccccggtaaaattgaggaggtggtcctggaagcccggacaatcgagcgtaacacgaagccttaccgcaaggacgagaactccattaatgggacgcctgacatcaccgtggagatccgtgagcacatccagcttaacgagtcgaagatcgtcaagcaagctggtgtcgccaccaagggtcccaacgagtacatccaagagattgagttcgagaacttgtccccgggatcggtgatcatctttagagtgtccctggaccctcatgcacaggtcgctgttggaatcctccgaaatcacctcacccagttctcgccgcatttcaagtctggatccttggctgtggacaatgctgatccgatcctgaagatcccgttcgcctccctcgctagtcggcttacgctggcagaactcaatcaaatcttgtaccgctgcgagagtgaggagaaggaggacggtggcggatgctacgatatccctaactggtcggccttgaagtacgcaggactgcagggcttgatgagcgtactcgctgagatccggcctaagaacgacctcggccaccccttctgtaacaacctgaggtcgggcgactggatgatcgattatgtatccaatcgtctgataagccgcagtggcacgattgctgaagtcggtaagtggctgcaggccatgttcttctacctcaagcagatcccgcgctacctcataccgtgttatttcgatgccatcctcattggagcctacaccactctccttgacaccgcttggaagcagatgagctctttcgtgcaaaacggcagcacgttcgtcaagcatctatctctgggatctgtccaactttgtggagtgggaaagtttccgtctctccccatcctctcgcccgccttgatggatgttccctaccgcctgaacgaaatcacgaaggaaaaggaacagtgttgtgtctctcttgcggccggcctcccccatttcagcagcggcattttccgatgctggggtcgtgacacgttcattgcgttgcgcggcatcctgctcatcaccggccgctacgtggaggctcgcaacatcattctcgcgttcgctggtacactgcgtcacggcttgattcccaaccttcttggcgagggaatatatgcacgctacaattgtcgcgacgccgtctggtggtggctgcagtgcatccaggactactgcaagatggtgccaaacggccttgatatcctgaaatgccccgtctccagaatgtatcctactgacgacagtgccccgttgccagccgggaccctcgatcagcctttgttcgaggtcattcaagaggccatgcagaagcacatgcagggtattcagttccgcgagcgcaatgcgggcccccagatcgataggaatatgaaagatgagggctttaacattaccgctggcgtggacgaggagaccggcttcgtctacggagggaatcgttttaattgtggtacctggatggacaagatgggcgagagtgacagggcccggaatcgcggcatcccagctacacctcgggacggctcggccgttgagattgtggggttgagcaagagtgccgttcgctggttgctggagctcagcaaaaagaacattttcccctaccacgaggtgacggtcaagaggcacggtaaggccatcaaggtttcctatgacgagtggaatcggaaaatccaggataacttcgaaaagctgttccacgtttccgaggatcccagcgacctcaacgaaaagcatccaaatctcgttcacaaacgtggcatttataaggactcctatggagcgagtagcccctggtgtgattatcagttgcgccctaactttaccatcgctatggtcgttgcccccgagttgttcaccaccgaaaaggcctggaaggccctggagattgcagaaaagaagttattggggcctctcggaatgaagacgttggaccctgacgacatggtctactgcggcatctacgacaacgccctcgacaacgacaactataacctggcgaagggttttaactaccatcaaggtcccgagtggctgtggcccatcggatattttctccgggcgaagctgtatttcagtaggttgatgggcccggagacaaccgccaagaccatcgtcctggtgaaaaacgttttgtccaggcactatgttcacctcgagcggtctccctggaagggcctacccgaactgacgaacgagaacgcccaatattgtcccttcagctgcgagacgcaagcatggtctattgctaccatcctggagacattgtacgacctg

SEQ ID NO: 6049 - DNA, 4596 bp, synthetic construct
  misc_feature 1..4596: note = source = /note="Description of Artificial Sequence: Synthetic coding sequence"
  source 1..4596: mol_type = other DNA
atgggacactcgaagcagattcgaattctcctgttgaatgaaatggagaagctcgagaaaaccctcttcagactcgaacaaggctacgagctgcagttccggctcggcccgaccctccagggtaaggcggtcactgtgtacactaactacccgttcccgggtgaaacctttaatcgagaaaagtttcggtcgttggactgggaaaatccaacggagagagaggacgactcggacaaatactgcaagctgaacctgcagcagtcaggatcgttccagtactacttcctccagggaaatgaaaaaagcgggggaggatacatcgtagtggatccaatcctgcgggtgggggccgacaatcacgtccttccgctggactgcgtgaccctccaaacgtttctcgccaagtgcctgggccccttcgatgagtgggaatcacggctgcgagtggccaaagagtctggatacaatatgatccattttacccccctgcaaactctgggactctcgcggtcgtgctactcacttgcgaaccaactggaattgaacccggatttctcgcgcccaaatcgcaagtacacctggaatgacgtcggccagctcgtggagaaactgaagaaagaatggaacgtgatctgcatcaccgacgtcgtctacaaccacacggccgccaactcaaaatggatccaagagcacccggaatgtgcatacaacttggtgaacagcccgcacttgaaacctgcctgggtcctggatcgggctctctggcgcttctcatgcgacgtcgcggagggtaagtataaggagaagggcatcccggctctcatcgagaacgaccaccatatgaattcgatccggaagataatctgggaggatatcttcccaaagctgaagctgtgggagtttttccaagtggacgtgaataaggcggtcgaacagttcagacgcctgcttacccaggaaaatcgccgcgtgaccaagtcagacccgaatcagcacctgacgatcatccaagaccctgaataccggcgcttcgggtgcacggttgacatgaatatcgcgctcactactttcatcccgcacgataagggacccgccgctatcgaagaatgctgtaactggttccacaagagaatggaggagctgaatagcgagaaacaccgcctcatcaattaccatcaagagcaagcggtgaattgcttgctcggtaacgtgttttacgagagactggccgggcacggcccaaagctgggaccggtgactcgcaaacaccctctggtgacccgctacttcactttcccgttcgaagagattgacttctccatggaagaatcaatgatccacctgccgaacaaggcgtgcttcctgatggctcataacggctgggtcatgggagacgacccgttgagaaacttcgctgagcctgggagcgaagtgtaccttcgccgagagctcatatgttggggcgacagcgtcaaattgcgttacggaaataagccagaagattgtccctacctgtgggcacacatgaagaagtacaccgagattactgccacctacttccagggagtgcggctggacaattgccattccaccccgctgcacgtggccgaatacatgctcgacgcggcccggaacctccagcctaacctttacgtggtggcggagctgttcactgggagtgaagatctggacaacgtctttgtgaccaggttgggaatctcaagcctgattcgcgaagccatgtcagcgtacaactcacacgaagaaggacgcctggtgtaccgctacggcggagaaccagtgggatcattcgtgcagccgtgtctcagaccccttatgcccgccatcgcccacgcgctctttatggacatcacgcatgacaacgaatgcccgatcgtgcatagaagcgcctacgacgcgttgccgtccactactatcgttagcatggcatgttgcgcgtcgggcagcacccggggttacgatgaattggtcccacaccagatctcggtcgtctcggaggaacggttctacactaagtggaacccggaggccctcccgtctaacaccggagaggtgaatttccaatcaggcatcattgccgcccgctgcgccatttccaagctccaccaggagttgggcgccaaggggtttatccaggtgtatgtggatcaggtagatgaagatatagtggcggtgaccagacattccccatccatccatcagtcggtggtggctgtatcgaggaccgctttcagaaaccctaagacttcgttctactcgaaagaagtgcctcaaatgtgtatccctggcaaaatcgaggaagtcgtgttggaagcgcgcaccatcgagcggaatactaagccctataggaaggatgagaattcgatcaacgggaccccagatatcaccgtggaaatcagagaacacattcaactcaacgagtccaaaatcgtgaaacaggccggagtggctaccaaaggcccgaacgagtacatccaagagatcgaattcgagaacctgtcgccgggtagcgtgatcatcttccgcgtgtccttggacccacatgcgcaggtggctgttgggatcctgagaaatcacctgacccagttttccccgcatttcaaatccggaagcctcgccgtggataacgcagacccgatcctgaagatcccattcgcctcactcgcctcgcggctgaccctggctgagttgaaccaaatcctgtaccggtgtgagtcagaagaaaaggaggatggcggtggatgctacgacattccaaactggtcagcattgaagtacgcgggactgcagggattgatgtccgtgctcgcggagatccggccgaaaaacgacctcggacacccgttctgcaacaatctcagatctggcgactggatgatcgactacgtatccaaccggcttattagcaggtctggtaccatcgcagaggtcgggaagtggctccaagccatgttcttttacctgaagcagatcccccgctacttgatcccgtgctacttcgacgctatcctgatcggtgcctacacgaccctgcttgacactgcctggaagcaaatgtccagcttcgtgcagaatggttccaccttcgtgaagcacctttcactcggatccgttcagttgtgcggcgtgggaaagttcccgtcgctgccgattctttcacccgctctgatggacgtcccgtatagactcaacgaaattaccaaggaaaaagaacagtgctgcgtgtcgctggcagccggactgcctcatttctcctccgggatcttccggtgttggggtcgcgatacctttatagccctgagagggatcctcttgatcactgggaggtatgtggaagctcggaacattattctcgcgtttgccggtacccttagacatggactgattcctaacctcctgggagaaggcatctacgcccggtacaattgcagggacgcagtgtggtggtggctccagtgcatccaggattactgcaagatggttccaaacggactcgacatcctcaagtgccctgtcagccggatgtacccgactgatgactcggctccactcccggcaggcacgctggatcagccgctgttcgaggtcattcaagaggccatgcagaaacatatgcagggaatccaattcagggaaagaaacgccggcccgcagattgatcgcaatatgaaggatgagggattcaatatcactgccggagtggatgaggaaactggattcgtctatggcggaaatcgttttaactgcggaacctggatggacaagatgggagaatctgatagagccagaaacagaggaatcccggccaccccgagggacggatcggcagtggaaatcgttggcctgagcaagagcgccgtgcgatggcttcttgaacttagcaagaagaacatctttccctaccatgaggtgaccgtgaaaagacacggcaaagcaatcaaggtgtcctacgatgaatggaatcggaagatccaagacaactttgagaagctctttcatgtgtccgaggatccgtcggacctgaatgaaaaacatcctaatcttgtccataaacgcggcatctacaaggatagttacggcgcctcgtcgccgtggtgcgactatcagctcaggccaaacttcaccatagccatggtggtggcaccggagttgtttaccaccgagaaggcgtggaaggcactcgaaatcgcagagaagaaactgctcggaccgctgggtatgaaaacgctggacccggatgacatggtgtactgtggaatttacgataacgcgctggataacgacaattacaacctcgctaaaggtttcaattaccaccaagggcctgagtggctttggccgatcggctacttcctgcgcgcaaagctgtacttctcacggctgatgggaccagagactaccgccaagactatcgtcctggtgaagaacgtcctgtccagacactacgtgcacctcgaaagatcgccgtggaagggactgcctgaattgactaacgagaatgcccaatactgcccattctcatgtgaaactcaggcgtggtcgatcgccactatcctggaaaccctctacgatctg

SEQ ID NO: 6050 - DNA, 4596 bp, synthetic construct
  misc_feature 1..4596: note = source = /note="Description of Artificial Sequence: Synthetic coding sequence"
  source 1..4596: mol_type = other DNA
atggggcactctaaacagatccggattctgcttctgaacgagatggagaaacttgagaagacgctgttccgcttggagcagggatatgagctccagtttagactggggcccaccctccagggtaaggctgttacagtgtataccaactacccttttcctggcgagacatttaacagggagaaatttcgctcgctagactgggagaacccaaccgaacgggaagacgacagcgataagtattgcaagctgaacctccagcagagcgggtcttttcaatactacttcctccaggggaacgaaaagtctggcgggggatatatcgtggtggatcccatcctgcgggtgggagctgataatcatgtgctccctttggactgtgtgaccctgcaaacatttttagcaaagtgccttggaccttttgacgagtgggaaagcaggctgagagtggcgaaggagtctggctacaacatgatacattttacgcctctccagactctcggcttaagccgctcttgctactctctcgctaatcaactggaactgaacccggacttcagtcggcccaaccgcaagtacacttggaacgatgttgggcaactcgtggagaagttaaagaaagaatggaacgtaatctgcattacagatgtggtctacaaccacacagcagctaacagcaaatggatccaggagcaccccgagtgtgcatataacctggtgaattcccctcacctgaagccggcttgggtgctcgacagagctctatggaggttcagctgcgacgtggcggagggcaagtacaaggagaaaggaattcccgcactaatcgaaaacgaccaccacatgaacagcatcagaaagataatttgggaggacattttcccaaagctgaagctttgggagttcttccaagtggacgtgaacaaggccgtcgaacagtttcgaaggctacttacacaggaaaacagaagggtaaccaagagcgatcccaatcagcatttaacaatcattcaggatccagagtaccgcaggtttggatgtaccgtcgatatgaacatcgccctgacaacatttatacctcacgacaaaggtcctgccgcgattgaggaatgttgcaattggtttcacaaaaggatggaagagttgaattctgaaaaacaccggttaatcaactatcaccaagaacaggctgttaattgcttgctggggaacgtgttctacgaaaggctggctggacacggacctaagctcgggccagtgactcgcaagcatcccctggtgacccgatattttacctttccttttgaggagattgacttttctatggaggaaagcatgatccaccttccgaacaaagcttgtttcctgatggcacataatggttgggtcatgggcgatgacccccttcgcaatttcgctgaacctggaagcgaagtgtatctgaggagagaattgatttgctggggcgattctgtgaagttgcgctacggaaacaaacccgaggattgcccatacctgtgggcacatatgaagaagtatacagagatcaccgcaacatacttccagggggtcaggctggacaattgccatagcactcccctgcatgtcgccgaatacatgctggacgccgcaagaaatctgcagcctaatctgtacgtggtagcagaactgttcactggaagtgaggacttagacaacgtatttgtaaccaggctcggcattagttcccttatccgggaagctatgagtgcttataattctcacgaggaggggcgccttgtttaccggtatggcggtgaaccagtgggcagctttgtccaaccttgtttaaggccactcatgccggcaatcgcacatgccctgttcatggatatcacccatgataatgagtgccccatagtgcaccgcagtgcatacgacgctctcccttccaccactatcgtgagcatggcctgctgcgcctcaggaagtacaaggggatacgatgaactggtgccccaccagatctctgtggtgtcagaagaaagattttatacaaagtggaatccagaagcgctgcctagcaacacaggggaagtcaactttcagtctggcatcatagccgcacggtgcgcgatctcaaagctgcaccaagagttgggcgctaaaggatttatccaggtgtatgtggatcaggtcgatgaagacatcgtcgcagtgacccggcattctccttcaatacaccaatcagtggtagcagtgtcacgcacagcgttccgaaaccccaagactagcttttactctaaggaggttccccagatgtgcataccaggaaagatagaggaggtggtactggaagccagaacaattgagaggaacactaagccttaccggaaagatgaaaatagcattaacgggacaccagacatcaccgtggagatcagggagcacattcagctcaacgaatccaaaatcgttaagcaggctggagtggctaccaaggggcctaacgagtacatccaggaaattgagttcgaaaatctcagtcccgggtctgttattatcttccgagtatccctggacccccatgctcaggtcgctgtgggaatactgcggaatcatttgacccagttttcaccgcacttcaaatcaggctccctggcagtcgacaatgctgaccctatcctgaaaattccttttgcaagcctggctagccggctgaccttggctgagctgaaccagatactgtataggtgcgagtcagaggaaaaggaagatggtggcggatgctacgacatcccaaactggtcagcactgaagtatgcggggctgcagggtttgatgtcagtcctggcagagattcgccccaagaacgaccttggacaccctttctgtaacaatctccgttctggggattggatgattgattacgtatctaacaggttgatttcccgctcaggcaccattgcagaagtcggcaaatggctgcaggccatgtttttctatctgaagcaaatcccacgatacctcatcccatgctatttcgacgcaatcttaatcggcgcctacacgacactgctggatactgcctggaagcagatgagctctttcgttcagaacggctctacatttgtgaagcacttgagccttggcagcgtgcagttgtgcggtgtggggaaattcccctctctcccgatactttctccagcactgatggatgtcccttataggttgaacgagatcactaaagagaaagaacagtgttgcgttagtctggctgccggcttaccccacttcagctccggcatcttcaggtgttggggccgggatacatttatagccctcaggggtatattgctaatcacgggcagatatgtggaagcccgcaacattatactggcttttgcaggcactttgcgacacgggcttatccctaacctgctgggcgaaggaatctacgctcggtataactgcagggatgcagtctggtggtggcttcaatgtatccaggattattgtaagatggtgcccaatggcctggatatcctgaagtgccctgtgagcaggatgtaccccactgacgacagcgcgccgctgccagctgggacactggaccaaccactgttcgaagtgatccaagaggcaatgcaaaagcatatgcaaggaatccaattcagggagagaaacgcagggcctcagatagacaggaatatgaaagatgagggattcaacataacagcaggggtggatgaagaaaccggcttcgtttatggcggcaatcggttcaactgcggaacatggatggataagatgggcgagtctgacagagctcgaaacagaggaatccctgccaccccacgcgacggtagcgccgttgaaatcgttgggctctccaaaagcgctgtgaggtggctgctggagctgagcaagaaaaatatctttccttaccatgaagtcactgtgaagcgacatggcaaggcaatcaaggtctcctatgatgagtggaatcggaaaatccaagataactttgaaaagctgtttcatgtttctgaagatcctagcgatctgaacgaaaagcaccctaatctggtgcataagcgtggcatctacaaggattcttatggagcgagcagcccctggtgcgattaccagcttagaccgaatttcaccatagccatggtcgtcgcccccgaactgttcactaccgagaaagcatggaaggcgcttgaaattgccgagaagaaactcctcggacctctgggcatgaaaacccttgatccagatgatatggtctactgtggcatctatgataacgctttggataatgataactacaacctggctaagggctttaactatcaccagggtcccgaatggctgtggccaattggctacttcctgagagccaagttgtattttagtagactgatgggaccagaaacaaccgctaagaccatagttctggtgaagaatgttctcagtcgccactatgtgcatctggaacgcagcccttggaagggcttgccagagctcacaaacgagaacgcgcagtattgcccttttagttgcgaaacacaagcatggagtatcgctaccatcctggaaacgctttacgacctc

SEQ ID NO: 6051 - DNA, 4596 bp, synthetic construct
  misc_feature 1..4596: note = source = /note="Description of Artificial Sequence: Synthetic coding sequence"
  source 1..4596: mol_type = other DNA
atgggacactcaaagcagattaggattctgctcctgaacgagatggaaaagctggagaagacccttttcagactggaacaggggtatgagctccaattcaggctggggcctacactgcagggcaaggccgtgaccgtgtacactaactacccattcccaggcgagactttcaatagagaaaagtttcgaagcttggactgggaaaatcccaccgagcgggaggatgattctgataagtattgcaaattgaacctccaacagtccgggtccttccagtattacttcctgcaggggaatgaaaagtccgggggcggatatatcgtagtcgatccgatcctcagagtgggcgctgataaccacgttctccctctcgattgtgttactcttcaaacctttctggctaagtgcctgggaccctttgatgagtgggagtccaggttgagagtggccaaagagtccggatataacatgatccactttacaccactgcagacactggggctgagtcgatcctgctactcactggccaaccaactggaactgaacccagacttcagcaggcccaaccgcaagtacacctggaacgatgttggtcaactggtggaaaagctcaaaaaggagtggaacgttatctgcattactgatgtcgtgtacaaccacacggctgccaactccaaatggatccaggaacacccagaatgtgcgtacaacctggtgaacagcccacaccttaagccagcctgggtgctcgaccgggctctctggcggttttcctgcgacgtcgccgaggggaaatataaggaaaagggcattcccgctttgatcgaaaacgatcaccacatgaatagcattcggaaaattatttgggaggacatcttccctaaactcaagctctgggaattctttcaggtcgatgttaataaggctgtggagcagttccgcagactgctcacacaggaaaataggagagtgactaaatcagatcctaatcagcacctgacaattattcaggatcccgagtaccggcggttcggatgtaccgtggacatgaacatcgcccttactaccttcattccccacgacaaggggcccgccgctatagaggaatgttgcaactggttccataagcgcatggaagagctgaacagtgagaaacaccgccttatcaattatcaccaggaacaagccgtcaactgcctcttggggaacgtgttttatgagcgcctggccggtcacggacctaagctcgggccagtgacccgaaaacatcctctggtgacgagatacttcacgttccccttcgaggagatcgatttctccatggaagagagtatgatccatcttcccaacaaggcttgcttcctgatggctcacaacggctgggtgatgggcgacgatcccttgaggaactttgccgagcccggctctgaggtgtatcttaggcgggaactgatttgctggggtgactcagtaaagcttcgatacggcaataaacccgaagattgcccctacctttgggctcacatgaaaaagtacaccgagatcacagctacgtattttcaaggggtgagactggacaactgccattctactccgttgcacgtggctgaatatatgcttgacgccgcacgcaacctccaacccaacctttatgtggtggctgagctctttactggatctgaggatttggacaacgtgttcgtaacccggttgggaatcagcagtctgatccgagaggccatgagtgcctacaactcccacgaagagggtcggctcgtataccgatatggcggagaacctgtggggagctttgtccagccctgtctgcgcccattgatgcccgccatcgctcacgctctctttatggatatcacccatgataacgagtgccccattgtgcacaggtccgcttatgatgctcttccttcaaccaccatcgtttccatggcctgctgtgcatccggcagcacacggggctacgatgagttggttcctcatcagatatcagttgtatccgaggagagattttacacaaaatggaaccctgaggccctgccctccaatactggcgaagtcaattttcagtccgggattatcgctgccaggtgcgccatcagtaagctccaccaagagctcggcgctaagggattcattcaggtctatgtggatcaggtagacgaggacatcgtggcggtaaccaggcactctccgagcatccatcagagcgtagtcgctgtcagtaggactgctttcagaaatcccaagacctccttctacagcaaagaggtccctcagatgtgtatccccggcaagatagaggaagtggtgctcgaagccaggacaatcgagcggaatacgaaaccatatcggaaagatgaaaattccatcaatgggacccccgatataactgtggagattagggagcacatccagctgaacgagagtaagatcgtgaagcaggcaggggttgcaacaaagggtcctaacgagtacatccaggagatcgagttcgagaacctgagtcctggatccgtaattatatttagggtgtctttggacccccatgcccaggtggccgtggggatactgagaaatcatctgacccaattctccccacatttcaaaagtggttctctcgccgttgacaacgccgatccaatcctgaaaatcccattcgcaagcctcgcctctagactgaccctggccgagctgaatcagattctctatcgctgcgagagtgaagagaaggaagatgggggagggtgttatgacataccaaattggtccgcccttaaatacgccggcctgcaggggctcatgagtgttctcgctgagataaggcctaagaacgatttgggacatccattttgcaacaacctgcgatctggcgattggatgatcgattacgtttccaaccggctcattagtcggtccgggaccattgccgaagttggcaagtggctccaggcgatgtttttttatctcaaacaaatcccgcgatatctcattccatgctacttcgacgccatcctcattggagcctatactacactgttggatactgcttggaagcagatgtcatccttcgtacagaatggatccacattcgtcaagcatctctctctggggtctgtccagctttgtggggttggtaaatttccaagtcttcctattctgtccccggcccttatggatgtgccctacagactgaacgagattacaaaagaaaaggaacagtgctgcgtctcacttgcggccggcctgccccatttttccagcggtatcttccgatgttgggggagggacacctttatcgccttgcggggtatcttgctgattacaggcaggtacgtggaggcccgaaacatcatcctggcctttgccggcacgcttaggcacggactgattcctaatttgctgggcgaggggatctacgcgaggtacaactgccgagatgctgtttggtggtggcttcagtgtatccaggactactgcaaaatggttccgaacgggctggacatcttgaaatgtcctgtatcaagaatgtatcccactgacgattctgctcccctgcccgcaggaacgttggatcagccactcttcgaggtaatccaagaagccatgcagaaacacatgcaagggatccagtttagggagcgaaacgctgggccgcagatcgaccgaaacatgaaggatgagggcttcaacattacagccggcgtcgacgaagagacaggcttcgtgtacggcggcaatagattcaattgcggaacctggatggacaaaatgggtgaaagcgatagggcacgcaaccgcggaattccagcgacccccagggacggctccgccgtggaaatcgtgggcctgagcaaatccgcagtgcggtggttgttggaactgtctaagaaaaacattttcccctaccatgaagtcacggtgaaacggcatggaaaagccatcaaggttagttacgacgagtggaaccggaagattcaggacaactttgagaagctgtttcacgtctccgaggaccccagtgacttgaatgaaaaacaccctaatcttgtgcataagcgggggatatacaaggactcttacggcgctagcagtccctggtgcgactatcaattgcgccccaatttcactattgcaatggtggttgctccagagttgttcacaacagagaaagcatggaaagcccttgaaattgccgagaagaaactcttgggacctctcggcatgaagaccctggaccctgacgacatggtatactgcgggatctatgataacgccttggacaacgataactacaaccttgctaagggattcaactaccaccagggcccagaatggctgtggcccatcggatatttcctccgggctaagctgtacttctctaggttgatgggtcctgaaactacggcgaaaacaatcgtgctcgtcaaaaacgtgctctccagacactacgttcatttggagcggagcccctggaaaggtctcccagagctgacaaacgaaaacgcccagtattgtcctttttcctgcgagacgcaggcttggtccatcgccacaatcctggagaccctgtacgacttg

SEQ ID NO: 6052 - DNA, 4596 bp, synthetic construct
  misc_feature 1..4596: note = source = /note="Description of Artificial Sequence: Synthetic coding sequence"
  source 1..4596: mol_type = other DNA
atgggccattcgaagcagatccgaattctgcttttgaacgagatggaaaagttggaaaaaactttgtttcgactggagcaggggtatgagctacagttccgactgggcccgacgttgcaaggcaaggctgtgacggtttacacaaattacccctttcccggcgagacgtttaaccgcgaaaagttccgctcgctggactgggagaaccctacggagcgcgaggacgatagcgacaagtattgcaaattgaacctccaacagagtggctcgtttcagtactacttcttacagggaaatgagaagtctggcggaggatacatcgtcgttgaccccatcttgcgcgtcggtgccgacaaccatgtcctccccctggactgcgtgaccttacagaccttccttgcgaagtgcttgggtccgttcgatgagtgggaatcgcgcctgcgtgttgctaaggagagtggctacaatatgatccactttaccccactgcaaactttgggcctcagccgctcatgttattccctggcaaaccagctcgagcttaaccccgattttagccgccccaatagaaagtacacctggaacgatgtgggtcagctggtggaaaagttgaagaaggagtggaacgttatttgcatcaccgatgtggtgtacaatcacacggcggccaactctaagtggattcaggagcaccctgaatgtgcctataacttggtcaattccccccacctcaagcccgcatgggtgctggaccgtgccctttggcgattctcttgcgatgtggcagagggcaagtataaagagaagggaatcccagcccttattgagaatgatcatcacatgaattccataaggaagattatttgggaggacatttttcccaaattaaagctgtgggagttcttccaggtggacgtgaataaagctgttgagcagttcagacggctcctgacccaggaaaatcgccgtgtgaccaagagtgaccccaatcagcacctgacaatcattcaggaccccgaatacaggcgttttggctgtaccgtggatatgaacattgccctcacaacgtttattccacacgacaaaggccccgcggccatcgaagagtgctgcaattggttccataagaggatggaggagctcaattccgaaaagcatcggctgatcaactaccaccaggagcaggccgtgaactgcctactcggaaatgtgttttacgagcgcttggccggccacggtcccaagctggggccggtcactaggaagcacccgctcgtaacccgctatttcacgtttccgttcgaggaaatcgacttctcgatggaggagagcatgattcatctgcctaataaggcttgctttctgatggcgcacaacggctgggtgatgggggatgacccattgcgcaactttgccgagccgggctcagaggtttatctgcgccgcgagctgatctgctggggtgatagcgtgaagttacgttacggcaacaagcctgaggattgtccctacctatgggcgcatatgaagaagtacacagaaattaccgccacatactttcagggcgtgaggttagacaactgccactcgaccccactgcatgtggccgaatatatgttagacgctgccagaaacctgcaacctaacctgtacgtcgtggcggaactgttcaccggatctgaagatctagataatgtcttcgtgactcggctgggaatctcgtcgctgatccgcgaggcgatgtccgcctacaactcccacgaggaaggccgcttagtttaccgatatggaggcgaacccgtgggatcatttgtccagccatgcctgcggccgttgatgcccgccatcgcgcacgcattgtttatggatataactcacgacaatgagtgtccgatagtgcatagaagtgcctatgacgcccttccgagtactactatcgtctctatggcatgctgtgcgtccggatccacccgcggatacgatgagctcgtgccacaccagatcagtgttgtgagcgaagagcggttctacacgaaatggaatcccgaggcgttgccgtcgaatacgggcgaagtcaatttccagtccggcataattgcagcccgctgcgcaatcagcaagctacaccaagagttgggagccaaaggatttatccaagtgtatgtggatcaggtggatgaagacattgtagctgttaccaggcattctccctctatccaccagtctgttgtggcggtgtcccgcacggcgttcagaaacccaaagacgtctttctattccaaggaggtgccgcagatgtgcattcccggcaagatcgaggaagtggtgttggaggcccggacaatcgagcggaatactaaaccgtaccggaaggatgaaaattcgatcaacggtacccccgacataacggttgagatccgcgagcatatacagttgaatgagagtaaaattgtgaaacaagccggcgtggctaccaaggggcccaatgagtacatccaggagatagagttcgagaacctatcccccggctcggtgataattttcagggtgagtctggatccccacgcccaggttgctgtgggcatcctaaggaaccaccttacgcagttctctccgcacttcaagagtggttcgctggcagttgataatgccgatccaatcctaaagattcccttcgctagccttgcgtctcgcctgaccttagccgagctgaatcagatcttgtatagatgcgaaagcgaagagaaagaggatggcgggggctgttacgacatccccaattggagcgcactgaagtatgccggacttcagggcctcatgtccgtactggcagagatccgtcccaagaatgacctgggtcacccattctgcaataacttgcgctcaggcgattggatgattgactatgtgtccaaccgcttgatctcacgatcgggtacaattgctgaggttggtaaatggctgcaggcaatgttcttttatctgaagcaaatcccaaggtacctgattccctgctattttgacgcaattttgataggtgcctataccacgctcctcgacacagcctggaagcagatgtcctcatttgtgcagaacggctcaacattcgtgaagcacctctccctgggcagcgttcagctgtgcggagtggggaagtttccctccctgccaatcctgtctcccgccctgatggacgttccctaccgtcttaacgagattactaaggaaaaggagcagtgctgtgtgtcactcgcggctggtctgccgcatttctcgagtggcatcttccgttgctgggggcgagacacattcattgctcttcgtggaattcttttaatcaccggcaggtatgtggaggcgcgcaacatcatcctagcctttgccggaaccttgcggcatggccttataccgaatctcctaggggaaggcatttatgcacgttacaattgccgagatgccgtttggtggtggttacagtgcatccaggattactgcaagatggtgccgaatggcctcgatattttgaagtgcccggtgtcccgcatgtaccccaccgacgattcagccccactgcccgcaggtactctcgatcagcccctatttgaggttatacaagaggctatgcagaagcacatgcagggaatccagttcagggaaagaaacgctggtccacagatcgaccgcaatatgaaggacgaaggatttaacataaccgcaggtgtggacgaggaaacaggcttcgtatacggcggaaaccgcttcaactgcggcacgtggatggacaaaatgggagaatctgaccgtgcaagaaatcgcggtattccggccaccccacgggacggtagcgccgtggagatcgtgggtctgagtaaatccgcagtcaggtggttgctggagttgtcgaagaagaacatctttccgtatcacgaagtaactgttaagcggcacggcaaggcaattaaagtctcatatgatgaatggaatcgaaagattcaggataacttcgaaaagctgttccacgttagcgaagatccctctgacctgaacgaaaagcacccgaacctggtgcacaagcgcggcatttacaaagattcgtacggtgcgtccagtccgtggtgcgactaccagctgcggccaaatttcaccatcgcaatggtcgtggcccccgagctctttacgacggagaaggcctggaaggctctggagatagccgagaaaaagctgctgggaccattgggaatgaaaaccctcgatccagacgatatggtgtattgcggaatctatgacaacgcgctagacaatgacaattacaatcttgccaaggggtttaactaccaccaaggtcctgagtggctctggcccattggatacttccttcgcgcaaaattgtacttcagccgcttgatgggacctgaaaccactgcaaagaccatcgttctagttaagaatgtgctaagccggcactacgtgcacctcgaaagatccccgtggaagggtttgcccgagctaaccaacgagaatgcccagtactgccccttttcttgcgagactcaggcctggagcattgccacgatcctggagaccctctacgacctc

SEQ ID NO: 6053 - DNA, 4596 bp, synthetic construct
  misc_feature 1..4596: note = source = /note="Description of Artificial Sequence: Synthetic coding sequence"
  source 1..4596: mol_type = other DNA
atggggcacagcaagcaaattagaattctgctgctgaacgaaatggaaaaactggaaaagactctttttagacttgaacaaggatacgagctccaatttcgcctgggtccaactcttcaaggtaaagcagtgaccgtgtacaccaattacccctttcctggcgaaaccttcaatagagaaaagttcaggagtcttgattgggagaatccaactgaacgggaagatgattcggacaaatactgcaagctcaacctgcaacaatccgggtcgttccagtactacttcctccaagggaacgagaaatcaggtggtggctacatcgttgtggatcctatccttagagtcggggccgataatcatgtgctcccgttggattgtgtcaccctccagacttttcttgcaaagtgtcttggaccgtttgatgagtgggaatcacggctcagagtggccaaggaaagcgggtacaacatgatccatttcactccgctccagaccctcggtctttcgcgtagctgttactccctcgcgaaccaacttgagcttaaccccgatttttcacgccctaacagaaaatacacctggaatgatgtgggccagctggtagaaaagctgaagaaggaatggaacgttatatgtataactgacgttgtgtacaaccacactgcagcaaattcgaagtggattcaagagcatcccgaatgtgcatacaatcttgtcaacagcccgcatcttaagcccgcttgggtgcttgacagggcgctgtggcgattttcgtgtgatgtcgccgaaggcaagtacaaagagaagggtatccccgcactgattgagaacgatcatcatatgaactccataagaaagatcatttgggaggacatcttccctaagctcaaactttgggaattcttccaagtggatgtcaataaggcggtcgaacaattccgcagactgctgacccaggaaaatcggcgggtgacgaagtcggatcccaaccaacacctgaccattattcaggacccagagtacagaagattcggatgcactgtggatatgaacatcgcactgactactttcattccacatgacaaaggaccagcagcaatcgaggagtgctgcaactggtttcacaagcgtatggaagagctgaacagcgagaaacatcggctgattaactaccaccaggaacaagcagtcaactgtctccttggaaacgtgttctacgaacgccttgctggccacggacctaaactcggccccgtgacccggaaacacccactggtcactcgttactttacctttccttttgaagagattgatttctcgatggaagagagcatgatccaccttcccaataaggcctgttttcttatggcgcataatggctgggtgatgggagacgatccactgcggaacttcgcagaacccggttccgaagtgtaccttaggcgtgagcttatctgttggggcgattcagtcaagctgagatacggtaacaaacctgaagattgcccttacttgtgggcgcatatgaagaagtacaccgaaataaccgcaacctactttcagggtgtgagactggacaattgtcattcgaccccacttcatgtggcagagtacatgctcgacgcagcgcgtaaccttcagccgaatctctatgtggtggcagagctttttaccgggtccgaagatcttgacaacgtgttcgtgacgagacttggcatatcctccctgattcgggaggccatgagcgcttacaattcgcatgaggaaggtcgcctggtgtatagatacggtggagaacctgtgggctccttcgtccagccgtgccttcggccacttatgcccgccattgcacatgctcttttcatggatatcacccacgacaacgaatgtcccattgtgcatcgttccgcatacgatgcgcttccctcaaccaccatcgtgtccatggcttgttgcgcgagcggttcgaccaggggttacgatgagcttgtgccccaccaaatatctgtcgtctccgaggaacgtttttacacgaaatggaatccagaagcacttccttctaacaccggtgaggttaactttcaatccggtattatcgccgccaggtgtgcaatatccaagctgcatcaagaactgggagccaagggatttatccaggtgtacgtcgaccaggtggacgaggatatagtggctgtcactcgccatagtccttctattcatcaatcggtggtggcagtgtctaggaccgcgttcagaaaccctaagacgtcattctactcaaaagaagtccctcaaatgtgtatccctggaaaaatcgaggaggtggtacttgaggcaagaactattgaacggaataccaagccttacagaaaagatgaaaactcaatcaacgggacccctgatattactgttgagatcagagaacatattcagctgaacgaatccaaaattgttaagcaagcaggagtggcaactaaggggcccaatgaatacatccaggagatcgagtttgagaacctgagccctgggtcagtgattatcttccgcgtgtccctcgatcctcacgcgcaggttgcggtgggtatccttcgcaaccacctgacgcagtttagtccacacttcaaatccggatcgctggccgttgataacgccgatccgattctgaagatcccctttgcgtctttggcaagcaggctgaccctcgcagagctgaaccaaattctttacaggtgtgaatccgaagagaaagaagatggtggcggttgttatgacatccctaactggagcgcactgaaatacgcaggtctgcagggcctgatgtccgtgcttgccgagattcgtcctaagaacgacctcggccatccgttctgcaacaatctcagatcgggagattggatgattgattacgtgagcaaccgtctgatctcccgctcgggaaccattgctgaggtcggaaagtggctccaggccatgtttttctacctgaagcagataccacggtaccttatcccctgctactttgacgccattcttattggtgcgtacactactctgctggatacggcttggaagcaaatgtcctcgttcgtccagaacggaagcactttcgtgaagcatctctcccttgggtcggtccaactgtgcggagtggggaaattcccttcactgcctattttgagccctgcactcatggacgtgccctaccgcctcaatgaaatcactaaggaaaaagagcagtgttgcgtctcgctcgcagcagggctccctcatttttcgtcaggtatctttagatgctggggaagagatacctttattgcccttcgcggtattcttttgattacgggaaggtacgtggaggcccgtaatatcatattggcgtttgccggaaccctgagacatgggctcatccctaacctgctcggtgaaggtatttacgcaagatacaactgccgagacgcggtctggtggtggctccagtgtatccaggattactgtaagatggtgccaaacggactggacatccttaagtgcccagtctccaggatgtacccaacggatgatagcgcaccacttcccgcgggtactttggaccaaccactctttgaagtgattcaggaggcgatgcaaaaacatatgcaaggtatacagttccgagaaaggaatgctgggccccaaatcgatagaaacatgaaggatgagggcttcaatatcaccgcaggagttgatgaggaaactggatttgtgtacgggggaaatcgctttaactgtgggacctggatggacaaaatgggtgagtcggatagagcacggaaccgcggtattcctgctaccccacgcgatggatcggccgtggaaatcgtgggcctgtccaaatcggccgtcagatggctccttgaactttcgaagaagaacatattcccataccatgaagtgaccgtgaagcgccatggaaaagcaatcaaggtgtcgtacgacgaatggaacaggaaaattcaagacaattttgaaaagctgttccatgtgtcggaagatccatcggatttgaacgaaaagcacccgaatctcgtccacaagcggggtatatacaaggactcatatggcgcatcgtcgccgtggtgtgactaccaactgcggccgaatttcaccatagcgatggtggtggccccagaacttttcaccactgaaaaggcatggaaggcgcttgaaattgcggagaagaagctgctcggtccacttggtatgaaaacgcttgatcctgatgacatggtgtattgtggtatctacgacaatgctctggataacgataactataatctcgcaaaaggttttaactatcaccagggaccagaatggctgtggcctatcggttactttcttcgggcaaagctgtatttctcgcggctcatgggacctgagactactgcaaagaccatagtgctcgtgaagaacgtcctgagcaggcactacgtgcatcttgaaagatccccatggaaggggctgcctgagcttactaatgaaaatgcacagtactgtcctttttcctgtgaaactcaagcatggagcattgctacgattctcgaaactctgtatgacctg

SEQ ID NO: 6054 - DNA, 4596 bp, synthetic construct
  misc_feature 1..4596: note = source = /note="Description of Artificial Sequence: Synthetic coding sequence"
  source 1..4596: mol_type = other DNA
atgggacattcaaagcagattcgtatcctccttttaaacgagatggagaagctggagaagaccctttttaggctggagcagggatatgagttgcaatttcggctggggccgacgctccagggaaaggctgtgactgtttatacaaactacccctttccaggggaaaccttcaatcgggagaagtttcggtcactcgattgggagaaccccaccgagcgggaagatgacagcgacaagtattgcaagctaaacttgcagcagtcagggtcgttccagtactattttttgcaaggcaatgaaaaatctggcggggggtacatcgtggtggatcccatcctgagagttggcgctgataaccacgtactcccgctggactgtgtgaccctgcagactttcctggccaagtgcctgggtccttttgacgagtgggaaagccggctgcgggtggccaaggagagtggatataacatgatccattttacaccccttcagaccttgggcttatctagatcttgctactcccttgccaatcaactcgaactcaaccctgattttagtcgccctaaccgtaagtatacatggaacgatgtggggcagttggttgagaaactcaaaaaagaatggaatgtgatttgcataaccgatgtcgtctataatcacacggctgcaaatagcaaatggatccaggaacatcccgaatgcgcttataacttagtaaacagtccacatctcaaacccgcctgggttttggatagggctctgtggagattcagctgcgatgttgcagaaggcaaatataaagaaaaagggatccctgctttgatcgagaatgaccaccatatgaattcaattcggaaaatcatctgggaagacatattcccaaagctcaagctgtgggagtttttccaggtggatgtgaacaaggctgtggagcagttcagacgcctgctgacacaagagaatcggcgggtgacaaaaagcgaccctaaccaacatttaaccattattcaggaccctgagtacaggcgattcggctgtactgtggacatgaatatcgccctgacaaccttcatcccacatgataaaggtcctgccgccatcgaggagtgctgcaattggtttcacaagaggatggaggagttgaattccgaaaagcatcgactgatcaactaccatcaagagcaggctgtcaactgcctgcttggtaatgtgttttatgagcgcctggcggggcatggccccaagctgggtcctgtcactaggaaacatcctcttgtgaccaggtattttacattcccatttgaagaaatcgattttagcatggaggagagcatgattcacttgccgaacaaggcatgtttccttatggctcataatgggtgggtgatgggagatgaccctctccgcaatttcgccgagcccggaagcgaggtataccttagacgtgaactaatctgctggggggattccgttaaattgagatatgggaataaacccgaagattgtccttatctctgggcacacatgaaaaaatacacagaaatcacagctacttatttccagggtgtgagattggacaactgccactccactcctctgcatgtggcggagtatatgcttgacgccgcacggaatctccagccgaatttgtacgtagtggcagaactgttcaccggctccgaggatctggacaacgtgtttgttacaagactgggtatttccagtctaattcgggaagcaatgagtgcctataattcacacgaagaggggcgtctcgtctacagatatggaggcgaacccgttggtagcttcgtccagccatgtctgagacccctgatgcctgcaatcgctcatgctctgttcatggatatcacacatgacaatgaatgtccgattgtgcatcgatccgcatacgacgctctgccctcgacaactatcgtgtctatggcctgttgtgcctccggaagcacacgcggctatgacgagcttgttccgcaccagatatctgtagtctcggaggagaggttttataccaaatggaatcctgaggcactccccagcaacacaggggaggtaaattttcagtccggcataatcgctgcccggtgcgctatctctaagctccatcaggagctgggggctaaagggtttatccaggtgtacgtggaccaagttgacgaggacatcgtggctgttacccgacactcgccttccattcaccagagtgtggtggcagtgtccaggacagcttttaggaacccaaagacttcattctattccaaggaagtgccccagatgtgcatacctggaaagatcgaagaggtggtcctggaagctcgtactattgaacgcaacactaagccgtacaggaaggacgaaaattccatcaatggaacccctgatatcactgtcgagattcgtgaacacatccagctgaatgagtcgaagattgtcaagcaggcaggcgtggccaccaagggaccaaatgagtatatccaggagattgaatttgagaatttatccccaggcagtgtcatcatatttcgcgtttcgctggatcctcatgctcaggtggctgtcgggatattgcgaaaccacctgacccaattcagcccccatttcaaatctgggtccctggcagtggataacgcagatccaatcctcaagatcccctttgcttcccttgccagtcgcctcactctggctgagctgaaccagatattataccggtgcgagtcagaagaaaaggaagatggaggcgggtgttatgatatccctaattggtcagccctcaagtacgccggactgcaagggctaatgagcgtgttggctgagatccggccaaagaatgatctggggcaccccttctgtaacaacctcagatccggggactggatgattgactacgtgtcaaaccggttgatctccagaagcgggacaattgccgaagtgggcaaatggctccaggctatgtttttttacctgaaacagattccgagatacctcatcccctgctattttgacgcaatattgattggagcctatactaccttattggacaccgcatggaagcagatgtcttctttcgtgcaaaacggctctacctttgtcaagcatcttagtcttggcagcgtccagctgtgtggcgtaggcaaattcccatcgctgccaattctcagtcccgcactaatggatgtgccctatcggttaaatgaaatcacaaaagagaaggagcagtgttgcgttagccttgccgccggcctgccacactttagctccggtattttccgttgctggggccgggatacatttatagccctcagaggcatccttctgatcaccgggagatatgtcgaggcccgaaatattattctggcgttcgccggtacattacggcacggcttaatacctaacctcctgggggagggcatttacgcgaggtacaactgccgagacgccgtctggtggtggctgcagtgtattcaggattattgtaaaatggtgcccaatggtctggacatcctgaaatgtccggtttctaggatgtacccaactgacgattctgcacctctgccagcgggaaccctggaccaacccctctttgaagtgattcaagaggcgatgcagaaacatatgcagggtatccagttcagggagagaaacgcaggtcctcagatcgatcgtaatatgaaggatgaaggatttaacattactgcaggagtcgacgaagagactggattcgtctacgggggcaataggttcaactgtggcacctggatggacaagatgggtgagagcgacagggcccgcaaccggggaatacctgcgacaccccgcgatggatccgctgtcgagattgtgggattgtccaaaagcgctgtgcggtggctgttggaactgagcaagaaaaacatttttccttaccacgaagtgaccgtgaaaagacacggaaaggcgataaaagttagttatgatgaatggaatcgtaagattcaggacaatttcgagaagctatttcacgtgagcgaagaccccagcgacttgaatgagaaacatccaaatctggtccacaagcgagggatatataaggacagctacggggctagcagtccgtggtgcgactatcaacttcgcccaaactttaccattgcgatggtggtcgctcctgaactgtttaccacagagaaagcgtggaaggccttagaaatcgcagaaaaaaagctgctgggaccactggggatgaagaccctggaccctgacgatatggtgtattgtggaatttacgacaacgcccttgacaatgataattataatctggctaaagggttcaattatcatcagggccccgaatggctatggcccatcggatactttctgcgtgcaaaactttacttctcccgccttatgggacctgaaaccacggccaagactattgtgttggtcaagaacgtgctgagtaggcactacgttcacctggaacgctcaccctggaagggactccccgaactaacaaatgaaaatgctcagtattgccccttctcatgtgaaactcaggcatggtccatcgctacgatccttgagaccctctacgatctg

SEQ ID NO: 6055 - DNA, 4596 bp, synthetic construct
  misc_feature 1..4596: note = source = /note="Description of Artificial Sequence: Synthetic coding sequence"
  source 1..4596: mol_type = other DNA
atgggacattccaagcaaattcggatccttctgctgaatgaaatggagaagctggagaaaactctgttccgcctcgaacagggctatgagttgcagttccgcctgggtcccactttgcagggaaaggcggtgacggtgtacaccaattaccccttcccgggggaaactttcaaccgcgagaagtttcgctcgcttgactgggaaaatccgaccgaaagggaggacgatagcgacaaatactgtaaacttaaccttcaacagtcaggatcattccaatactacttcctccaaggtaacgaaaagtcgggaggaggatatatcgtggtggatcctatcttgcgggttggtgctgacaaccacgtgctccccctggattgtgtgactctgcaaacgttcttggctaagtgcctgggcccctttgatgagtgggaatcaaggctgcgtgtggcaaaggaatccggctacaatatgatccattttaccccgctgcagacgctgggactttcccggtcgtgctacagcctggccaatcagctggaattgaatccagacttctcgcgccctaatcggaagtacacctggaacgatgttggacagctcgtggaaaaactgaagaaggagtggaacgttatttgcattaccgacgtggtttacaatcatacggccgccaactcaaagtggattcaggaacacccagaatgtgcttacaaccttgtaaatagtcctcacctgaagccagcctgggtgcttgatagagcgctctggagattttcctgtgacgtggcagagggtaagtataaagagaagggaattccagcgctgatcgagaatgaccaccatatgaatagcatccgtaagatcatctgggaggacatcttcccgaagctgaagctgtgggagttttttcaggtggatgttaacaaggcagtggaacaattccgtcgcctgctcactcaggaaaatcgccgcgtcacgaaatccgacccgaaccaacatctgactatcatccaagacccagagtaccgacggttcggatgcactgtcgacatgaacatcgcattgaccacctttattccgcatgacaagggaccagcagcgattgaggaatgctgcaactggttccataagcggatggaggaactgaactcagaaaagcatcgattgatcaactaccaccaggagcaagcggtgaactgtctgttgggcaacgtgttctacgagagactcgccggacacgggcctaagttgggcccggtgactaggaagcacccgcttgtcacccgctacttcactttcccgttcgaagaaatagattttagcatggaagaatcgatgattcaccttccgaacaaggcttgctttcttatggcacataatggctgggtcatgggagacgacccgctgcggaatttcgccgaaccggggagcgaagtgtacctccggagagaactcatctgctggggagatagtgtcaagctgaggtacggaaacaagccggaggactgtccgtacctctgggctcacatgaaaaagtacaccgagatcactgcgacctacttccaaggagtgagactggataactgccactcaaccccactgcacgtcgctgaatacatgctcgatgcggccagaaacctgcagccaaacctctacgtggtggccgaactgttcaccggatcggaggaccttgataacgtgtttgtcaccagactcggaattagctcgctgatcagggaagccatgtcggcctacaactcccacgaagaggggcgtctcgtgtaccggtacggtggagaacctgtggggagcttcgtccaaccttgccttagaccgcttatgcccgctatcgcacatgcgctgttcatggatatcacccatgataatgaatgcccgatcgtccaccggagcgcctacgatgcattgccgtcgaccaccatcgtgtctatggcatgctgcgcatcggggagcactagagggtatgatgaactggtgccgcaccagatctcggtggtttcggaggagcgcttctacaccaaatggaatccggaggccctgccctccaacactggtgaagtcaacttccagtcgggaatcatcgccgcccgctgtgcaatctcgaaactgcatcaagagctgggggcaaagggattcatccaggtctacgtggaccaggtggacgaggacatcgtggccgtgactcgccacagccctagtattcatcagtcggttgtcgccgtgtccagaactgcgttccgcaaccccaagacgtccttctacagcaaggaggtgccacaaatgtgcatccctggaaagattgaggaagtggtgctcgaggccagaaccatcgaacggaacactaagccataccgcaaggatgaaaactcgatcaacggaacccctgacatcaccgtcgagatccgggaacacatccagctcaatgagagcaaaatcgtgaagcaagccggggtggcgactaagggacctaacgaatacatccaggagatcgagtttgaaaatctgtccccagggtctgttatcattttcagggtgtcactggacccacacgcccaggtagctgtggggatcctccggaatcatctgacccagttctcaccgcatttcaagtcggggtcactcgccgtggacaacgccgacccaattctcaagatcccgttcgcgtccctggcttcccgactgacccttgcggagctgaaccaaattctgtacagatgcgagagcgaggagaaagaggatggcggaggctgttacgacatcccaaactggtcagcgctgaagtacgccggactccagggactgatgagcgtgttggcggaaatccggccaaagaatgacttgggccacccattttgcaataatctgagaagcggagattggatgatcgattacgtctccaaccgtctgatctccagatccggtactattgctgaagtcggaaagtggctgcaagctatgttcttttacctcaagcagattccgagatacctgatcccatgctactttgacgcaatcctcatcggagcttacactactctgctggatactgcctggaagcaaatgtcgtcgttcgtgcagaacggatcaactttcgtcaaacacctgtccctcggctcggtgcagctgtgcggcgtgggaaagttcccgagcctgccgatcctgtctccagcgttgatggacgtcccgtatcgcctcaacgaaatcactaaggagaaagaacagtgctgcgtatcgttggcggcaggactgcctcacttctcttccgggatttttcggtgctggggccgggacacctttatcgccctgcgcggcatcctgcttatcaccggacgctacgttgaagccagaaacatcatcctggcttttgccgggaccttgcggcacggattgatcccgaacctgctgggcgaaggcatctacgctagatataactgtagggacgccgtctggtggtggctccaatgtatccaagactactgcaagatggtgcccaacggtctggatatcctcaagtgtccagtgtcgcggatgtacccgaccgacgactccgctcctttgcctgccggaactcttgatcaacccctcttcgaggtaattcaggaagcgatgcaaaaacacatgcagggcatacagtttcgcgaacggaacgctggcccccagatcgacaggaacatgaaggatgaaggcttcaacatcaccgcgggagtcgatgaggagactggtttcgtgtacggagggaatcgattcaattgcggtacctggatggacaagatgggagaatcggaccgggcccgcaatcggggaatccccgcgactccgcgcgacggttcagctgtggaaatcgtgggactctcgaagtccgcggtgagatggttgctggaactgtcaaagaaaaacatcttcccttaccacgaagtgactgttaagcggcatggcaaggctatcaaagtctcgtacgacgagtggaatcgcaaaatccaggacaatttcgaaaagctgttccacgtctcggaggatccgtcggacctcaatgagaaacacccaaatctcgtccataagagaggcatctataaggattcatacggagcgagctcgccatggtgcgactatcagctgcgaccaaacttcaccatcgccatggtggtggccccagaactcttcaccaccgaaaaagcctggaaggcactggagatcgccgagaagaaactcctcggccccctgggaatgaaaaccctggacccagatgatatggtgtactgcggcatatacgacaacgccctggataatgacaattacaatcttgccaaaggattcaactaccatcaaggaccggagtggctttggccaatcggctacttcctgagggcaaaactctacttttcacggctcatggggcctgaaacgaccgctaaaaccatcgtgttggtgaagaatgttctgagccggcactacgtgcacctggagcgatccccttggaagggactgccggaattgaccaacgaaaacgcgcagtactgcccgttctcctgcgagactcaggcatggtcgatcgcaactatcctcgaaaccctgtacgacctc

SEQ ID NO: 6056 - DNA, 4596 bp, synthetic construct
  misc_feature 1..4596: note = source = /note="Description of Artificial Sequence: Synthetic coding sequence"
  source 1..4596: mol_type = other DNA
atgggacacagtaagcaaatccgcatcctcctcctcaacgaaatggagaagctggaaaagaccctgttccggctcgaacaagggtacgagctccagttcaggctgggaccgacccttcagggaaaggccgtgactgtgtacaccaattacccgttcccaggagaaactttcaaccgggagaaattcagatcgctcgattgggagaatccgaccgaacgcgaagatgactcggacaaatactgtaagctcaacctgcaacagagcggctcgttccaatactacttcctgcagggcaatgaaaagtcgggaggtgggtacatcgtcgtcgacccgatccttcgggtcggcgcggacaaccacgtgctcccgctcgattgcgtgaccctgcaaacttttttggccaagtgcctcggacccttcgatgaatgggaaagcaggcttcgcgtggccaaggagagcggctataacatgatccactttaccccgctgcagaccctcggactctcgcgctcgtgctatagcctcgcgaaccaactcgaactcaacccagacttcagccgaccgaatcgcaagtacacctggaacgatgtggggcaactggtggagaagctgaagaaggaatggaacgtcatctgcatcaccgatgtggtgtacaaccataccgctgctaactccaagtggattcaggagcatccagaatgcgcatacaacctggtgaacagcccacacctgaagcctgcctgggtgctcgacagagccctgtggcgcttctcatgcgatgtggctgaaggaaagtacaaagagaagggaatccccgccctcatcgaaaacgaccaccatatgaactccattcgcaagatcatctgggaggatatcttccctaagttgaagctgtgggagttcttccaagtcgacgtgaacaaggcagtggaacaattccgcagacttttgacgcaagagaatcgccgcgtgaccaagtcggacccgaaccagcacctgaccatcattcaagaccctgaatatcgcaggttcggatgtactgtcgatatgaatatcgccctgactaccttcatcccacacgacaagggaccggcggctatcgaggagtgttgtaactggttccacaaaagaatggaggagctgaactccgaaaagcaccgtctgatcaactaccatcaggaacaggcggtgaactgcctcttgggcaatgtcttttacgagcgcctggcgggccacggcccgaaacttggtccagtgacgcggaaacaccccctggtcacccgctacttcaccttcccgttcgaggaaatcgacttctccatggaggaatctatgatccatctgccgaacaaggcttgcttcctgatggcacacaatggctgggttatgggagacgatccgctccgcaacttcgccgagccaggatcagaggtctacctgcggcgggaactcatttgctggggtgactcggtcaaactgcggtacggtaacaagcccgaagattgtccctatctgtgggcacatatgaaaaagtacaccgagatcactgcaacctattttcaaggcgtgcggctggacaattgtcactcaacgccactgcatgtcgcagagtacatgctcgatgccgcgcgaaatctccagccaaacttgtacgtggtggccgaactctttaccggaagcgaagatcttgacaacgtgttcgtcactcgcctcggaatctcaagccttattagagaggcgatgtcagcgtacaattcgcatgaagaaggccggctggtgtaccgctatggaggtgagccagtcggtagctttgtgcaaccgtgcttgcggccactcatgcctgcaatcgctcacgccctgttcatggacatcacccatgacaacgagtgcccaatcgtgcaccggtcggcttatgacgccctgcctagtaccactatcgtgtcgatggcatgctgtgctagcggaagcactcgcgggtacgacgaattggtcccgcatcaaatcagcgtcgtgtccgaggagagattctatactaagtggaacccggaagcccttcctagcaacactggggaagtgaatttccagtcgggcatcatcgcggcccgctgcgcgatttcgaagctccaccaggagctcggcgcgaaaggctttattcaggtctacgtggaccaggtggacgaggacatcgtggccgtgacccgccactcgccgtctatccatcagagcgtggtggcagtgtcccggaccgctttcagaaacccaaagacttctttctacagcaaggaagtgccgcagatgtgcattccgggaaagatcgaagaagtcgtcctcgaggctcggactatcgaaagaaacaccaagccgtacagaaaagacgagaactccatcaatggaaccccggatatcacggtcgagatcagagagcacatccagcttaacgaatcgaagattgtgaaacaagccggagtggccaccaagggcccgaacgagtacatccaggagatcgaattcgagaacctctcaccgggatcggtgatcatcttcagggtgtcgctcgatccacacgcgcaagtggccgtcggcatcctgcggaatcacctgacgcagttctccccccatttcaaatccggaagcctggctgtggacaatgctgatccaatcctgaaaatcccgttcgcatccctcgcctctaggctgaccctcgcggagctgaaccaaattctctaccgctgtgaatcagaggagaaggaagatggcgggggctgctacgatatccctaattggtctgcactgaagtacgcgggtctgcagggacttatgtcagtactggcagagatccgccctaagaacgacctggggcaccctttttgtaacaatctgcggagcggcgattggatgatcgattacgtgtcgaaccggctcatctcccggtcgggcaccatcgcagaagtgggaaagtggcttcaagccatgttcttctacttgaaacagatcccacgctacctgatcccatgttacttcgatgccattctcataggggcatacactaccctgctggacactgcgtggaagcagatgtcgtcctttgtccagaatggaagcacctttgtgaagcacctctcgctggggtccgtgcagctgtgcggagttggcaaatttccatccctgccaatcctctcaccggccttgatggacgttccttatcggcttaatgaaatcactaaggaaaaggagcaatgctgcgtgtcactggctgcaggactgcctcactttagctccggcattttcaggtgctggggccgggataccttcatcgccctgcgcgggatcctgctgatcaccggacgatatgtcgaggcccggaatatcatcctcgccttcgctgggacgctcagacacggactcatccccaacctgctcggagaaggtatctacgcgagatacaattgccgcgacgccgtgtggtggtggctgcagtgcatccaggactactgcaagatggtgcctaatggtctggatatcctcaagtgtccggtgtcgagaatgtacccaactgacgattctgccccgctgccggctggcaccctggaccaaccgctcttcgaggtcatccaggaggccatgcagaaacacatgcaaggcatccagtttcgggaacgcaacgctggcccgcaaatcgaccggaatatgaaggatgaaggattcaacatcactgcaggcgtggatgaagagactggattcgtgtacggaggaaaccgcttcaattgcggaacttggatggacaaaatgggcgaatcggaccgcgcgaggaaccggggcatccctgccactccgcgggatggatcggctgtggagattgtggggctgtccaaaagcgccgtccgctggctgcttgagctgtcaaagaagaatatcttcccgtaccacgaagtcaccgtgaagagacatggcaaagctatcaaggtttcgtacgacgagtggaacaggaaaattcaggataacttcgaaaagctgttccacgtgagcgaggatccgtcggacctgaacgagaagcatcccaacctcgtgcacaaaaggggaatctacaaagactcctacggggcatcaagcccgtggtgcgactaccaactgcggccgaacttcactatcgctatggtcgtcgcgccggaactgttcaccactgagaaagcctggaaggctctcgagattgcggaaaagaagctgttgggtcctttgggaatgaaaaccctcgatccagatgacatggtgtactgtggaatctacgacaatgccctggacaacgacaactacaatctcgccaaaggcttcaattaccaccagggaccggagtggttgtggccaatcgggtacttcctgcgtgctaagctctatttcagccggcttatgggacctgagactactgcaaagaccatcgtcctggttaagaacgtcctcagcagacattacgtgcacctggaacgctcaccgtggaagggtttgcctgaactgactaatgaaaacgcccagtattgtccgtttagctgcgaaacccaagcatggtctatcgccacgatcctcgaaaccctctacgacttg

SEQ ID NO: 6057 - DNA, 4596 bp, synthetic construct
  misc_feature 1..4596: note = source = /note="Description of Artificial Sequence: Synthetic coding sequence"
  source 1..4596: mol_type = other DNA
atgggccatagcaagcagattcgcatactgctgctcaacgaaatggaaaaactcgaaaagaccctcttccgtcttgaacaagggtacgagctgcaatttaggctcggtcccactctgcaggggaaggccgtcactgtctacacgaactacccgttccctggggaaacttttaaccgcgaaaagtttcggtcccttgattgggagaaccctaccgagagagaagatgactcagacaagtactgtaaacttaacctgcaacaatccggcagcttccagtactactttcttcaaggtaatgaaaaatccggcggcggttacatcgtcgtggacccaatcctgcgtgtgggagcggataatcatgtgttgccacttgactgtgtcacgctccagaccttccttgccaagtgcctcggcccatttgatgaatgggaatcaaggttgagagtggcaaaggagagcgggtacaacatgatccattttactccattgcaaactctgggactttcgaggtcgtgctacagcctggccaatcagctggaacttaaccctgatttctccaggccaaaccgcaaatacacgtggaatgatgtcgggcaacttgtggaaaaactgaagaaggagtggaacgtgatctgtattaccgatgtggtctacaatcataccgcagccaactccaagtggatccaagaacatcctgagtgtgcatacaacctggtcaatagcccacaccttaagccagcctgggtgcttgatagggcactctggcggttctcatgtgatgtggcggagggtaagtacaaggagaaggggatcccagcgcttatcgaaaatgaccaccacatgaattcgatacgtaagatcatttgggaggacattttcccaaagctgaaactttgggaattctttcaggttgacgtgaacaaagcagtcgaacagtttagacgcctgctgacccaagaaaaccggagagtcaccaaatcggatcctaatcagcatctgactatcattcaagatccagaatacagacgcttcggctgtaccgtcgacatgaacatagccctgactactttcattcctcacgacaagggtccggccgccatcgaggagtgttgtaactggttccataaaaggatggaagagcttaactcggagaagcatcgcctgattaactatcatcaagaacaggcagtcaactgcctccttggtaacgtgttctatgaaagattggcagggcacggtcccaaactgggacccgtgactcggaagcaccctctcgtcacccgatactttacctttccatttgaggagattgatttttccatggaggaatcgatgatccatctgcccaataaggcatgtttcctcatggcccataacgggtgggttatgggagatgatcctctgaggaactttgcagaacctgggtcagaagtgtaccttcgcagagaactgatctgctggggggattccgtcaagctgcgctacggaaacaagcctgaagattgtccatacctttgggcacacatgaagaaatacactgagattaccgcaacctactttcaaggagtcaggctggacaactgccactccacccctctgcacgtcgcagagtatatgctggatgccgcaagaaacctgcagcctaatctgtacgtggtggcggagctctttaccggttccgaagatcttgataatgtgtttgtgactcgcttgggaatctccagcctgatccgtgaggcaatgtccgcatacaattctcatgaagaaggtcgccttgtgtacagatatggaggagagcctgtcggatcattcgtgcaaccttgtctccggcccctgatgccggcgatagcacatgcgctgtttatggatattacccacgataacgagtgtcctattgtgcatcgctctgcatacgacgcacttccttccaccactatagtcagcatggcctgttgtgcgtcgggcagcacccggggttacgacgaacttgtgccgcatcagatttcggtggtgagcgaagaaagattttacaccaagtggaatcctgaggcccttccttcgaacactggagaggtcaatttccagtcggggataattgctgcgcggtgcgcgatctccaaacttcaccaggaactgggtgcaaagggattcatccaggtgtacgtggatcaggtggacgaggatatcgtggccgtgacccggcattccccaagcatacatcaaagcgttgttgcagtctcacgtactgcatttcgcaaccctaagacctcgttctactcgaaagaggtgcctcagatgtgcattcccgggaaaatcgaagaggtggtgcttgaagcacgcactatcgaacgcaatacgaagccataccggaaggatgaaaactcgattaatggaacgccggatataaccgtcgaaatccgggaacatattcaactgaacgaatccaagattgtcaagcaggcaggggtggcaactaagggaccgaacgaatacattcaggaaatcgaattcgaaaatctttcacccgggagcgtaatcatctttagggtgtccctggacccccatgcacaggtcgccgtggggatcctgcgtaatcaccttactcaattctcacctcactttaagtcaggatctcttgctgttgacaacgcagatccgatccttaagattcccttcgcatcacttgcatcccgcctgaccttggcggagctgaaccagattctttatcggtgtgaatccgaagaaaaggaagatggaggtggttgttatgacattcctaattggtccgccctgaaatacgcaggtctgcaggggctgatgtctgtgctggccgagataagaccgaagaatgatctgggtcatcctttttgtaacaatctgcgttcgggagattggatgattgactacgtctcaaaccgtcttatttcgcggtcaggaaccattgccgaagtgggaaaatggcttcaggctatgttcttctaccttaaacaaattccaagatacctcatcccctgctattttgatgctattctgattggcgcatacactaccctcctggataccgcttggaagcaaatgtcctccttcgtccaaaatggtagtactttcgtgaagcatttgtcgctcggatcagtccaactgtgtggcgtgggcaagtttccatcgctgcccatcctgtcgcccgcattgatggacgtgccgtatagactcaatgaaattaccaaggaaaaggagcagtgttgtgtctcgctcgcagcagggctgccacatttcagctcaggaatattcaggtgttgggggcgagacactttcattgccctgagaggaattctgcttattaccggacgctatgtggaagccaggaacattattctcgcattcgcaggaactttgcgccatgggctgattccaaacctccttggtgagggaatttacgcaagatacaactgccgcgacgccgtgtggtggtggctgcaatgcattcaggattactgcaagatggtgcccaacggtctggacattctgaagtgtccggtgtcacggatgtaccctactgatgattccgcaccactcccggccggaactctggaccagccactgttcgaagtgatccaagaagcaatgcagaaacacatgcaaggtattcagtttagagagcgcaatgcaggaccgcagattgatcgcaacatgaaggatgaaggctttaacattaccgccggggtggacgaagagactggattcgtgtacggagggaaccgattcaattgcgggacctggatggataagatgggcgaatcagaccgcgcccgcaatcgaggcatcccggccacccctagagatggttcggccgtcgaaattgtgggcctcagcaaatccgcggtgcggtggctcctggaactttcgaagaagaacatttttccttaccacgaagtgactgtgaagcgacatggaaaggcgattaaggtttcctacgacgaatggaatcgtaagattcaggacaacttcgagaaactctttcatgtctccgaagatccatcggatctgaatgagaaacacccaaaccttgtgcacaaacggggaatctataaggactcttacggcgcatcgagcccatggtgtgattaccagcttcggcccaacttcactattgcaatggtggtcgcccccgagttgtttaccacggaaaaggcgtggaaggctctggaaattgcagagaaaaaacttctgggtcctctcggaatgaaaacgcttgatccagacgacatggtgtactgtggaatttacgacaacgcgctcgataacgacaactacaacctggcgaaggggtttaactaccatcaggggcctgaatggctgtggccgattggatactttttgagagcaaagctctacttttccagactgatgggaccagaaaccactgccaagaccattgtgctggtgaagaacgtgcttagccgtcactacgtgcatcttgaacgctcgccctggaaaggactgcctgagctcaccaacgagaatgcgcaatactgtcctttcagctgtgaaactcaggcgtggtccattgccaccatcctcgaaacgttgtacgacctg

SEQ ID NO: 6058 - DNA, 4596 bp, synthetic construct
  misc_feature 1..4596: note = source = /note="Description of Artificial Sequence: Synthetic coding sequence"
  source 1..4596: mol_type = other DNA
atggggcacagcaagcagatcaggatcctcctgctgaacgaaatggaaaaattagagaaaacattattccgtctggagcaaggatacgaactccagttccgcctcggacctacgctccaagggaaggctgtgactgtctacactaattacccattccccggagaaacattcaatcgggagaagtttcggtcattagattgggagaaccctactgagagggaggatgatagtgacaagtactgtaagcttaatttgcaacagagcgggagctttcagtattacttccttcaggggaacgagaaaagtgggggtggctatattgtggtcgatcctatcctccgggtcggtgctgataaccacgttctgccactcgactgtgtcaccctgcagacctttttggctaaatgcttgggcccattcgatgagtgggaatccagactgcgcgtggccaaggagagcgggtacaacatgatccatttcacgcccctgcagacactgggtctgtcgaggtcttgttatagtctggccaaccagcttgaactaaacccagatttctcaaggccaaaccggaagtacacttggaacgacgttggacagttggtggaaaagcttaagaaggaatggaatgttatctgcatcacagatgtcgtatataatcacacagccgctaactccaagtggatccaagagcaccctgaatgcgcgtataatttggtcaactcaccccacctgaaacctgcatgggtactggaccgcgccctttggcggttcagctgtgacgtagcggaaggaaagtacaaggaaaagggaatcccagcactgatcgaaaatgatcaccacatgaacagcattcggaaaataatctgggaagacatttttccaaaacttaagctgtgggaattcttccaggtcgacgtcaacaaagccgtcgaacagttcagacgcctactcactcaggagaaccgccgggtcaccaagtctgatcccaatcagcacctgaccattatccaagatccggaataccgccggttcgggtgtacagtagacatgaacattgctctgactacattcatccctcatgacaaggggcctgccgccatcgaggagtgctgcaactggttccataaaagaatggaggagctgaactctgagaaacatcgcctcattaattaccaccaggagcaggctgtgaactgtttgctggggaatgtgttttacgaaagactggccggccacggccccaagttgggccccgttactcgtaagcacccacttgtgactcggtatttcacctttccgttcgaggaaatagatttttccatggaggaatcaatgatccaccttcccaataaagcctgtttcctgatggcccataacggctgggtgatgggcgacgacccgctccgaaatttcgccgaacccggctctgaagtctaccttcgacgcgagctgatttgttggggagacagcgtaaaattacggtacggcaataagccagaggactgtccttatctgtgggcgcacatgaagaagtataccgagatcacggcgacttatttccagggtgtccggttagacaattgtcatagtactcctctgcacgtggccgagtacatgctggacgccgccaggaatctgcaaccgaacctgtatgtggtggcagagcttttcacaggctcagaggacttagacaatgtcttcgtgacacgcttgggaatcagctccctcatccgcgaagcaatgtctgcatacaactcacatgaggaggggagattagtatacaggtatggaggcgagcccgtggggagctttgttcagccatgcctcaggcccttaatgcccgcaatagcccacgccctgtttatggacatcacgcacgataatgagtgccccattgttcaccggagcgcttatgacgctctgcccagtaccactatcgtgtctatggcctgctgtgcttcagggtccaccagagggtatgatgagctggtccctcaccaaatcagcgttgtgagcgaagaacgcttctacactaagtggaatccagaagccctgccgtctaatacgggcgaagtcaacttccagagcggaattatcgccgcccgttgcgcgatatctaaattgcatcaggagcttggagctaaaggtttcatccaggtttacgtagatcaggtcgatgaggacatagttgcagtgactcgacacagccccagcattcaccagtcagttgtcgcagtctcccgcacagcatttagaaatccaaaaacgtccttctactcaaaggaggtcccacagatgtgtatccccggcaaaattgaggaagttgttctggaggctcggacgatagagcggaacacaaagccatatagaaaggatgaaaactccatcaacggtacaccagacataaccgtggaaatccgggaacacatccagctcaatgaatccaagatagtaaagcaggccggagtcgcgactaagggacccaacgagtacatccaggagattgagtttgagaacctctcgccaggctcggtaataattttccgagtctccttggacccgcatgctcaggtggccgtggggatcctcagaaaccatctgactcagttctcgccccatttcaaatccgggtctcttgccgtggacaatgcagaccccatcttaaagattccatttgcctccctcgccagtcgactgacccttgcggaactaaatcagatcctgtaccggtgcgaaagcgaggagaaggaggacggtggcggatgctatgatatacccaactggtccgctctcaaatatgcaggactccaggggttaatgagtgtcttggccgagattagaccaaagaacgatctggggcacccattttgcaacaatctgaggtctggagactggatgatcgactacgtaagcaaccgtctgatcagtagatccggtacaatcgcagaagttggaaagtggttgcaggccatgttcttctatttgaagcaaattccaaggtacttaatcccttgctactttgatgcgatcttgatcggagcctacaccaccctactggacaccgcttggaaacagatgtcctcattcgtgcagaacggcagcacttttgtgaagcacctttcactcgggtctgttcagctctgtggtgttggaaaatttccttcgctgcctatcttatcccctgctctcatggacgtcccatatcgtctgaacgagatcaccaaggaaaaggaacagtgctgcgtgtccctggccgctggactaccccatttttcatccgggatattccggtgttggggtagggatactttcatagccctgcgtggcatcctgctcataactggccggtacgtcgaagctcggaatataattcttgccttcgccggtactctaagacacggactcatcccaaacctgttaggcgaggggatttatgctcgttacaactgtagagacgctgtgtggtggtggttacagtgcattcaggactactgcaaaatggtgcctaacgggctggacattttgaagtgccccgtgtcccgcatgtaccctaccgatgattctgctcccttaccagccggcaccctggaccaacctctttttgaagtgatccaggaagctatgcagaagcacatgcagggcatccaatttcgcgaaagaaatgccggcccccagatcgacaggaatatgaaggacgagggctttaacataacagctggtgttgatgaggagactgggtttgtttatggggggaacagatttaattgtgggacttggatggacaaaatgggggagagtgaccgagctcgaaaccgaggtattcccgccacccccagagatggatcagccgttgagatagtggggttatccaagtcggccgttcgatggctgttggaacttagcaagaaaaacatctttccctaccatgaggtgacagtcaaaaggcacgggaaggccattaaagtcagctacgatgagtggaatcgaaaaatccaagataatttcgagaaactatttcacgttagtgaggacccctctgaccttaatgagaagcatccgaacctcgttcataagagaggcatttacaaggattcttacggcgcatcttcaccatggtgcgactatcagctgcgaccaaattttactattgccatggttgtggcaccagagctctttaccaccgaaaaagcttggaaggccttggagatcgctgagaaaaaactcctcgggcctttgggaatgaagaccctggatcccgacgatatggtctattgtggaatctacgataatgcattggacaatgacaattacaacctggctaaaggctttaattaccaccagggcccagagtggctgtggcctatagggtactttttaagggccaagctgtactttagcagactaatggggccggagactacagctaaaaccattgttttggtaaagaatgtgctttcaagacactacgtacatctggagagatctccctggaaagggctgcccgaactgacaaacgaaaatgcgcagtactgcccttttagttgtgagacccaggcttggagtatcgcaaccatccttgaaactctctatgatctt

SEQ ID NO: 6059 - DNA, 4596 bp, synthetic construct
  misc_feature 1..4596: note = source = /note="Description of Artificial Sequence: Synthetic coding sequence"
  source 1..4596: mol_type = other DNA
atgggccatagtaagcaaataagaattcttctccttaatgagatggaaaagctcgagaaaactctttttagactggaacaagggtacgagctgcaattccgcctggggcctactcttcaagggaaggcagtcaccgtgtacactaactacccttttcccggtgaaacttttaaccgagaaaagtttcggtcgttggattgggaaaatccaaccgaaagagaggacgactcggacaaatactgcaaacttaacctccagcagtcagggtccttccagtattactttctgcaagggaacgagaagtcgggaggagggtacattgtcgtggatcctatattgcgagtcggcgcagataaccacgtgttgcctctggattgtgtgactctccagactttcctcgcaaagtgcctggggccttttgatgaatgggagtcgcggcttcgggtggccaaggagagcggctacaatatgattcatttcaccccccttcaaactctcggcctttcacgatcatgttactcgctggcaaaccaactcgagctgaacccagatttttccaggcctaaccgcaagtacacctggaacgacgttggacaactggtcgaaaagttgaagaaagaatggaatgtcatatgtattactgacgtcgtgtacaaccataccgcagccaattcaaagtggattcaagaacatccagaatgcgcctacaacctggtgaactcaccacacctcaaaccggcgtgggtcttggaccgcgcgttgtggcgcttttcgtgcgacgtcgccgaagggaaatacaaggaaaagggtatccctgcacttatcgaaaacgatcaccatatgaattcgatccgaaagatcatttgggaggacatctttccaaagctcaagctgtgggagtttttccaggtcgacgtgaacaaagctgtggagcaattccggcgcctgctcactcaggagaaccgacgcgtcaccaaaagcgacccaaaccaacacctgactattatccaagatccggaatacagaaggttcgggtgtaccgtggatatgaacatcgcacttactacctttatcccacatgataagggcccagccgccattgaggagtgctgtaactggttccataagcggatggaagaactgaacagcgagaagcaccgactcattaactatcatcaggaacaagctgttaattgtttgcttggaaacgtgttttatgaacgccttgcaggccacggtccgaaacttggtcccgttacgcgcaagcaccccctggtgacgcgctactttaccttcccattcgaagaaattgactttagcatggaggaatcaatgatacacctgcccaacaaggcatgctttctgatggcccataacggatgggtgatgggtgatgatcctctgcgcaactttgcggaaccaggttcggaagtctaccttcgccgcgaacttatctgctggggtgattcagtcaagctgagatacggcaacaagcccgaagattgcccttacctgtgggcccatatgaagaaatacaccgaaattaccgcaacctactttcagggagtccgactggacaactgccatagtactcctctgcacgtggctgagtacatgctggacgcagcacggaatttgcaacctaacctctacgtcgtcgccgagctgtttactggatccgaggatctggataacgtgtttgtcactagactcggaattagctcactgatccgtgaagcaatgagcgcttacaattcacatgaagaaggacgtcttgtgtacagatacggcggtgaacctgtgggctcattcgtccagccatgcctccgccctctgatgcccgcaatagcacacgcgcttttcatggatattactcacgacaatgagtgtcccattgtccatagaagcgcatacgacgcacttccatcgaccaccatcgtgtccatggcatgttgtgcttcgggatcgacccgcggatacgatgaactggtgcctcatcagatatccgtggtgagcgaggagcgcttctatactaagtggaatccggaagctctcccttcgaatacgggtgaggtgaatttccaatccggtattatcgcagcaagatgtgccatctccaagctgcaccaggagcttggcgcgaaaggttttatccaggtgtacgtcgaccaagtcgatgaagatattgtggcagtgacccgccattcaccaagcattcatcagagcgtggtggcagtgtctcgaaccgcattccggaaccccaaaacttcgttttactccaaagaggtgccccagatgtgcatcccgggaaagattgaagaggtcgttctggaagcacggaccattgaacgaaacactaagccataccgtaaggatgaaaactcaattaacggtacccctgatataacggtggaaattcgcgagcatattcaattgaacgaatccaagatcgtgaaacaagcgggcgtggccactaagggccctaacgagtatattcaggaaatcgagtttgaaaatctttcgccaggtagcgtgatcattttcagagtgtcacttgatccacacgcacaggttgccgtgggaattctcagaaaccacctgacccaattctcgccccatttcaagagcggatcacttgcagtggataatgccgatccaattctcaaaattccattcgcatcgcttgcatcaaggctgaccttggcagagctgaaccagattctgtaccggtgtgaaagcgaggaaaaggaagatggaggcggttgttacgacatccctaattggtccgcgctgaagtacgcaggactgcaaggccttatgtcggttcttgctgagattaggcctaagaacgatctcggacatcctttctgtaacaatttgagatccggcgattggatgattgactacgtgtccaaccggctgatttctcggagcggaaccatagcggaagtcggaaagtggctgcaggcaatgtttttctacctgaaacagatccccaggtacctgattccatgttactttgacgccatcctgatcggggcctacacgactcttctggataccgcgtggaaacaaatgtcctcctttgtgcagaacggatcgacttttgtgaagcacctttcactcggaagcgtccaactgtgtggagtcggaaagtttcccagccttccaatcctctccccagctcttatggatgtcccctaccgattgaacgagattactaaagagaaggagcagtgctgtgtgtccctggccgctggcctgccacatttctcgtcaggcattttcaggtgctggggccgcgatactttcatcgcactcagagggatactcctcatcacgggacggtacgtcgaggctcgtaacattatcttggcctttgcaggtaccttgcgccacggacttatccctaatctgcttggagaaggtatttacgcgagatataactgtcgtgacgcagtctggtggtggctgcagtgtattcaagactactgtaaaatggtcccaaatggacttgatatccttaaatgcccggtgtcgcggatgtatccgaccgatgactcggcgccactgccagcgggaactctggatcagcctctttttgaagtcattcaagaagcaatgcagaaacatatgcaagggatacaattccgtgaaagaaacgcgggaccccagatagatcgcaacatgaaggatgaaggcttcaacattaccgcaggtgtggatgaagagactggatttgtgtacggtgggaacagattcaactgtggtacctggatggataagatgggcgaaagcgatcgggcccggaatagaggtatcccggcgaccccgagggatggcagcgccgtggaaatagtcggccttagcaagtcagcagtgagatggcttcttgaactgagcaagaagaacatcttcccctaccatgaggtgaccgtgaagcggcacggtaaggccataaaagtgtcctacgatgaatggaaccggaagattcaggacaattttgagaaactgtttcatgtctccgaggacccatctgatctcaacgaaaagcaccctaacttggtgcacaagagaggtatttacaaggacagctacggcgcttcgtcgccttggtgcgattaccaacttagaccaaacttcaccatagcaatggtggtcgcacctgagcttttcactactgaaaaggcctggaaagcactcgaaattgctgagaagaaacttttgggaccactcggtatgaaaacgctcgaccccgacgatatggtgtattgcgggatttatgacaatgccctggataacgacaactataatctcgctaagggcttcaattaccaccaggggcctgagtggctttggccgattggatactttctgagagcgaagctgtacttttcgcgactcatgggtcctgaaaccaccgcaaagaccatagtgcttgtaaagaacgttctgtcgcgccactacgtgcatctggaaagatcgccatggaaaggccttccggagttgacgaatgagaatgcgcaatactgtcctttttcttgtgaaacccaagcatggtcaattgccactatcctcgagactctttacgatctt

SEQ ID NO: 6060 - DNA, 4596 bp, synthetic construct
  misc_feature 1..4596: note = source = /note="Description of Artificial Sequence: Synthetic coding sequence"
  source 1..4596: mol_type = other DNA
atgggccactccaagcaaattaggatccttcttctcaacgaaatggaaaagctggaaaagaccttgtttcgacttgagcaagggtacgaacttcagttcagactgggacctacccttcagggtaaagcggtgaccgtgtacacgaactacccgttcccaggagaaaccttcaatcgcgagaaatttcggagcctcgactgggaaaacccaaccgaaagggaggacgattcggacaagtactgcaaacttaaccttcaacagagcggatccttccaatactattttctccaaggcaatgaaaaatcgggagggggatacattgtggtggatccgattttgcgtgtcggagccgataaccatgtgctgccactggactgtgttaccttgcagactttcctcgcaaaatgtctgggaccatttgatgaatgggagagccggctcagggtggcgaaggaatccggatacaatatgatccacttcacgccgctccaaacccttggactcagccggtcttgttactcgctcgcaaaccaattggagctgaatcctgacttttccagacccaataggaagtacacgtggaacgatgtcggacaactggtcgagaagctcaagaaggagtggaacgtcatttgtataactgatgtggtgtacaatcacactgcagcaaactcaaagtggatccaagagcacccagagtgtgcctataacctggtgaactccccccatctcaagcctgcgtgggtcttggatcgagcgctgtggcgctttagctgtgacgtcgcggagggaaagtataaagaaaagggcattccagcacttatcgagaacgaccatcatatgaactcgatccgcaagatcatctgggaggatatcttcccaaagttgaagctgtgggaattcttccaggtggatgtgaataaggcagtggaacaatttcgacgactgcttactcaggagaacagaagagtcactaagtctgatccaaaccaacatctcaccataatccaagatcctgaatatagacggtttggatgtactgttgatatgaacatcgcgctcaccacctttattccccatgataagggtccagcagcgattgaagaatgctgcaactggtttcataaacggatggaagaacttaactcagaaaaacatcgcctgataaactaccatcaagaacaagcagtcaattgcctgctcggcaatgtgttttacgagagactcgctgggcacggacctaagttgggacccgtgacccgaaaacatcctcttgttacccggtacttcactttcccttttgaagaaatcgacttttccatggaagaatctatgatccaccttccgaacaaggcatgctttctgatggcacataacggctgggtgatgggtgacgacccgctgcggaactttgcagagccagggtcggaagtgtacctgcgccgtgaactgatatgttggggcgactctgtgaagctgagatacggtaataagccagaggactgtccttacctgtgggcacatatgaaaaagtacactgaaattacggctacttactttcagggtgtcagacttgataactgccactcaacgccacttcacgtcgcagaatacatgctcgacgcagcaagaaacctgcagccaaacttgtatgtggtcgccgaactctttactggttcggaagatctggataacgtgtttgtgaccagattgggaattagctcgttgattagagaagcaatgtcggcctacaactcacacgaggaaggaaggctggtttaccgctacggtggggaacctgtcgggtccttcgtgcaaccttgccttagacctttgatgcctgcaatagctcatgccttgtttatggacattactcatgataacgaatgtcccatcgtgcaccggtccgcatacgatgccctgccttcgactaccatagtctccatggcatgctgcgcatcggggtcgacccgagggtacgatgaactggtgcctcatcaaatctctgtcgtgtcggaggaacgcttctacactaaatggaacccagaggcactcccatccaatacgggggaggtgaattttcagtcaggaatcattgcagctaggtgcgcgatctcgaagctgcatcaggaacttggtgcaaagggttttatccaggtgtacgtggaccaagtggatgaggatattgttgcagttacccgacattcaccttcaatccatcaatccgtggtggctgtgtcgaggacggccttcagaaaccctaaaacttcgttttactcgaaggaagtgccacaaatgtgcattcctgggaagatcgaggaagtggtcctggaggcgcgcactattgaacgcaatactaagccgtaccgcaaagatgaaaattccattaatgggaccccggacattaccgtggaaattcgggaacacatacaactcaacgaaagcaagattgtgaaacaggcaggcgtcgcaactaaggggcccaacgaatacattcaagagatcgaattcgaaaacctttcgccagggtcggtgattatcttccgtgtgtcgctggaccctcacgcccaggtcgcggtgggaattttgagaaaccatttgactcaattttcaccacactttaagagcggttccctcgcagtggacaacgccgatccaatactgaagatcccctttgcgtcactggcatcgaggcttaccttggcagaactgaaccagatcctttacagatgtgagtcggaggaaaaagaggacgggggtggctgctacgacatacctaattggtcggcgctcaagtacgcagggcttcagggcctgatgagcgttcttgctgaaatccgcccgaaaaacgatcttggacatccattttgtaacaacctcaggtcgggcgactggatgattgactacgtttctaaccggcttatctcccggtccggaactattgcggaagtgggaaaatggctccaagcaatgttcttttaccttaaacagatccctaggtacctgattccatgttactttgatgccattttgattggagcatacactactcttcttgataccgcttggaagcaaatgtcatcgtttgtgcaaaatggcagcacctttgtcaagcatctgagcctgggctctgtgcagctgtgcggtgtgggtaagtttccatccctgcctatcctctcgcctgcattgatggatgtcccttaccggcttaacgaaatcaccaaggaaaaggagcagtgttgcgtgtcactggccgcaggtctgccccacttttcctccggaatattcagatgctggggacgggacaccttcattgcccttaggggaattctgctgattaccgggaggtatgtggaggcaagaaacattattctggcatttgcaggaaccctgagacacggcctgattccgaaccttctcggagaaggaatttacgctagatacaattgcagagatgcagtgtggtggtggcttcaatgtatccaagattactgtaagatggtgcctaacgggttggatatactgaagtgccccgtgtcgcggatgtacccaactgacgatagcgcgcctcttcctgcaggtactctggatcaacctctgttcgaagtgatccaggaagcaatgcaaaaacacatgcagggcatacagttccgggagagaaacgcaggcccacaaatagatagaaacatgaaagacgagggcttcaacataactgcaggtgtggacgaggaaaccggctttgtgtacggggggaaccgttttaactgcggtacctggatggataagatgggtgaatcagatcgggctaggaatcgcggtataccggcaaccccccgtgacggtagcgcagtggaaattgtcggactcagcaaatcagcagtgcggtggcttttggagctctcgaaaaagaacatatttccttaccatgaagtcaccgtcaaaagacatggaaaggccataaaggtgtcgtacgatgaatggaatcgcaagatccaggacaattttgagaagctctttcacgtcagtgaagatccctcggacctgaatgaaaaacatcctaatcttgtgcataaacggggtatttacaaggactcctacggagcaagctcgccatggtgtgattatcagctgcggccaaatttcactattgcaatggtcgtggcacccgagctgtttaccactgaaaaggcctggaaggcactggaaattgcagagaaaaagctcctgggaccactgggaatgaaaactcttgatccagatgatatggtctattgtgggatttacgacaacgctctcgataacgataactacaacctggcaaaaggctttaactaccaccagggacctgagtggctgtggcctattggctactttctgagggccaagctgtactttagcagacttatgggacctgaaactacggcgaaaactatcgtgttggtgaagaatgtgctgtccagacattacgtgcatctggaaagatcgccttggaagggtctgcctgaacttaccaatgaaaatgcacagtattgccctttctcatgcgaaactcaagcatggtcaatcgcgaccattcttgaaaccctgtacgatctc

SEQ ID NO: 6061 - DNA, 4596 bp, synthetic construct
  misc_feature 1..4596: note = source = /note="Description of Artificial Sequence: Synthetic coding sequence"
  source 1..4596: mol_type = other DNA
atgggccacagcaagcagatccgcatcttgctcctcaacgaaatggaaaagctcgagaagaccctgttccggctcgagcagggatatgaattgcaatttcggctgggacccactctccagggaaaagcagttaccgtgtacactaactaccccttcccgggtgaaacgttcaacagagagaaattcaggtcgctcgactgggaaaatccgaccgaacgcgaagacgactctgacaagtactgtaagctgaacctccagcagtcgggctctttccaatactatttcctccaaggaaacgaaaagtcgggagggggatacatcgtggtggatccaatcctgagggtgggggcagacaatcacgtgctcccgctggactgcgtgactctgcagaccttcttggcaaagtgcctcggaccgttcgatgaatgggagtcacgactcagagtggcgaaggaatcaggctacaacatgatccacttcaccccgctgcaaaccttgggactgtcacgatcgtgctactcgctcgcgaatcaactggaactgaatccggatttctcccgccccaatcggaaatatacgtggaatgatgtcggacaactcgttgagaaacttaagaaagaatggaatgtgatctgtatcactgatgtcgtctacaaccacaccgcagcaaacagcaagtggatccaggagcatccggaatgtgcctacaacctggtaaattccccgcacctgaaacctgcatgggtccttgacagagccctgtggcggttcagctgcgacgtggcggaaggcaaatacaaagagaaaggaattcctgcgttgatagagaacgatcatcatatgaattccataagaaagatcatctgggaggatatattcccaaagctgaaactgtgggagttttttcaggtggatgtgaataaggccgtggaacagttccgccggcttctgactcaggagaaccgccgggtgaccaagtcagatcccaaccaacatctgaccatcattcaggacccggaatacagaaggttcggatgtaccgtcgacatgaacatagcgctgaccacctttatcccgcacgacaaaggacctgccgctatcgaagaatgctgcaactggttccacaagcggatggaggagttgaactccgaaaagcacagattgatcaactaccaccaggaacaggctgtgaactgtctcctggggaatgtcttttacgagaggttggcgggacacggacctaagctgggccccgtcactcggaagcatccccttgtgacgcgctacttcactttcccgtttgaagagatcgatttttccatggaagaatcgatgatccacctgcctaataaggcttgctttctgatggcccacaatgggtgggtgatgggggatgatcctctccgcaacttcgccgagccaggaagcgaggtgtacctgcgccgcgaattgatctgctggggtgattcggtcaaactgcggtacgggaataagcctgaggactgcccgtacctctgggcccatatgaagaagtacaccgaaatcactgctacctacttccagggtgtaaggctcgacaattgccattcaactccactgcacgtggcagaatacatgctggacgccgcacgcaatctgcagcctaacctctacgtcgtggctgaactctttaccggttcggaagacctggataacgtcttcgtgacgcgcctgggaatctcatcactgattcgggaggccatgtcagcctacaactcacatgaagaggggcgtctggtctacagatatggcggagaacccgtgggctcgttcgtgcagccttgcctccgcccgctcatgccggcgattgcgcacgccctgttcatggacatcactcatgataacgaatgtccaattgtgcaccggtccgcgtacgacgcgctgccatcgacgacgatcgtgtctatggcttgctgcgcgtcgggtagcactaggggatatgacgagttggtgccgcaccagatctccgtggtgagcgaagagcggttctatactaagtggaaccctgaagccttgccatctaacactggcgaagtgaacttccaaagcgggatcatcgctgccagatgcgccatctcgaagttgcatcaggaactgggcgccaagggtttcatccaggtttacgtggatcaagtcgacgaagacatcgtggcagtgacgaggcactcaccctccatccatcagagcgtggtggccgtgagccgcaccgcctttcgcaaccccaagacctctttctacagtaaggaggtgccgcagatgtgcatcccgggaaagatcgaagaggtggtgttggaggcccgcactattgaacgaaacacgaaaccttatcgcaaggatgagaacagtattaacgggaccccggatatcactgtggagatccgcgagcatattcaactcaatgagtcgaaaatcgtcaagcaggcaggagttgctactaagggcccaaacgaatacatccaggagatcgaatttgaaaacctgtcccccgggtcggtcatcatctttagagtctcactcgacccacacgctcaggtggccgtgggcatcctcaggaaccacctgacccagttctcgccgcacttcaagagtggctcgctcgcagttgataatgctgacccgatcctcaaaatcccattcgcctcccttgcctcacgactcactctggcggaactgaaccaaattctctacagatgcgagtcagaagaaaaggaagacggaggcggatgttacgacatcccgaactggtcggcgctgaagtacgccggacttcagggtctgatgagcgtgcttgccgaaatccgcccaaagaacgacttgggacacccgttttgcaacaatctgagatcaggggactggatgattgactacgtgtcaaacagactgataagcagatccggaactattgcagaggtcggaaagtggctgcaagcaatgttcttctaccttaaacaaatcccacgctacctcatcccttgttacttcgacgcaattcttatcggggcctacactactctgctggacaccgcctggaaacagatgagcagcttcgtccaaaatggaagcacctttgtcaagcacctgtcgctgggaagcgtgcagctttgcggagtcggaaaattcccatcactgccgatactctccccggcgctgatggatgtgccttacagattgaacgagatcactaaggagaaagaacagtgttgcgtgtccctcgctgcaggcctgccccactttagcagtggtatctttagatgttggggccgggataccttcatcgcgctgcgcggaatcctgctgatcaccggaaggtacgttgaagcgcggaatatcatcctggcattcgcaggaacgctccgccatggacttatcccaaatctcctgggagagggtatctacgctcggtacaactgccgggatgcagtctggtggtggctccaatgcattcaagattactgtaagatggtgcctaatggcctggacattctgaaatgcccggtttcgcggatgtaccctactgacgattctgccccgctgccagctggtaccctggatcagccgctgttcgaggtcatccaggaagcaatgcagaagcatatgcaaggaattcaattccgggaacgcaatgccggtccgcagatcgatcggaatatgaaggacgaaggattcaacatcactgctggagtggacgaggaaacgggctttgtctacggcggaaaccgttttaactgcggcacgtggatggacaagatgggcgagtccgaccgcgcccggaatcgcggaatcccggcgactcctcgggatggatccgccgtagagatcgtcggtctttcgaagtcggcggtgcgctggctgcttgagctgagcaagaagaacattttcccgtatcatgaggtcaccgtgaaacggcacggaaaggcaatcaaagtctcatacgacgaatggaacagaaaaatccaagataacttcgaaaagctgttccacgtgtctgaagacccgtcagacctgaacgaaaaacatccaaacttggtgcataagagaggcatatacaaagattcgtacggggcctccagcccatggtgcgactaccagcttcggccgaattttacgatcgcgatggttgtggccccggagctgttcaccaccgaaaaagcgtggaaggctctggagatcgcggagaagaagctcttgggacctcttggaatgaagactctcgacccagacgatatggtttactgcgggatctacgacaacgcactcgataatgacaactacaacctggccaagggattcaattaccaccagggcccggagtggctgtggcctattggttactttctcagggccaaactctacttctcccgcctcatggggccggaaactaccgccaagaccattgtgctggtgaagaacgtgttgtcgaggcattacgtccaccttgagcgaagcccatggaaagggctcccggagttgaccaacgagaacgcgcaatactgcccgttctcgtgcgagactcaagcctggtcgatcgctaccatcctggagactctctacgacttg

SEQ ID NO: 6062 - DNA, 4596 bp, synthetic construct
  misc_feature 1..4596: note = source = /note="Description of Artificial Sequence: Synthetic coding sequence"
  source 1..4596: mol_type = other DNA
atgggacactctaagcagatcagaatcctgcttctgaatgagatggagaagctcgagaaaacgctgttccggctggagcagggatatgaactccagtttcggctgggtcctactctgcaagggaaggcagtcaccgtgtacacgaattacccatttccgggggaaaccttcaatcgggagaaatttcgctctctggactgggagaacccaacggagcgggaagatgattccgataagtactgcaaattgaatctgcagcagtccgggagcttccagtactacttcctgcagggaaacgagaaatctggtggtggatacatcgtggtggatccgattctgcgggtgggagccgacaatcacgtcctcccgttggactgcgtcactttgcagactttcttggctaaatgcctgggacccttcgatgaatgggagtcgaggctccgcgtggccaaggagagcggttacaacatgattcacttcactcctctgcagaccctgggactgagtcgtagctgctactcactggccaatcaactcgaactcaacccggacttcagcaggccgaaccggaagtacacctggaatgacgtggggcagctggtcgagaaactgaagaaggaatggaacgtgatttgcatcaccgacgtggtgtacaatcacactgccgctaactccaagtggattcaagaacacccggagtgtgcatacaacctcgtcaattccccacacttgaagcctgcctgggtgctggacagggctttgtggaggttctcgtgtgatgtggcggagggcaagtacaaagaaaagggtatccccgcactcatcgagaatgaccatcacatgaactccattcgtaagattatctgggaggacatttttccaaagctgaagctgtgggaattctttcaagtggacgtcaataaagcggtggagcagtttcggcggctgctcactcaagaaaacagacgcgtgactaagtccgacccgaaccaacacctgaccatcatccaagacccggaatacaggcgctttggatgcaccgtcgacatgaacattgccctgacgaccttcattccgcacgataagggcccggcggccatcgaagaatgttgcaattggttccataaacggatggaggaacttaactcggaaaagcatcgcctgatcaactatcatcaagaacaggcagtgaactgtctgcttggaaacgttttctacgaaaggctcgctggacacggaccgaagctggggccggtcacccggaaacacccgctggtgactagatacttcactttccccttcgaagaaatcgacttttccatggaggaatcgatgattcatctcccgaataaggcgtgctttctgatggcacataacgggtgggtgatgggcgacgacccgctccgcaactttgcggagccaggaagcgaagtttacctgcggagagaactgatctgctggggagactccgtaaagttgagatacggaaataagccggaggactgcccatacctctgggcacacatgaagaagtacaccgagataaccgccacgtacttccaaggagtgagactcgataactgccacagcactccactccatgtcgcagagtacatgttggatgccgcgaggaatctgcaaccgaatctttacgtggtggccgaactgttcacgggatccgaggacctggacaacgtgttcgtcaccagattggggattagcagcctcatccgggaagctatgtcagcatacaattcccacgaggaggggcgcctggtgtaccgctacgggggagagcccgtggggtcattcgtccagccatgtttgcgcccactgatgccagccattgcacatgcactcttcatggatatcacccatgataatgagtgcccgattgtgcaccggtcggcgtacgatgctcttccatcgacgactatcgtctcaatggcgtgctgcgcatcgggatccacccgaggatacgacgagctggtcccgcaccagatctctgtggtttccgaagaacggttctacaccaaatggaatccggaagccctgccatcaaacaccggcgaagtgaacttccagtcaggaatcattgcggccagatgcgcgatctccaagctccaccaggaactgggtgctaaggggtttatccaggtgtatgtggaccaagtggatgaggacattgtggccgtgacccgccacagtccatccattcatcagtcagtggtggcggtgtccaggaccgcctttaggaaccctaagaccagcttctactcgaaagaagtcccgcaaatgtgcatcccaggtaagatcgaagaggtggtcctggaggcccgcaccattgagaggaacaccaagccgtacagaaaggatgaaaacagtatcaatgggaccccggatataaccgtggagatccgcgaacacatccagctcaacgagtcaaagatcgtgaaacaagccggagtggccactaaaggcccaaacgaatacatccaggaaatcgaatttgagaacttgtcgcccggatccgtgatcatcttccgcgtatccctggacccgcacgctcaggtggctgtgggcatcctgcgaaatcatctgacccagttttccccgcatttcaagtcgggctctttggccgtggataacgccgacccgatcctgaaaattccatttgcgtcactggcatcacgcctcactctcgcggagctgaatcaaatcctctacagatgcgaaagcgaggaaaaggaggatgggggcggatgctacgatatccctaactggagcgccctgaaatacgcgggattgcaaggcctcatgtcagtgcttgctgaaatccgccctaaaaacgatctgggtcaccctttctgtaacaacctgcggtcgggagattggatgatcgattatgtgtcgaaccgtcttatcagcagatcaggcactatcgcagaagtgggaaagtggctgcaggccatgtttttctacctgaagcagatcccgcggtacctcatcccgtgctacttcgacgccattctgatcggcgcctatactacgttgcttgacaccgcctggaagcaaatgagttcgttcgtccaaaatggttcgacgttcgtgaagcatcttagcctgggttcggtgcaattgtgcggagtggggaagttcccctcactgcccatcctgagccccgccctgatggatgtcccttaccgcctgaatgagatcactaaagaaaaagaacagtgttgtgtctcactggctgccggactgccgcacttctcgtccggcatcttccgatgttggggtcgcgacacctttatcgccctcaggggaatcctcctgatcaccggtcggtacgtcgaagccaggaacattatactcgctttcgccggaactctccgccatgggctcatccctaacctgttgggagaaggcatatacgcccggtataactgtagagacgcggtgtggtggtggttgcagtgcatccaggactactgcaaaatggtgccaaacggactggacatcctcaaatgcccggtgagccggatgtacccgactgatgactctgctccgcttccagcaggaactctcgatcaaccgttgttcgaagtcatccaggaggcaatgcagaaacacatgcagggaatacagttccgcgaacggaatgcgggaccacaaatcgacagaaacatgaaagatgaaggattcaacatcactgccggcgtggacgaggaaaccggattcgtgtacgggggaaatcgctttaactgcgggacttggatggataagatgggagaatcggaccgggcccggaatcgcggcatccccgctacccctagagatggctcggccgtggaaatcgtcggactgtcaaaatccgcggtacgctggcttctcgagctttcgaaaaagaacatcttcccataccatgaggtcaccgtgaagcggcacggcaaggcaatcaaggtgtcatatgacgagtggaataggaagatccaagacaacttcgaaaagctgttccatgtgtcggaagatccatcggacctgaacgagaaacacccgaatctggtccacaagaggggaatatacaaagattcgtacggtgctagctccccctggtgcgactaccagctgcgacctaactttaccatcgccatggtcgtcgcacccgagctctttactaccgaaaaagcgtggaaagcgttggaaatcgccgagaagaagctgctcggcccacttggaatgaaaactctcgacccggatgacatggtctactgtggaatctatgacaatgccctcgacaacgacaattacaacctggcgaagggattcaattaccaccagggtcctgaatggctttggcccatcggctacttcctgcgggccaagctgtacttctcacgcctgatggggcccgagactacggcaaagaccatcgtgctcgtcaagaatgtcctgagccgccattatgtccatctcgagcggtcgccttggaaggggctgcccgaactcactaacgaaaacgcacagtactgcccgttcagctgcgaaactcaggcttggtcaatcgcgaccatcttggaaactctttacgacctg

SEQ ID NO: 6063 - DNA, 4596 bp, synthetic construct
  misc_feature 1..4596: note = source = /note="Description of Artificial Sequence: Synthetic coding sequence"
  source 1..4596: mol_type = other DNA
atgggacactccaagcaaataaggatccttcttctgaacgaaatggaaaagttggaaaagacgctgtttagacttgaacagggttacgagttgcagtttcgtctcggtccgaccctgcaagggaaggcagtgactgtgtacactaactacccgttcccaggagagacgttcaatcgcgaaaagtttaggtcacttgattgggaaaacccgaccgaaagagaagatgattccgataagtactgtaaactgaatcttcaacaatcgggctcgtttcaatactacttccttcagggaaatgagaagtcaggagggggttacattgtcgtggacccaatactgagagtcggagcggataaccatgtgctgcctcttgattgcgtcactctccagacttttctggccaagtgcctcggtccatttgatgagtgggaatcgcgcctccgtgtggccaaggagtcaggctacaacatgatccattttactcctctgcagaccctgggcctgagcagatcatgctactcgctggctaaccaactggaactgaacccagacttttccagacccaaccggaaatacacttggaatgatgtggggcagctggtggaaaagttgaaaaaggaatggaacgtgatctgcattaccgacgtcgtgtacaatcataccgcagcaaattcaaagtggattcaggaacatcccgaatgtgcctacaacctcgttaactcgccgcatctgaagccagcgtgggtgctggacagagccctgtggcggttttcctgtgatgtggctgagggtaagtacaaggagaagggtattcctgccttgatagaaaatgaccatcacatgaactcaatccgcaagatcatctgggaggacatattccccaagttgaaactttgggaattctttcaagtcgacgtcaataaggcagtggaacaatttcggcgtctgcttacccaagaaaatcggcgggttaccaagtcagatcctaaccagcacctgactatcatacaggatccagaataccgccggtttggttgtaccgtcgacatgaacattgccctgaccacctttattcctcacgacaaaggtccagcggcaattgaggaatgctgcaactggttccacaagcggatggaggaacttaactcagaaaagcatagactgattaactatcatcaggaacaagccgtgaactgcctgcttggtaatgtcttttacgagcggctcgctggccatggcccaaagctgggcccagtgactcgtaagcatccacttgtcaccagatactttacttttccgtttgaggagatcgatttctccatggaagaaagcatgattcatttgcctaacaaggcttgttttctgatggcccataatggatgggtgatgggagatgacccacttcgcaactttgcagagccggggagcgaagtctaccttcgtagagaactgatatgttggggtgactcagtgaaactccgctacggcaataagcccgaggactgtccttacctttgggcccatatgaagaaatacactgaaatcactgcgacctattttcagggcgttcgtctggacaattgccactccacgccactccacgtggcggaatacatgttggatgccgcccggaatctgcaacctaacctgtacgttgtggctgagctctttaccggtagtgaagatctggataatgtgtttgttaccagactgggtatctcgtcacttattagggaggcaatgagcgcgtacaactcacatgaagagggacggcttgtgtataggtacggaggcgagccggtggggtcattcgtgcaaccctgcctgcgccccctgatgcctgcgattgcacatgccctgtttatggacatcactcacgataatgaatgtcccatcgttcatcgatcagcgtatgatgcgctcccttccaccaccattgtcagcatggcctgttgtgcctcgggatcaaccagaggatacgacgagctcgtgccacaccaaatttccgtcgtgtccgaggaacgcttttacaccaagtggaacccagaagcactcccaagcaacaccggggaggtgaacttccagtcgggaatcattgctgccagatgtgccataagcaagctgcaccaggaattgggtgcaaagggttttatccaagtgtacgtggaccaagtcgatgaggacatcgtcgcagtgacccgtcattcaccttcgatccaccagtcagtcgttgcagtgagcagaaccgcattcagaaacccaaaaacttccttttactcaaaggaggtccctcagatgtgtattcctggaaagatagaggaagtcgtccttgaagcaaggactatcgaacgtaatactaagccatacagaaaggatgaaaactccattaacggtactcccgatatcactgtggagattagagagcacatccagctgaacgagagcaagattgtgaaacaagccggcgtggcaaccaaaggacctaatgaatacattcaggagatcgagtttgaaaatctctcgccgggatccgtgatcatcttccgggtgtcgttggatccacacgcccaagtggcagtgggaatcctgagaaatcatcttactcagttttcgccgcatttcaagtcgggatcccttgcagtcgataatgccgacccgattctgaagattccatttgctagcttggcatcaagacttacccttgcggaacttaaccagattctctacagatgtgaatcagaagaaaaggaggacggtggaggttgttacgatattccaaactggtcggcgctcaagtacgcggggcttcagggccttatgtcggtccttgctgagattcggcctaaaaacgacctggggcaccctttttgtaacaatcttagatcgggggattggatgatagactacgtcagtaaccgattgatctcccgctcaggaactatcgcagaagtggggaagtggcttcaagccatgttcttttacctgaagcagatacctagatatctgattccttgctatttcgatgcaatactgataggcgcatacactacgctgctggacactgcatggaagcaaatgtcatcctttgtgcaaaacggatcgacgtttgtgaagcacctctcgttgggctcagtccaactgtgcggagtcggaaaattccctagcctgcctatcctgagccctgcactgatggatgtcccctaccgacttaatgaaattaccaaagaaaaggaacagtgttgtgtcagccttgccgctggcctccctcattttagctcgggtattttcaggtgctggggacgagacactttcatcgcacttcgggggatccttctcattactggtcgatacgtcgaggcaagaaacattatcctggcttttgccgggactcttaggcatggccttatcccgaacctgcttggagaaggaatatacgcacggtacaactgccgggatgcagtctggtggtggctgcagtgtattcaagactactgtaaaatggtgcctaacggactcgacattcttaagtgtcctgtgagcaggatgtacccgactgatgattcggcgccattgcctgctggtactcttgatcagccactgtttgaagttatacaggaggcaatgcaaaagcatatgcaaggtattcagtttcgcgagcggaacgccggtccacagattgatcgcaacatgaaggatgagggtttcaacattaccgccggagtggatgaagaaaccggctttgtctacgggggaaatcgctttaactgtggtacttggatggataagatgggagaatcagaccgcgcccgcaatcggggcattcccgcaactccgcgagacggatctgcagtcgaaattgtgggcctttccaaaagcgcagtgcgttggttgctggagctcagcaagaagaacattttcccataccacgaagtgacggtgaaacgccatggaaaggccatcaaagtctcgtacgatgagtggaacagaaagattcaagataactttgaaaagctgtttcacgtgagcgaggacccttccgatttgaacgaaaagcacccaaacctcgtccataagaggggtatctataaggattcgtacggggccagctcgccatggtgcgattatcagctcagaccgaactttacgattgcgatggtggtggcgcctgaacttttcaccaccgagaaggcgtggaaggcactcgaaattgcagagaagaaactgctgggacctttgggtatgaaaaccctggatcctgatgacatggtgtattgtggaatttacgataatgcgctcgacaacgataactacaacttggcaaaaggctttaactaccatcagggtcctgaatggctctggcctattggatacttcttgcgcgcaaaactgtacttctccaggctgatgggaccagaaactactgcgaaaaccatcgttctggtgaaaaacgtcctctcgaggcattacgtgcacctggaacgctcaccttggaagggtttgcctgaacttactaatgaaaacgcgcagtactgccctttttcctgtgagactcaagcgtggtccattgcaacgattcttgaaaccctgtacgatctg

SEQ ID NO: 6064 - DNA, 4596 bp, synthetic construct
  misc_feature 1..4596: note = source = /note="Description of Artificial Sequence: Synthetic coding sequence"
  source 1..4596: mol_type = other DNA
atgggacactcaaagcaaatccgcatcctgctgcttaatgagatggagaagctcgaaaagactttgttccggttggagcagggatacgaactgcagtttcgactggggcccaccctccagggaaaggcagtgaccgtgtacactaactacccgttcccaggggaaacctttaaccgcgaaaagtttagatcgcttgactgggaaaacccaactgagcgcgaggacgactcagataagtactgcaagctgaacctgcaacagtccggctcattccagtactacttcctgcaaggaaatgagaaaagcggtggtggatacatcgtggtggacccgatcctcagagtcggggcagacaatcatgtgctgcctttggattgtgtgaccctgcagacgttcctcgcaaaatgtctgggaccgttcgatgaatgggagagccgcctgcgcgtcgcgaaggagtccggctacaacatgatacacttcaccccactccagactcttggcctctcccgcagctgctactccctcgcgaaccaactggagctgaacccagatttctctcggcccaatcgaaagtacacttggaatgatgtcgggcagctggtggagaaactcaagaaggagtggaacgtcatatgcatcactgacgtggtctacaaccacaccgccgctaattcaaagtggatccaggagcaccctgagtgcgcatacaacttggtcaactccccacacctgaagccggcatgggtgttggacagagccctttggcgcttttcatgtgacgtcgccgaaggaaagtacaaggaaaagggcatcccggcactgatcgaaaacgaccaccacatgaactcaatcagaaagatcatatgggaggatatcttcccaaaactgaaattgtgggaattcttccaggtcgacgtgaacaaagcagtggaacagtttcgccgccttctcactcaggagaatcgccgtgtgactaagtccgaccccaaccaacacttgaccattatccaggacccagaatacagacggttcggatgcactgtcgacatgaacattgctttgactaccttcattccgcacgacaaaggcccagctgccatcgaagaatgttgcaactggttccacaaacggatggaagaattgaactcggagaaacatcggctcatcaactaccatcaggaacaagcagtgaactgcctccttgggaatgtcttttacgaacggttggccggccacggaccaaaactgggaccggtgactagaaagcatcccctggtgactaggtacttcacctttcctttcgaagaaattgatttctcgatggaggaatctatgatccatctccccaataaggcctgctttctgatggcccacaatggatgggtcatgggagacgatccgctgagaaacttcgcagagccagggagcgaggtctacctcaggcgcgagctgatttgctggggtgattccgtgaagctgcgctacggaaacaaaccggaggactgtccttacctctgggcgcacatgaagaagtacaccgagatcacggctacctacttccaaggggtgagactggacaactgtcactctacccccctccacgtcgccgaatacatgcttgacgcggcccggaatctccaaccgaacttgtacgtggtggccgagctgttcaccggatccgaggacttggataacgtgttcgtcactagactgggaatctcctcgctcatccgggaagcaatgtcggcgtacaactcgcacgaggaaggccgcctggtgtacagatacggcggcgaaccagtgggttcctttgtgcaaccatgtctgcggccactcatgccggcaatcgcccacgccctgttcatggacatcacgcatgacaacgaatgcccgatcgtccacaggtcggcttacgatgcgctgccgagcaccaccatcgtgtcgatggcctgttgcgcctcgggttcaacccgcggatacgacgagttggtgcctcaccaaattagcgtcgtgtccgaggaacggttctacactaaatggaatccagaggctctcccttccaacactggagaagtgaacttccaaagcgggattatcgccgctcggtgtgccatttcaaagctgcaccaggaactcggggcaaagggattcatccaggtctacgtcgaccaggtggacgaggacatcgtagccgtgacccgccactcaccctcgatccaccaatctgttgtggcggtgtcgcgcacggctttccgcaacccaaagacttcgttctactctaaggaagtgccgcagatgtgcattcctggaaagattgaggaagtggtgctcgaagctagaaccatcgaaagaaacaccaagccgtacaggaaggacgaaaattccatcaatggaactcctgacattacggtggagatcagggagcatatccaactcaatgagtcaaagatcgtgaagcaggccggtgtcgcaactaagggcccgaacgagtacatccaggaaatcgaattcgagaacctgtcgcctgggtcagtcatcattttcagagtttcactcgatccgcacgcccaggtggccgtggggattctgaggaatcatctgactcagttctccccgcacttcaagtcgggatccctggcagtggacaacgccgacccgatcttgaaaatcccgttcgcatcgctggctagcagactgactctcgcagagctgaatcagatcctgtacagatgcgaatcagaagagaaggaagatggaggcggatgctacgatatcccgaactggagcgctcttaagtacgccggactgcaaggactcatgtcagtgctggcggaaatcagaccgaagaatgacctgggacatccgttttgcaataacctgcgctcgggagactggatgatcgattacgtgtcaaaccggctgatctcgcggtcgggaaccatcgctgaagtcggaaaatggctgcaggcgatgtttttctacctgaaacagattccccgctacttgattccttgttacttcgatgcgatcctgatcggggcctatactactctgctggacaccgcgtggaagcagatgtcatccttcgtgcagaatggttccacttttgtgaagcacctgagcctcggatctgtgcagctgtgcggagtgggaaaattcccgtcattgccaatcctgtcgccagcccttatggatgtgccttacagattgaacgagatcaccaaggaaaaggaacaatgctgtgtctccttggctgccggactgccgcatttcagcagcggaatcttcagatgttggggtcgcgacactttcatcgccctgaggggcatcctcctgatcactggacgctatgtggaggccagaaatatcatcctggcattcgctggaactctgcggcatggattgatcccaaacctgctcggagaaggaatttacgccaggtacaactgcagggacgccgtgtggtggtggctccagtgtattcaagactactgcaagatggtgccaaatgggctggacatccttaaatgcccggtgtccaggatgtacccaaccgatgacagcgctccacttcctgccggtaccctcgaccagccgttgtttgaagtgatccaggaagccatgcagaaacatatgcaaggtatccaatttagggagcgaaacgcgggaccacagatcgaccggaatatgaaggatgagggattcaatatcaccgccggagtcgacgaggaaaccggattcgtgtacgggggaaaccgcttcaattgcggcacctggatggataagatgggtgaatccgaccgggcccgcaacagaggtatcccagccactcccagggatggatcagcggtggagatcgtcggattgtcgaaatctgcggttcgctggctgctggagctttccaagaagaacatcttcccataccatgaagtgaccgtgaagaggcatggcaaggcgattaaagtctcgtacgatgagtggaaccggaaaatccaagacaacttcgagaagctgtttcatgtgtcggaggacccgagcgacctgaacgaaaagcatccgaacctggtccataagagaggaatctacaaggactcctatggcgcatcatcaccctggtgcgactaccagttgcgcccaaatttcaccatagccatggttgtggccccggagctgtttactaccgaaaaggcttggaaggccctcgagatcgccgagaaaaagctcttgggcccgctcggcatgaaaacgctggacccggatgacatggtgtactgcgggatctatgacaatgctctggataatgacaattacaacctcgccaagggattcaactaccaccagggaccagaatggctgtggcctatcggatactttctgcgggccaagttgtatttctctcgcctcatgggtccggaaaccacggcaaagactatcgtgctcgtcaaaaacgtcctgagccggcactacgtccacttggaaagaagcccgtggaagggactcccagaactcacgaacgaaaacgcgcagtactgcccgttctcctgcgaaactcaggcttggtccatcgcaactatcctggaaaccctgtacgacctg

SEQ ID NO: 6065 - DNA, 4596 bp, synthetic construct
  misc_feature 1..4596: note = source = /note="Description of Artificial Sequence: Synthetic coding sequence"
  source 1..4596: mol_type = other DNA
atggggcattcgaagcaaattcggattcttctgctgaacgagatggagaaactggaaaaaaccttgtttaggctggaacagggttacgaattgcaatttcgtttgggacctactcttcagggaaaagcagtcaccgtctacaccaactacccatttcccggcgaaactttcaatcgcgaaaagtttcgaagcctcgattgggaaaatccaactgagcgcgaagatgattcggataagtattgtaaacttaatcttcaacaaagcggctcatttcaatactacttcctgcagggaaacgaaaaatcgggagggggctacattgtggtagatcctattttgagagtgggagcagacaaccacgtgctccccctggattgtgtcacccttcaaacctttctggctaagtgtctgggtccctttgacgaatgggagtcacgtctgagggtcgcaaaggagagcggttataacatgattcattttacccctcttcaaaccctcggcctttcacgcagttgctattcgctggcgaatcagcttgagcttaaccctgacttctcgcgaccaaatagaaaatacacctggaacgacgtgggtcaactggtggaaaagctcaagaaagagtggaacgtgatctgcattaccgatgtcgtctacaaccataccgcagccaacagtaagtggattcaggaacatcccgaatgtgcatacaatctggtgaatagcccccacctgaaacctgcctgggtgttggatagagctttgtggcgtttttcttgtgacgtcgcggaaggaaagtacaaggaaaagggtattcctgcactcattgagaacgaccatcacatgaactccattcgcaagattatctgggaggacatttttccgaaacttaaactttgggagttttttcaagtggatgtgaacaaggcagtggaacaattcagacgtttgctcacccaggagaatagaagagtgactaagtccgaccccaaccagcatctgacgattatacaagatccagagtaccgtaggttcggctgtactgtggatatgaacatcgcgcttaccaccttcatccctcatgataagggtcccgcggcaattgaggagtgttgtaactggtttcacaagaggatggaagaactgaactccgagaagcaccggttgatcaactatcaccaagagcaggcagtcaattgtctgctgggaaacgtgttctacgaaagactcgcaggacatggcccaaagctcggaccagtcacgaggaagcatcctctcgtgactaggtactttactttcccctttgaagaaatcgacttttcaatggaagaatcgatgatccacctccctaacaaagcatgtttcttgatggctcacaatggatgggtgatgggtgacgatccactgaggaactttgccgaacctggctcggaagtctacctgcgaagagagttgatttgttggggtgattctgtcaaactgcgctacggaaataagcctgaagattgcccatacctgtgggcgcatatgaagaagtatactgaaataaccgcaacctacttccaaggagtgagactcgataactgtcattcaacccctctgcatgtcgccgaatacatgcttgacgcggcacgcaaccttcaacctaatctctacgtggtcgcggagttgtttactggttctgaggatcttgacaacgtgtttgtgacccggcttggtattagctcgctgatacgggaagcaatgtcggcatacaactcgcatgaagaaggtcgactcgtctacagatacggcggggaacccgtggggtccttcgttcagccctgcctgcgaccacttatgcctgctattgcacatgcgttgtttatggacataacccacgataacgagtgccctattgtgcatcgaagcgcctacgacgcccttccatccactaccatcgtgtccatggcatgttgcgcctcaggctcgacgagaggatacgatgaactcgtcccacatcagatttcggttgtgtcggaagaaaggttctacaccaagtggaatccggaggcacttcctagcaataccggtgaagtgaatttccagtccggtattatcgcagccagatgtgccatttcgaaacttcaccaggaactcggcgccaagggattcattcaggtctacgtggaccaagtggatgaggatattgttgccgtgacgagacatagcccctcgatccaccagtcagttgtcgccgtctcacgaactgcattccggaatcccaagacctccttttactctaaggaggtaccccaaatgtgtatcccagggaagatcgaagaggtggtgttggaggcacgcaccattgagcggaacacgaagccttacagaaaggatgagaatagcataaatggtactcctgatatcacggtggagattcgtgagcatatccagctcaatgaatcgaaaatcgtgaagcaagcgggagtggctacgaaaggaccaaacgaatacatacaggagattgagtttgaaaatctctctccaggttcagtgataatcttccgtgtgtccttggatccccatgcgcaagtcgcagtgggaattcttcggaaccaccttactcaattctcaccacatttcaaatcgggatccctggccgtggacaatgcagacccaatcctgaagatcccatttgcttctcttgccagccggcttaccttggccgaactgaatcagatcctctaccgctgtgagagcgaagaaaaggaagatggtgggggatgttacgatattccaaactggtccgccctgaaatacgccggactgcaaggactcatgtctgtgcttgccgaaattcggcctaaaaacgaccttggacacccattttgcaacaaccttcgatcaggagactggatgattgattacgtgtcgaatcgtttgatttcaaggtccggtaccatcgccgaagtgggaaagtggctgcaagctatgtttttctatctcaaacaaatcccgcgttaccttatcccttgctacttcgatgctatattgataggagcttacactactctcctcgacactgcatggaagcagatgtcatcgtttgtgcagaacggatccacctttgtgaagcatctttccctcggctcggtgcaactgtgcggggtgggaaagttcccctccctgcctatcctctcaccggcacttatggacgtgccttaccgtctgaacgaaattacgaaggaaaaggaacaatgctgcgtgtccctggcggcaggacttcctcatttcagctccggtatctttagatgttggggaagagacacgtttatcgcactcaggggaattctcctgatcaccggccgatatgtcgaggcacggaacatcatcttggcctttgccggcaccctgagacatggtcttataccaaaccttttgggcgaaggcatctacgcacggtacaactgtcgagatgcagtctggtggtggctgcagtgcattcaagattactgtaagatggtgcccaatggccttgatattctgaagtgtccagtctccagaatgtatccgactgatgacagcgcccctctgcctgccggaacgctcgatcagccattgttcgaagtcatccaagaggcaatgcagaaacacatgcaaggcatccaatttagagaacgcaacgcaggtccgcaaattgacagaaatatgaaggatgaaggttttaacattaccgcaggagtcgatgaggagactgggtttgtgtacggaggcaatcggttcaattgtgggacttggatggataagatgggtgagtcggacagggcacggaatcgcgggattccagcgaccccccgagatgggtccgccgtggagatagtgggtctgtccaaatcagccgttcggtggctcctggaactctccaaaaagaacatctttccttaccacgaggtgactgtcaagcgtcatgggaaagcgattaaggtgtcttacgatgaatggaacagaaaaatccaagacaacttcgaaaagctgtttcacgtgagcgaagatcctagcgacctgaacgaaaagcatcctaacctggtgcacaaacggggaatttacaaagattcatacggcgcctcatccccatggtgcgattaccagctcagaccgaatttcaccatcgcaatggttgtcgctcctgaactttttacgactgaaaaggcatggaaggctctggaaatagcagagaagaagttgctggggcccctgggcatgaaaaccctggatccagatgacatggtctactgtggtatttacgacaacgcattggataatgacaattacaacctggcaaagggattcaattatcatcaaggacctgaatggctttggccgatcggttactttctgagggcaaaactttacttttcaaggctgatggggccggaaaccactgccaaaaccattgtccttgtcaagaatgtactgtcgagacattacgtgcaccttgagagatcgccatggaagggattgcccgaactgactaacgagaatgcgcagtactgccctttttcatgtgaaactcaggcatggtccatcgcaacgatactcgagactctctatgatctc

SEQ ID NO: 6066 - DNA, 4596 bp, synthetic construct
  misc_feature 1..4596: note = source = /note="Description of Artificial Sequence: Synthetic coding sequence"
  source 1..4596: mol_type = other DNA
atggggcattccaagcaaatcagaatccttctgttgaatgaaatggaaaaactcgaaaagacgctctttagacttgaacagggttacgagctgcagtttagactgggacctactctgcagggcaaagcagtgactgtctacactaattacccatttcccggcgaaacctttaaccgtgagaagtttcgcagcctggactgggaaaatcccactgaaagagaggatgattcggataagtattgtaagctgaacctgcaacaatccggcagctttcagtactactttctgcaaggtaatgaaaagagcggtggagggtacattgtggtcgatcctatacttcgggtgggtgcagataatcatgtgctcccgttggattgcgtcacgctgcaaacttttttggcaaagtgcctgggaccttttgatgaatgggagtcaaggctgagggtggctaaggagtcaggatacaacatgatccacttcactccactccaaactctggggctctcccgatcctgctactcccttgctaaccagctggaacttaaccctgacttctcaaggcctaatagaaagtacacttggaacgacgttggccaactggtggaaaagctcaagaaggagtggaacgtgatttgtataaccgatgtcgtgtacaaccatacggcggcaaatagcaaatggatacaagagcatccggaatgcgcgtacaaccttgtgaattcgcctcatttgaagcctgcatgggtgctggatcgggcgctgtggagattcagctgtgacgtggccgaaggcaagtataaagaaaagggaattcctgcccttatcgaaaacgatcatcatatgaactctattaggaagattatctgggaggatatctttccaaaacttaaactctgggaattctttcaggtcgacgtgaacaaggctgtggaacaatttcgtcgcctgctgactcaggaaaatcgcagagtgacgaaatcagatccgaaccaacaccttaccattattcaagatccagaatacaggcgatttgggtgtaccgtcgacatgaacattgcactgaccactttcattccacatgataagggcccagcagcaattgaggaatgctgtaactggtttcacaaacgaatggaagagctgaactcggaaaagcatcgactgataaactaccaccaagagcaagcagtgaattgtctgctgggcaacgtcttttacgaaagactcgcaggacatggaccaaagctgggacctgttacccgcaaacatcctctggtgacccggtactttactttcccctttgaagagattgacttctcgatggaggaatccatgattcatttgcctaacaaggcatgctttctgatggcacataacggatgggtgatgggagacgatccgttgagaaactttgccgagcctggttccgaggtgtacctgcggagggagctgatatgttggggtgattcagtgaagctcagatacggaaacaaaccggaagattgtccctatctgtgggcacacatgaagaagtacaccgaaatcactgcgacgtacttccagggggtgaggctcgacaactgtcactctacgcctcttcatgttgctgaatacatgcttgatgcagccagaaacctgcagccaaatctgtacgtagtggccgaactgtttaccggctccgaggaccttgataatgtgttcgtgaccagacttggcatctcgtccctgattcgcgaagcaatgtcggcatacaactctcacgaggagggtcggctggtctatcgctatggaggagaacctgtgggttcgtttgtccagccttgtctgcgcccactcatgcctgccatagcgcatgcattgttcatggatattactcacgacaacgaatgtccaatcgtccatcgctctgcatacgacgcacttccctcgacgaccattgtctcaatggcgtgttgtgcatccgggtccacccgtggatatgacgagctggtgccgcatcaaatttctgtggtgtccgaggagagattctacaccaaatggaatcctgaagcgctgcccagcaacactggtgaggtgaacttccagagcgggatcatcgcagcaagatgcgcaatctcaaaactgcaccaagaacttggagccaagggttttatccaagtgtacgtggaccaggtcgatgaggacattgtggccgtgacgaggcacagcccttcgattcatcagtcggtcgtcgcggtcagccgtaccgcctttcgcaacccaaagacttccttttactccaaagaggtgcctcaaatgtgcatccctggaaagattgaagaagtggtccttgaggccaggaccatcgaacgcaacaccaagccttaccgaaaggatgaaaattctataaacggaactcccgacatcactgtggaaattcgtgagcacattcaattgaacgaatcaaagatagtgaaacaggcaggtgtcgcgaccaaaggcccaaacgaatacattcaggagattgaatttgaaaatctgtcgccaggatcagtgatcattttccgggtcagcctggatcctcacgcgcaggtggctgttggcattctcaggaaccatcttactcaattctcccctcactttaagtcggggtccctggcggtggataatgccgacccgatcctgaagatcccatttgcatccctggcatccagacttacgcttgcagaacttaatcaaatcctttaccgttgtgaaagcgaagagaaggaggacgggggcgggtgttacgatattcctaattggtcggcattgaagtacgcgggacttcagggacttatgagcgtgctggcagaaatccgaccaaagaatgatctcggccacccattctgtaataacctgaggtcgggggattggatgattgattacgtgtccaaccggctgattagccgttccggtaccattgccgaagtgggaaaatggctgcaggccatgtttttctatctcaagcagataccgcgctaccttattccatgttacttcgacgccattctcatcggtgcctacaccactttgctcgatactgcatggaagcaaatgagctcgtttgttcaaaatggatccacgttcgttaagcatctgtcgctgggcagcgtgcagctgtgcggggtcggaaaattcccaagccttcctattctttcgccagcacttatggatgtgccctacagactgaatgaaatcacgaaggaaaaagagcaatgttgtgtgtccctcgccgccggattgccccatttctcctcgggaatctttaggtgctggggtcgtgacacttttatcgccctgaggggaattctgctgattactggaagatacgtcgaggcccgtaacatcatacttgcgtttgccggcacccttaggcacggtctgattcccaacttgcttggcgagggtatctacgcgcgctacaattgtcgggacgcagtctggtggtggctccagtgcatccaggattactgtaagatggtgcccaacggtctggatattctcaagtgcccagtgtcgcggatgtaccctaccgatgactcagcaccccttccggcaggaaccctcgatcagcctttgtttgaggtgattcaggaagctatgcaaaagcatatgcagggtattcaatttagagaaagaaacgcaggaccacaaattgacaggaacatgaaagatgaaggtttcaacattaccgcaggagtggatgaagagactggatttgtgtacggcggcaatagattcaattgtggaacctggatggacaagatgggtgaatcggatagagcaagaaaccgaggcattccggcaacccctagagacggatctgccgttgaaatcgtgggcctgagcaaatccgcggtccgctggctgctggaattgtcgaaaaagaacatcttcccgtatcatgaggtgacggtgaaaaggcacgggaaagcaattaaggtgtcctacgatgaatggaatcggaagatccaagacaattttgagaagctgtttcatgtctcggaggacccttcggatctgaacgaaaagcaccccaatctcgtccacaagcgaggaatatacaaagactcgtacggggcgtcctcaccatggtgcgattaccaattgcggccaaatttcacgatagctatggtagtggctcctgaactgttcaccacggagaaggcctggaaggcactggaaatagctgaaaagaagctgctgggaccactgggtatgaaaacgctggatcctgatgatatggtttactgcggtatttacgataatgcacttgacaacgacaattacaaccttgcaaaggggttcaattaccatcagggtccagagtggctgtggccaataggctacttcctgagggcaaaactttacttctcgcggctgatgggtcctgagactaccgcaaaaaccatcgtgctggtcaaaaacgtgctgtcgaggcactatgtccatttggagagatcgccttggaagggactccctgagctcactaacgaaaacgcccaatactgtccctttagctgcgaaacccaagcatggtccatagctactatactcgagactctgtacgatctc

SEQ ID NO: 6067 - DNA, 4596 bp, synthetic construct
  misc_feature 1..4596: note = source = /note="Description of Artificial Sequence: Synthetic coding sequence"
  source 1..4596: mol_type = other DNA
atgggacactccaagcagattagaatcctgctgctcaacgagatggagaagcttgagaaaaccctcttcagactggagcagggctacgagctgcagtttagactgggtcctactttgcaaggaaaggccgtgaccgtctacaccaactaccccttccctggtgaaacgttcaaccgcgagaagttcaggtcccttgactgggaaaatccgacagagcgcgaagatgattccgacaaatattgcaagcttaatcttcagcagagtggttcatttcagtactatttcctgcagggaaacgagaaatccggaggcggatacatagttgttgaccccattctgcgcgtgggcgcggataaccacgtcctgcctctggattgtgtcacacttcagacattcctcgctaaatgtctgggaccgtttgacgagtgggaaagtagactcagggtggccaaggagtccggttacaatatgatccatttcacacccctgcagacactgggtctctccaggagttgttactccttggccaaccagctggaacttaaccccgacttctcaaggcctaataggaagtatacgtggaatgacgtgggtcaactggtcgaaaagctcaagaaggaatggaacgttatctgcataacagatgtagtttacaatcacacagctgctaatagtaaatggatccaagagcacccagaatgcgcgtacaacctggttaactcccctcacctgaagccggcctgggttctggatagagccttgtggcgcttctcttgtgacgttgctgagggtaagtacaaagaaaaaggaatcccagcactgatagagaacgaccatcacatgaacagtattaggaaaattatctgggaggatatatttcctaaactgaagctctgggaattctttcaggtggacgtgaataaggcagtcgaacaatttagacgccttttgacacaggagaataggcgcgttaccaagagcgacccgaatcagcatctgacgataatccaggaccctgaatataggaggttcggttgtaccgttgacatgaacatcgccctcaccacttttatccctcacgataagggccccgcggctattgaggagtgctgtaattggttccataagagaatggaggagctcaactctgaaaaacaccgccttattaattaccatcaggaacaagctgtcaattgtctgctcggcaacgtcttctacgagcgcctggctggacacggtcctaagttgggtcccgtgacccgcaagcacccacttgtgaccagatacttcaccttccctttcgaggaaatcgatttcagtatggaggagagcatgattcaccttcccaacaaagcctgctttctcatggcacataatggatgggtgatgggagatgaccccttgcgcaatttcgcagagccaggttccgaggtgtatcttcgcagagagctcatatgttggggagatagcgtcaagctgagatacggaaacaaaccagaggactgcccctacctctgggcccatatgaaaaagtatactgaaatcaccgcaacgtactttcagggcgttagactggataactgtcatagtactccattgcatgtggctgagtatatgctggacgccgcaaggaacctgcagccaaacctctatgtggttgccgagcttttcacaggaagtgaagacctcgacaacgttttcgtgaccaggctgggcatcagctcactgatcagggaggccatgtctgcctacaacagccacgaagagggacgcctggtgtaccgctatggcggtgagccagtcggctccttcgtgcagccttgcttgaggcccctgatgcccgctatagcccacgcccttttcatggacataactcacgataacgaatgccctatagttcataggtccgcctatgacgcactgccaagcacaaccatcgtaagtatggcctgttgtgcttctggatcaacccgcggttacgacgagctcgtgccccatcagatttccgtggtgagtgaggaaagattttataccaaatggaatcctgaggccttgccttcaaacactggtgaagtcaactttcaatctggtatcatcgcggccagatgtgctatcagcaagctccatcaggagttgggagcaaagggcttcatacaggtctacgtagaccaagtagatgaagacattgttgcagtaacacgccacagtccatctatccaccagtctgtggttgccgtttctagaactgcttttcgcaatcctaaaacgagcttctactcaaaggaagtaccccagatgtgtatccccggaaaaattgaggaggtggtgctggaggcaagaaccatcgagagaaacacaaaaccgtaccgcaaggacgagaatagcatcaacggaacccccgatatcacagtcgaaatcagagagcacatccagctgaatgagtccaaaatagttaagcaggccggcgtggccacaaagggcccgaacgagtacatccaagaaatcgaattcgagaatctttccccgggctcagtcataatattccgcgtgtctctggacccacatgcccaggtggccgtgggtattctgagaaaccacctcactcagttcagcccccacttcaaatctggatccttggcggtggataatgctgacccaattttgaagatcccattcgcgagcctcgcgagccgcctgacactggcggaactgaaccagattctgtataggtgcgagagcgaagaaaaggaggatggtggcggctgttatgatatccctaattggtctgcactgaaatatgcgggcctccaaggactcatgagcgtgttggctgagattagaccaaagaacgatctgggccaccccttctgcaacaatctccgctccggagactggatgatcgattacgtatctaaccgcctgataagccgcagcggtacaattgcagaggtgggtaagtggctgcaggccatgttcttttatttgaaacagatccctagatacctcatcccatgctacttcgatgccatactcattggtgcttacaccaccctgctcgatactgcctggaagcagatgtcctctttcgtgcagaacggtagtactttcgtgaagcatcttagtctgggctcagtccagttgtgcggtgtcggcaaatttccttccctccccatcttgtcacctgcattgatggacgtaccttacagactcaatgagatcacaaaggagaaggaacaatgctgcgtttcactcgcagcaggactgccgcacttttcatctggtatctttaggtgctggggcagagacaccttcatcgccctcaggggcatcctcctgatcacaggtcgctatgtcgaagccagaaacatcattctcgcatttgccggtaccctgaggcacggtctcattccaaacctgctgggcgagggtatctacgcgagatataattgcagggatgctgtctggtggtggttgcagtgcatccaggactattgtaagatggtccccaatggtttggatatcctgaaatgtcctgtgtctaggatgtatccaactgatgactctgctcctctgcccgccggaactctggatcagcctctctttgaagtaattcaagaggccatgcaaaagcacatgcagggtattcaatttcgcgagaggaatgctggcccccaaattgacaggaacatgaaagatgagggatttaacattactgccggtgtggatgaggagaccggtttcgtctacggaggcaataggttcaactgtggcacttggatggacaaaatgggtgagtctgacagggcaaggaataggggaatccctgctaccccgagagacggaagcgccgtggagatcgttggtttgtcaaagagcgcagtgagatggctgttggaattgtctaaaaaaaacatcttcccctatcacgaagtcaccgtgaagcgccacggaaaggcaattaaagtgtcttatgatgagtggaacaggaaaatacaggataacttcgaaaaactgttccacgtgtccgaagacccctcagacctcaatgagaagcatccaaatctcgttcataagcgcggcatctacaaagattcttacggagctagctccccgtggtgtgactatcagttgaggccaaacttcactattgctatggtcgttgcgccagagttgttcactactgagaaagcctggaaggcactggaaatcgccgagaaaaaactgctgggcccacttggcatgaagacgctggaccccgacgatatggtgtattgtggtatctacgataacgctctcgataatgataactataaccttgcaaaaggtttcaattaccaccagggccccgagtggttgtggcccatcggttacttcctgcgcgcgaagctctatttttctagactgatgggacccgagactactgcgaaaacaatcgttttggttaaaaatgtgctcagtaggcattacgtccacctcgagagaagtccttggaagggcctgccagaactgaccaacgaaaacgcgcagtactgcccattttcttgcgaaactcaggcatggagcattgctactatcctcgagaccctgtacgacctg

SEQ ID NO: 6068 - DNA, 4596 bp, synthetic construct
  misc_feature 1..4596: note = source = /note="Description of Artificial Sequence: Synthetic coding sequence"
  source 1..4596: mol_type = other DNA
atgggccattctaaacagatcaggattctgcttcttaatgagatggagaaattggaaaagacactgttcagactggagcagggctacgagctccaattcaggctgggacccacactgcagggcaaagcagtgacggtctataccaactacccattcccaggggagacttttaacagggagaagttccgaagcctcgattgggaaaacccaacggagagagaagacgattccgacaaatactgcaagcttaacctccaacagagtggcagttttcagtattacttcctccagggcaatgagaaaagcggcggagggtacatcgttgtggatcctattttgcgagtcggcgcggacaaccatgtactgccattagattgcgtgactctgcagacctttctggctaagtgtctaggcccctttgacgagtgggaaagcaggttgcgcgtcgccaaagaatcagggtataacatgatccatttcacgccccttcagacacttggtctgagcagatcttgctactctcttgccaatcagctcgaacttaaccctgatttttcccgccctaacaggaagtatacatggaatgacgtcggtcagttggtagaaaaactaaagaaagagtggaacgtcatttgcataacagacgtggtttataatcataccgccgcaaattcaaagtggattcaagagcaccctgaatgcgcatacaatctggttaactcgccccaccttaagccggcatgggttcttgaccgggcattgtggagattctcttgtgatgtcgcggaagggaaatacaaggagaaagggatcccagccctgattgaaaatgaccatcacatgaactccatcagaaagattatctgggaagacatattcccaaaattgaagctatgggagtttttccaggtggatgtgaataaggcagtcgagcagtttcgacggctgttgacacaagaaaatagacgagtgactaagtccgaccccaaccaacatctcaccattatccaggaccctgagtacagaagattcgggtgcaccgtcgacatgaatatcgctttgacaacctttatcccccatgataagggccctgctgccattgaggagtgctgcaattggttccataagagaatggaggagctgaacagtgaaaagcatagattaatcaactaccaccaggaacaagcggttaactgcctcctggggaacgtcttctatgagcggctggccggacatggacctaaacttggtcctgtgaccagaaagcatcctctagtcaccagatatttcacctttccttttgaggaaattgacttctccatggaggaatctatgattcacctgcctaacaaggcgtgcttcttgatggcccataacgggtgggttatgggggatgaccctctgaggaactttgccgaaccaggatctgaggtgtatctgcgacgagaattgatatgctggggcgactctgtgaagctccgatacgggaacaaacccgaagactgcccctacctttgggcccacatgaagaaatatacagagatcacagcaacttattttcagggcgtgaggctggacaactgccacagcacccctctgcacgtggctgagtacatgttggacgcagccaggaacttacagcccaacttgtacgtcgtagccgagctctttactggctctgaggacttagacaacgttttcgtgactcgtctgggtatcagttctttaatacgcgaagcaatgagcgcctataactctcacgaagaggggcgtctagtatacagatacggcggcgagccagtcggctcctttgtccagccctgcctccgacctctcatgcctgccatcgcccacgctctgttcatggacattacccacgacaacgagtgtccaattgtacataggagtgcctacgatgccctgcctagcaccacaatcgtttcaatggcttgctgcgcttcagggtctactagaggctatgatgaactggtgccgcaccagattagcgtggtgtctgaagagaggttttacaccaaatggaatcctgaagcgctgccatcaaacacaggggaggttaatttccagtctggcatcatcgccgctcgttgcgcaatcagcaagcttcatcaagaactcggggccaaaggcttcatacaggtgtacgtagaccaggtagatgaagacatcgtcgctgtgactcggcactcaccaagcattcaccagtccgtcgtggcggttagtaggacagcttttcgaaacccaaagaccagtttctactctaaggaggtgccacagatgtgcatccccgggaagattgaagaggtggtgcttgaggcaaggacgatagaacgaaatactaagccctaccggaaagacgaaaattcgataaacgggacaccagatattaccgtggagatcagagagcatattcaactaaatgaaagtaaaatcgtgaagcaggccggcgttgcaacaaagggccccaatgaatacatccaggaaattgagttcgaaaatctgtcccccggtagcgtgataatttttagggtctcactagaccctcacgctcaggtcgccgtaggcatcctgcgaaatcatttaacccagttcagcccgcattttaagagcggcagcctcgccgtggacaatgcagatcctatactgaaaattcctttcgcatcgctcgcatcccgattaacattggcagaactcaaccaaatactctaccgatgcgaaagcgaggaaaaggaagacggggggggttgttatgatatcccgaactggtctgccctgaagtacgctggcttgcaagggctgatgagcgttctggcggaaataaggccaaagaatgacttgggccatccgttctgtaacaacctgagatcaggcgattggatgatcgactacgtgagtaatcgactgatttcacgaagcggtacaatcgcggaagtcggaaaatggctacaggcaatgtttttttatctaaagcagatcccacgatatctcattccctgttacttcgacgcaattctcatcggggcgtacaccactctgctggacacggcctggaaacaaatgagtagtttcgtgcagaacggatcgaccttcgtgaaacatctttctctgggctcggttcagttgtgtggtgtgggcaaatttccaagcctgccaatcctctcgccagctttaatggatgtgccataccgattgaatgaaatcacaaaagagaaagaacagtgctgtgtttccctcgcagccggtctccctcattttagcagcggcatcttccgatgctgggggagggatactttcatcgccctgaggggtattctgctcataaccgggagatacgttgaggctcgaaatattatcttggctttcgctggcacgttacggcatggcctgatacccaatttgcttggagaaggaatttatgccaggtataactgccgagatgctgtctggtggtggcttcagtgcatccaggattactgcaagatggttccaaatgggctggatatcctgaagtgcccagtaagccgaatgtaccccaccgacgacagcgcccccctcccagccggtaccctcgaccagcctttgttcgaagtgatacaggaggcaatgcagaaacacatgcagggaatccagttccgtgaaagaaacgctggacctcagatagaccgtaacatgaaggatgaaggattcaacatcacggccggggttgacgaagagaccgggttcgtctacgggggtaatagattcaattgtgggacctggatggataagatgggagagtctgacagagctcgcaacagaggcattccagctactcctcgagacggctctgcagttgagatcgtggggctgagcaagtctgccgtcagatggctccttgagctgtccaaaaagaatattttcccctatcatgaggtgactgtgaagcggcatgggaaggcaattaaagtctcttacgatgaatggaaccggaagatccaggacaactttgagaaactcttccatgtgagtgaggatcctagcgacctcaatgaaaagcacccgaacttggtgcacaaaagagggatttacaaggattcatacggagccagctcaccctggtgcgactaccagttaaggcctaacttcaccattgccatggtggtggccccggaactatttacaacagagaaggcttggaaggccctcgagattgccgaaaagaagctcctcgggcctcttggcatgaagaccctcgacccagacgatatggtgtattgcgggatctatgacaacgcacttgacaacgataattataacttggccaagggctttaattaccatcagggacctgagtggctgtggcctatcggttacttcctacgggccaaactgtatttctcacggcttatgggtccagaaaccactgctaagaccattgttctagtaaagaatgtcttgtctaggcactatgtccacctggaacgatccccatggaaaggcttgccagaactgacaaacgagaacgctcagtactgccccttctcatgcgagacacaagcatggtctatagccaccattcttgagacactgtacgacctg

SEQ ID NO: 6069 - DNA, 4596 bp, synthetic construct
  misc_feature 1..4596: note = source = /note="Description of Artificial Sequence: Synthetic coding sequence"
  source 1..4596: mol_type = other DNA
atgggacacagcaagcagattcggattctgctgctgaatgagatggaaaagttggaaaagaccctctttcgcttggagcagggatacgaattgcaattcaggctcggtcccacactgcagggaaaggccgtgactgtgtacacgaactatccattcccaggtgagactttcaacagggagaaatttaggtccctggactgggagaaccctaccgagagagaagatgactctgataagtactgcaagctgaatctccaacagtcaggctcgtttcagtactactttcttcagggcaacgaaaaaagcggtggcgggtatatcgtggtggaccccattcttagggttggagcagacaatcatgtactgccgctcgactgtgtcactcttcaaactttcctcgctaagtgcctcgggcctttcgacgagtgggaaagtagactcagggtggctaaggaatctgggtataatatgattcacttcaccccactccaaacactgggcctatcgcggtcatgttattcgctggccaaccagctagaactcaacccagattttagtagacccaaccggaagtacacatggaacgacgtggggcaacttgtcgagaagctgaaaaaggaatggaacgtgatctgcatcacagacgtggtctataaccacaccgcggcaaattctaagtggatccaggagcaccccgaatgtgcctacaatctggtcaactccccccatctcaaacccgcctgggtgcttgacagagcactctggcgattctcctgtgatgtggctgagggcaagtacaaagaaaaaggtatcccagccctgattgagaatgaccatcatatgaattctattcggaagatcatatgggaagacattttccctaagttaaaactgtgggagtttttccaggtggatgttaataaagctgtcgagcagtttcgccgtctattgacgcaggagaaccggcgagtcactaagtccgaccctaaccagcaccttacaatcattcaggacccggaatatcggcgcttcggatgtaccgtggatatgaacatcgccctaactactttcattcctcatgataagggaccagcggctatcgaagaatgctgcaactggttccacaagaggatggaagaattaaatagcgagaaacatcgtcttattaactaccaccaggaacaggccgtgaattgcctgttgggaaatgtgttctatgaacgcctcgcgggacatgggccaaaactggggcctgtcacacggaagcaccccctggtgactaggtattttacttttccctttgaggagatagatttttcaatggaggaatcaatgatccacttgcctaataaagcttgcttcttgatggctcataatggctgggtgatgggcgacgaccccttacgcaacttcgctgagcccgggtccgaagtgtacctgagacgtgaactaatatgctggggagactccgtgaagcttcggtatggcaacaagcctgaggattgtccctatctgtgggctcacatgaagaagtatacggaaatcaccgcaacatacttccagggcgtcagactggacaattgtcattccacgccgctccatgtcgccgagtacatgctagacgctgcgaggaatctccagccaaacctctacgtggtcgccgagcttttcacaggatccgaagacctcgacaacgtgttcgtgactcggctcgggattagtagccttattcgggaagcaatgtctgcttacaattcccacgaggaggggcgactagtttataggtacggtggtgaacccgtcgggtcttttgtccaaccatgtttaagaccccttatgcctgctattgctcacgccttgttcatggatattacccacgacaatgaatgccccatagtgcatcggtcagcttacgatgcattgccttctactacaattgtgtcaatggcgtgttgtgcgagcgggtcaaccagaggctacgatgagctcgtaccacaccagattagcgtggtgtctgaagagcgcttttatacaaaatggaatcccgaagctctccctagtaacactggggaggtgaactttcagtctggcatcatcgctgcccggtgtgctatctctaaactccaccaagagttaggggctaaaggctttatccaggtgtacgttgatcaggtagacgaggacatcgtggctgtgacacggcactctccctcaatccatcagtccgtcgtcgcagtgtctcgcaccgccttccgaaatccgaagacgagtttctacagcaaggaagtgccccagatgtgtattcctgggaaaatagaggaagtagtgcttgaagctagaacgatagagcggaatacgaagccttatcggaaagatgagaactccatcaacggcacacctgatatcactgtggaaatccgggagcatatacaactgaacgagtctaagatcgtgaagcaggctggggtcgcgacaaagggccccaatgagtatatccaggagatagaattcgaaaatctgagcccaggctccgtgatcatcttccgggtatcgctagacccccacgcccaggttgctgtgggcatcctgagaaatcatctcacgcagtttagccctcattttaagagcggatctttggcagtggataacgctgaccccattctcaagattccctttgcgtcactggccagccggttaaccctggctgaactgaaccagatattatatcggtgcgagtctgaggaaaaagaagacgggggtgggtgttatgatatccctaattggagcgcactgaagtatgcagggctgcaaggactgatgagcgttcttgccgaaataaggcctaagaacgatctgggtcatccgttttgtaataacttgcggtccggagattggatgatcgactatgtcagcaatcgactaatatcgcgatccggaaccatcgctgaggtcgggaaatggcttcaggccatgttcttctacctcaagcagatcccccggtacctgattccttgttattttgatgcaatactcattggggcatacacgaccttactggacacagcgtggaagcagatgtctagtttcgtccagaacggctccactttcgtgaaacatttgagcttgggaagcgtgcagctatgtggtgtgggcaaatttccaagccttcctatcctaagcccagcgctgatggacgttccataccgactaaatgaaatcaccaaagagaaggaacagtgctgcgtgagcctggctgccgggctgccccacttcagctctgggattttccggtgctggggcagagatacgttcatcgctctccggggcatactgttaattactgggcgctacgtggaggctagaaacatcatcctggccttcgccggaactctaaggcacgggctgatccctaatttactgggcgagggcatatatgccagatataactgccgggatgcggtctggtggtggctgcagtgtatccaggactactgtaagatggtacccaatggactcgacatactgaagtgtccagtctcacgcatgtaccctacagacgatagtgccccattacctgccggcacactggaccagccccttttcgaggtgatacaggaagccatgcaaaagcacatgcaggggattcagttcagagaacggaacgcagggccccagatcgatcgcaatatgaaagatgagggattcaatattacagccggcgtggacgaagaaaccggattcgtttatggcggcaataggtttaactgtggcacgtggatggacaagatgggagaaagcgacagagcgcgcaatcgagggataccagctacaccaagggacggaagtgctgtagagattgtgggccttagtaaatccgctgtgaggtggctgctcgagttgagcaagaagaatatcttcccgtatcacgaagtgacagtgaaaaggcacggaaaggccattaaggtgagctatgatgaatggaatcgaaagattcaggacaattttgagaaactgttccacgtgtctgaggatcccagcgacctcaatgagaaacacccgaatctggtgcataagcgtggcatctacaaggatagctacggagccagctccccttggtgtgactaccagttgcgcccgaacttcactattgcgatggtcgtcgctcctgaactgttcacgaccgagaaggcatggaaggccttggagatagcggagaagaagctccttggcccactagggatgaagacgctcgatcctgatgacatggtatactgtggcatctacgacaatgcgctggataacgataactacaaccttgctaagggatttaactaccaccaggggcctgagtggctgtggcccataggatattttctacgggccaagttgtactttagccgtctcatgggacccgagactaccgctaaaacgatcgttcttgtcaaaaacgtactgtcccgacactacgtgcacctggaacggtcaccatggaagggcctgcccgagctcacaaatgagaatgcccagtactgtcctttctcttgtgagacacaagcatggtccatcgccaccatcctcgaaaccttgtacgatctt

SEQ ID NO: 6070 - DNA, 4596 bp, synthetic construct
  misc_feature 1..4596: note = source = /note="Description of Artificial Sequence: Synthetic coding sequence"
  source 1..4596: mol_type = other DNA
atgggccattcgaaacaaattcggatcctacttctcaatgaaatggagaaattagaaaagaccttattccgactagagcaaggctatgaactgcagttccggctcgggccaactttgcaaggtaaggccgttaccgtgtacacaaattacccatttccaggagagactttcaatcgtgaaaaatttcgatcacttgattgggagaatccaacagaacgcgaagatgattccgacaagtactgtaagctgaatcttcaacaatcgggatctttccagtactactttttacagggaaatgagaagagtggaggcggatatatagttgtagatccaattctccgtgttggagcggacaatcatgtacttccacttgattgcgttacattgcaaacatttttggcaaagtgtctaggaccatttgatgaatgggagtcgcggctccgcgtggccaaagaatcgggatataatatgatacacttcaccccactccaaacacttggtttgagccgcagttgttattcgcttgcaaaccaattggaactcaatcccgacttctctcgaccaaatagaaaatatacatggaatgatgttggtcaactcgtcgaaaagttgaagaaggagtggaacgtcatttgtattacagacgttgtctataatcataccgctgcaaactctaagtggattcaagagcatccagaatgcgcgtacaatttggttaactccccacatttgaaaccagcatgggttttagaccgcgcactttggagattttcatgtgatgttgctgaaggtaaatacaaagaaaagggtataccagctctgattgaaaatgatcatcatatgaattcaatcaggaaaattatttgggaagatatttttccaaaattgaagttgtgggaatttttccaagtagatgttaataaagctgtggaacagttccgaagacttctcacgcaagaaaaccgtagagttactaagtctgatccaaaccaacacttgacaatcatacaggatccagaatatcgtcgattcggctgtaccgtggatatgaatattgctttaactaccttcattccacatgataaagggccagcagccattgaggaatgttgcaactggttccataaacgcatggaggagctaaatagcgagaaacacaggttgataaattaccaccaggaacaggcggttaactgtcttcttggtaacgttttctatgagagactcgcaggtcatggaccaaaattgggaccggtcacgcgaaaacaccctcttgttacacgatacttcacatttccattcgaagagattgactttagtatggaggagagtatgatacaccttcctaacaaagcttgctttttgatggcgcataatggatgggtaatgggagatgatcctctacgaaattttgccgaaccaggctctgaagtctacctgagaagagaattgatttgctggggagattcggtaaaattacgctatggaaataaaccagaagattgcccgtatctctgggcgcatatgaaaaagtacacggagattacagcaacttattttcagggagttagacttgataattgtcactcaactcctctccatgttgcagaatatatgctcgatgccgctcgaaacctccaacctaatctctatgtagtagctgaactttttacaggatcagaggatctcgataatgtgtttgttactcgactcgggatctcctccttgatcagagaagctatgtcagcttataacagtcatgaggaaggaagactagtttatagatacggtggagaaccagttggatctttcgttcagccgtgcctccgtcctctcatgccggctatcgcccatgccttgtttatggacattacacacgacaatgagtgtccgattgtgcaccgatcagcatatgatgcattgccatccactacaattgtttccatggcctgctgcgcatcaggatctactagaggatacgatgagctggttcctcatcaaatttcggtggtttcagaagagagattttatacgaaatggaatccagaagctctaccgtctaatactggtgaagtcaattttcaatccggtataattgccgctaggtgtgctatttctaaattgcaccaagagttgggagctaaagggtttatccaagtttatgtcgatcaggtagacgaggacatcgtcgctgttacaagacattctccgtccattcatcaatcagttgttgctgtttcacgaacggctttcagaaatccaaagacatcgttctactcgaaagaggtgccgcaaatgtgtatcccaggtaagatagaagaagttgtcctggaagctagaactattgagcgaaatacaaaaccatatagaaaagatgagaattctattaacgggaccccagatatcactgtggaaatacgagaacacatacagttgaatgaatcgaaaattgttaagcaagcaggcgtcgctacaaaaggaccgaatgagtatatccaagaaatcgaatttgaaaatcttagtccaggaagcgtcatcattttcagagtttcacttgacccgcatgctcaagtcgcggttgggattctccggaatcaccttacacaattttcaccacactttaaatctggaagtctagcagttgacaatgctgatccaatcctgaagatacctttcgctagtctagcatcacgtctaacattggcagaattgaaccagattctttacagatgtgagtccgaagagaaggaagatggaggtggatgctatgatattccaaactggtctgctctaaaatatgcaggattgcagggtctcatgtcagttctcgctgagatcagacccaagaatgatcttggacatccgttttgtaataatctgcgctccggagactggatgattgattatgttagtaatcgattaattagtagaagtggaaccattgcagaggttggcaagtggctacaggccatgttcttttaccttaagcaaattccaagatatttgatcccctgttactttgacgctatcttgatcggcgcttacacgactttgctcgacacagcgtggaagcagatgtcttcttttgttcaaaacggatcgaccttcgttaaacatctcagtttgggaagcgttcagttatgtggtgtagggaaattcccgtcacttccaatcctttctcctgctctgatggatgttccatatcgattaaacgagattactaaggagaaagagcaatgctgtgtgtcattagcagccggactaccacacttttcctctggcatattcagatgctggggtagagatacgtttattgcactacgtggtattctcttaattacgggccgttacgtagaagcccgaaatatcatccttgcgttcgcggggacactccgccatggacttatccctaatttgcttggagagggaatttatgctcgatacaattgtagagatgctgtatggtggtggcttcaatgtatacaggactactgtaagatggtccctaatggtctagatattttgaaatgtccggtttcaagaatgtatccgactgatgattcggctccattgccagctggaactctcgaccagcccctatttgaagtcattcaggaggcgatgcagaagcacatgcagggcatccaatttagggaaagaaatgcagggcctcaaatagaccggaacatgaaagatgagggcttcaatattactgcaggtgtggatgaagagactggattcgtctatggaggcaaccgttttaattgcggaacgtggatggataaaatgggcgagtcagaccgcgcgaggaaccgaggaattcctgcgacacccagagatggctcagctgtggaaatcgtcggtctatcaaaatcggccgtgagatggttgctggagctaagtaagaaaaatattttcccttatcatgaagtgaccgttaagagacacggcaaggcaatcaaggttagttatgatgaatggaatcgaaaaatccaagataattttgagaagcttttccacgtctcagaggacccctcggatctgaatgagaaacatccaaatttggttcacaaaagaggaatctataaggattcgtacggtgcctcttcaccatggtgtgattatcaattgagaccaaactttactatagcaatggtagttgctccggaattgttcacaacggagaaagcatggaaggctttggaaatcgctgaaaagaaacttcttggacctctcggcatgaaaacgctagacccagatgatatggtttattgcggcatctatgacaatgctcttgataatgacaattataatcttgctaagggttttaattatcatcagggtcctgaatggctatggccaatcggatattttttgcgggctaaactatacttttcacgattgatgggaccagagacgacagctaaaactattgttctggtcaaaaacgttctatcgcgacactacgtgcatctagagcgcagcccatggaaaggactgcctgagttaacgaatgaaaacgcccagtattgcccattcagctgtgagacacaagcatggtctattgccacaattttagaaaccctttacgatctg

SEQ ID NO: 6071 - DNA, 4596 bp, synthetic construct
  misc_feature 1..4596: note = source = /note="Description of Artificial Sequence: Synthetic coding sequence"
  source 1..4596: mol_type = other DNA
atgggacactccaagcagatccggattctgttgcttaacgagatggagaagctggagaaaacgctttttcgactggaacagggctacgagctgcaatttagactgggaccgacgctgcaggggaaggcagttaccgtctacaccaattatccattccccggcgagactttcaaccgggagaagttcaggtccctggactgggaaaatccaactgagcgcgaggacgactcagacaagtactgtaagctcaatctgcaacaatccggctccttccagtattactttctgcaaggaaacgagaaaagcggaggtggatatatcgttgtggacccgatcctccgcgtgggagctgacaaccacgtccttccgctggactgcgtcactttgcagacttttctcgctaagtgccttggacctttcgatgaatgggaatcgaggctgagggtggcgaaggagtcgggatataacatgatccacttcactccgttgcagactttgggtctgtctcgatcgtgctactcgttggcaaatcagcttgaactcaacccagacttctcccgcccaaaccggaagtacacttggaacgatgtcgggcaactggtcgagaaactgaagaaggagtggaacgtgatttgcatcaccgacgttgtgtataatcacaccgccgccaattcgaagtggatccaagaacacccagaatgcgcgtacaacctggtgaatagcccacatttgaagccggcatgggtccttgaccgcgctttgtggagattctcctgcgacgtcgcggagggcaagtataaagaaaaagggatccccgccctgattgagaatgaccaccacatgaactcgatcaggaaaatcatctgggaggatatcttcccaaagctgaagctctgggaattcttccaagtcgacgtgaacaaagcggtggaacaattcaggcgccttctgacgcaggaaaatagacgcgttacgaagagcgacccaaaccaacacctgaccatcatccaggacccggaatacagacggttcggatgcaccgtggatatgaacatcgccctgaccaccttcataccgcatgataaaggacccgccgcgatcgaggaatgctgcaactggtttcacaagagaatggaagaactgaatagcgaaaagcacaggctgatcaactatcatcaagagcaggcggtgaactgccttctcggaaacgtcttttacgaacgcctggcaggacatggcccaaaactcgggcctgtgacgcgcaagcatccccttgtgaccagatacttcacctttcctttcgaagaaatcgacttctcgatggaggaatctatgatccatctcccaaacaaagcatgcttcctgatggcccataacgggtgggtgatgggagacgatccgttgcgtaacttcgcagagccaggatccgaggtctacctcagacgcgagctgatctgttggggagatagcgtgaagttgcggtacgggaacaagccagaggattgcccgtacctctgggcgcacatgaaaaagtacacggagatcaccgccacttacttccaaggtgtgcgactggacaattgccactcaactcctctgcatgttgctgaatacatgctggacgcagcccggaatctgcagcctaacctgtacgtggtggccgaactctttacgggcagcgaagatcttgataatgtgttcgtgacgcgcctcggaatctcctccctgatccgcgaagcaatgtccgcgtacaattcgcatgaggaagggagactggtgtaccggtacggcggagagcccgtgggatctttcgtgcagccatgcctcagaccacttatgcctgcgatcgctcatgccttgtttatggatatcacccacgataacgagtgtccgatcgttcacagaagcgcctacgacgcactcccatcaactaccatcgtcagcatggcctgttgcgcttccggctcgactagaggctatgacgagctggtcccccatcagattagcgttgtctccgaggagcggttttacactaagtggaacccggaagcccttccgtccaacactggagaggtcaatttccagtcaggcattatcgcggcgcggtgcgctatttcgaaactccatcaggagctgggtgccaagggattcatccaagtctacgtggatcaagtcgatgaagatattgttgcggtgacccgccattcgccttcaatccaccagtccgtggtggccgtgagccggaccgccttccggaaccctaaaacctccttctacagcaaggaagtgccgcaaatgtgcatcccgggaaaaatcgaggaagtggtgctcgaggcccggacgatcgagagaaatactaagccgtacaggaaggacgagaattccatcaacggcacccccgacattactgtggaaattagagaacacattcagctcaatgagtcaaagattgtgaagcaggcaggtgtggcaaccaaaggtccaaatgagtacatccaggaaatcgaattcgaaaacctctcacccggatcagtcattatcttccgcgtctcattggatccgcacgcgcaggtggcagtcggaatcctgcgtaaccacctgacccagttctcaccgcacttcaagtcgggcagcctggcggtggacaatgcggacccgatactgaagatcccttttgcatcgctcgcctctcggctcactctggctgaactcaatcaaatcctgtaccgctgtgagtcagaggaaaaggaagatggtgggggttgttacgacatcccaaattggtcggcgcttaagtacgccggcctccaagggctgatgtcagtcctggccgaaattcgccctaaaaacgacctgggacatccattctgcaataatcttcggagcggcgactggatgatcgattacgtctccaatcgcttgatctcacgcagcggaactatcgcagaggtgggaaaatggctccaagcaatgttcttttacctgaagcagatcccgagatacctgatcccgtgctacttcgacgcgatcctgattggagcctacaccaccctgctggacactgcgtggaagcagatgagctcgttcgttcagaacggaagcaccttcgtcaagcatctgtctctgggaagcgtgcaactgtgcggagtgggcaaatttccgtcgctgccgatactgtccccggctctgatggacgtcccataccgcctcaatgagatcactaaggaaaaggagcagtgttgtgtgtccctcgcggcgggactgccgcacttctcatcgggaatcttccgttgctggggtcgagacaccttcatcgcccttcgcggtatcctgctcatcacgggccgatacgtggaagctcggaacatcattctcgccttcgccggcaccttgcgccacggtctgatccccaatttgctgggtgaaggaatctacgccagatacaactgccgcgacgccgtttggtggtggctgcagtgcatccaggattactgtaagatggtcccgaatggactcgacatcctgaagtgcccagtctcgcgcatgtaccccactgatgattccgcaccgctcccggccggcaccctcgaccaacctctgttcgaggtgattcaagaagcgatgcagaagcacatgcaaggaatccagtttcgcgagcgtaacgccggaccgcagatcgatcggaacatgaaggatgaaggcttcaacatcactgccggggtggatgaggaaaccggatttgtgtatggcggaaaccgcttcaactgcggtacctggatggacaagatgggggaatcagatagggccagaaatcggggcatccccgcaaccccccgcgacggaagcgccgtggagatcgtcggcctctcaaaatcggcagtgcgctggctgctcgaactgtcaaagaagaacatattcccgtatcatgaagtgaccgtgaaacgccacggtaaggccatcaaggtgtcttacgacgagtggaatcgcaagatccaggacaatttcgagaagttgtttcatgtgtctgaagatccgtccgacctgaacgaaaaacaccctaacctggtccacaaacggggaatctacaaggattcgtacggagcctcttcaccgtggtgcgactaccagcttcgcccgaactttaccattgctatggtggtcgcacctgaactgttcacgaccgagaaagcgtggaaggccctcgaaatcgctgagaagaagctccttgggccgctggggatgaaaactttggaccctgacgatatggtgtactgtggaatctacgacaacgctctggacaacgacaactacaacctcgccaagggctttaactatcatcagggaccggaatggctctggccgatcgggtactttctgagggccaagctctacttctcgcggctgatggggccggaaaccactgcaaaaaccatcgtcttggtgaagaacgtgttgtctcggcactacgtgcatctggagcgaagcccgtggaagggattgcctgaactgaccaacgagaatgctcagtactgccccttctcgtgtgaaactcaggcgtggtcgattgctaccatccttgaaacgctgtacgatctc

SEQ ID NO: 6072 - DNA, 4596 bp, synthetic construct
  misc_feature 1..4596: note = source = /note="Description of Artificial Sequence: Synthetic coding sequence"
  source 1..4596: mol_type = other DNA
atgggtcactcaaagcagatccggatactcctgctgaacgaaatggagaagctcgaaaagaccctgttccggttggaacagggatacgagctgcagttcaggctgggaccgacgttgcagggcaaggccgtcactgtctacaccaactacccttttccaggcgagactttcaatcgcgagaagttccggtccttggactgggaaaatcccacggagcgcgaggacgatagcgataagtactgtaagctcaatttgcagcagtcgggttcctttcagtattactttctgcaagggaacgaaaaaagcggcggaggatatatcgtggtggatccaatcctgcgggtgggcgctgacaaccacgtcctgcctctggactgtgtcaccctccaaacctttttggcaaagtgtctcgggccttttgacgagtgggagtccaggctgcgggtggcgaaggaaagcggatacaatatgattcacttcacccctctgcagactctgggtctgtccagatcatgctactcgctcgccaaccagctggagctcaatccggacttctcaaggcctaatcggaagtacacctggaatgatgtgggccagctggtggaaaagctcaaaaaagaatggaatgtgatctgcatcaccgacgtagtctacaaccacactgctgcgaattccaagtggattcaggaacacccggagtgtgcctacaacctcgttaactcgccgcatctgaaacccgcctgggtcctggatcgcgccctgtggcgcttcagttgcgacgtggcagaaggtaaatacaaggaaaagggaatcccggcactgattgagaatgatcatcacatgaactcaatccggaagatcatctgggaggatatcttccccaaattgaagttgtgggagttcttccaagtggacgtgaataaagcagtcgagcaatttagacggctgctcacccaagagaatcgtagagtgactaaaagcgacccgaatcaacacctgacgataatccaagaccctgagtatcggcggttcgggtgcaccgtagatatgaacatcgccctcaccactttcatcccgcacgataaggggcctgctgcaatcgaggaatgttgtaattggttccacaagagaatggaagaactgaactcggaaaagcacagacttatcaattaccaccaagaacaggcggtgaattgcctgctgggcaacgtcttttacgagagactggcaggccatggcccaaagctcggtccggtgaccaggaagcacccattggtgaccagatacttcacgttccctttcgaggaaatcgacttttcgatggaggagtcgatgattcatctgccaaacaaggcctgcttcctgatggcccacaacggctgggtgatgggggacgatcctcttagaaacttcgcagaaccgggctcagaagtgtatctccgaagagaactcatctgctggggtgactccgtgaaactccgttatggcaacaagccagaagattgtccatacctgtgggcgcatatgaaaaagtacactgaaattactgctacttacttccaaggggtgcggctggacaattgccattccacgccgctgcatgtggctgagtacatgcttgatgcggccagaaacctccagccgaatctgtacgtcgtcgccgaacttttcactgggagtgaggacctggacaacgtctttgtgactcggctcggaatctcatcgctgatccgggaagcaatgagcgcttacaattcccacgaggaaggaaggctggtgtaccggtacggaggagaacctgtgggctcgtttgttcagccttgcctcaggccactgatgccagccatcgcccatgcgctgttcatggatattactcacgacaacgaatgtccgatcgttcaccgatcggcttacgatgcattgccgagcactaccatcgtctccatggcgtgctgtgcaagcggatccacccggggatacgatgagctggtaccgcaccagatatcggtcgtgtcggaggaacgcttctacaccaagtggaacccggaagccctgccttcgaacaccggcgaggtgaacttccaatcgggaattatcgctgcacgctgcgccatctccaagctccaccaggaactgggagccaagggctttatccaagtctatgttgatcaggtcgatgaagatatcgtggccgtcactcgccactcaccgtctattcatcagtcggtcgtggctgtgtcgagaactgcctttcggaaccctaagacctcattctactccaaggaggtgccgcagatgtgcatcccggggaagatcgaggaagtggtgttggaggcccgcaccattgagcggaatacgaaaccgtatcggaaggatgaaaattcaatcaatggaactccggatatcacggtggaaatcagggaacatatccagcttaacgagtccaagattgtcaagcaagcgggagtggccactaagggcccgaacgaatacatccaagagattgagtttgaaaatctttcaccaggatcggttatcatcttccgggtgtcactggatccacacgcacaagtcgcggtgggaatcctgcgtaaccacctgacccagttctcgcctcatttcaagtcaggctcgctggccgtggataacgctgatccgattctcaaaatcccatttgccagtctggcatcgaggctgacgctcgccgaactgaatcagatcctgtacagatgcgaatccgaagagaaagaggacggaggcggatgctacgacattccaaactggtccgcacttaagtatgccgggctgcagggactgatgtcagtcttggcagagatccggcccaagaatgacctcggtcatccgttctgcaacaacctccggagcggagactggatgattgattacgtgtcaaatcggctcatttccaggtccggaacgatcgcagaagtgggcaaatggctgcaggccatgtttttctacctgaaacaaatccctcggtacttgatcccgtgctacttcgatgcaatcctcataggtgcgtacactacccttctggataccgcatggaagcagatgtcctcgttcgtccagaacggctccacttttgttaaacacctgtccctgggatcggtgcaactgtgcggggtggggaagttcccgtcgttgccgatcctgtctccggccctcatggacgtgccctaccgcctgaatgagatcaccaaggaaaaggagcagtgctgcgtgtcactcgcggcagggctcccccacttctcatcgggaatctttaggtgctggggacgtgacaccttcattgcactcagagggatcttgctgatcactggccgctacgtggaagcgcggaatatcatcctcgctttcgccggcaccctgcgccatggactcatcccgaacctgctgggagagggtatatacgcccggtacaactgcagagatgcggtctggtggtggctccagtgcatccaagactactgtaagatggtgccaaacggactggacatcctcaagtgtcctgtgtcccgcatgtacccaactgacgacagcgctccgctgccggccggtacgctcgaccaacccctgttcgaagtcatccaagaggccatgcaaaaacacatgcagggtatccaatttagagaaaggaacgccggcccccagattgacagaaatatgaaagacgaaggattcaacatcactgcgggagttgacgaagaaactggcttcgtctacggagggaatcgctttaactgcggcacctggatggacaaaatgggggagagcgatagagcccgcaaccgggggatacccgccaccccgagggacggcagcgccgtggaaatcgtgggactgtcgaagtctgctgtgcgctggctgctcgaactgtcgaaaaagaacatcttcccctaccacgaagtgaccgtgaaaagacatggtaaagccatcaaggtcagctacgacgagtggaaccgcaagatccaggacaatttcgaaaaactcttccatgtgagcgaagatccaagcgacctcaatgaaaagcatccgaatttggtgcacaagcgcggcatctataaggactcgtacggagcctccagcccctggtgcgattaccagctgaggccaaactttaccatcgcaatggtggttgcgccagaactgttcaccacggaaaaggcttggaaggcgctcgagatcgcagagaagaaattgctcggacctctgggaatgaaaaccctggacccggatgacatggtgtattgcggaatctacgacaacgccctcgacaacgataactataatctggcgaaagggttcaactaccaccagggaccggagtggctctggccaatcggatactttctgcgcgccaagctgtacttctcacggctcatgggacctgagactactgctaagaccatcgtgctggtgaaaaatgtcctgtcaagacactacgtgcatctcgagcgcagcccgtggaaggggctgccggaactcaccaacgaaaatgcccagtactgccctttctcgtgcgaaacccaggcgtggtccatcgcaaccatcctggaaaccctttacgacctt

SEQ ID NO: 6073 - DNA, 4596 bp, synthetic construct
  misc_feature 1..4596: note = source = /note="Description of Artificial Sequence: Synthetic coding sequence"
  source 1..4596: mol_type = other DNA
atgggacattcaaaacagatcagaatcctgctcttgaatgagatggagaagttggagaaaactctcttcagattggaacagggatacgaacttcaattccggctgggcccgaccctgcagggcaaggcagtgaccgtttacactaactacccgtttcctggagaaactttcaaccgggagaaattccgctcactggattgggagaacccgactgagcgagaagatgactcagacaaatactgcaagttgaacctgcagcaatcggggtcgttccagtactacttcctccaagggaacgaaaagtccggcggcggatacattgtggtggacccgatcctccgggtgggagctgacaaccatgtgctgccactggattgcgtgaccctgcagacttttctcgcaaagtgtctggggccattcgacgaatgggaatcaagactgcgggtcgccaaggaatccgggtacaatatgattcactttactcctctgcaaaccctggggctctcgcgctcgtgttactcgctggctaatcagctggaactgaaccccgatttcagccgcccaaatcgtaagtacacttggaatgacgtcgggcaactggtggagaagctgaagaaagagtggaacgtgatctgcatcaccgacgtggtgtacaatcacactgcggccaatagcaagtggatccaagaacaccccgaatgcgcctacaatctggtgaattcccctcacttgaagcctgcctgggttctggacagagccctgtggagattctcctgcgatgtggcagaaggaaagtataaggagaaaggcatcccagcactgatcgagaatgaccaccacatgaattcgatacgcaagatcatctgggaagatatctttcctaagctgaaactctgggaattcttccaagtggacgtcaacaaagccgtcgaacagttccggcggctcctgactcaggaaaacagaagggtgactaagtcggaccctaaccagcatctcaccatcattcaggatccagaataccgcagattcggctgtacggtggatatgaacattgccctgaccactttcatcccacatgataaaggtcctgcagcgatcgaggaatgctgtaattggttccataagagaatggaagagctgaattcggaaaagcatcgcctcatcaattaccaccaggaacaggcagtgaactgcctcctgggtaatgtattctacgagaggctggctggacatggacctaaacttggccccgtcactcggaagcacccgctggttaccagatacttcaccttcccgttcgaggagatcgacttctcgatggaggaatcgatgattcatctccctaacaaggcctgctttctgatggcgcacaacgggtgggtgatgggagacgacccgcttcggaacttcgcggaaccgggatcagaagtttacctgcgccgggaactcatttgctggggagactcggtgaaacttaggtacgggaacaaaccagaagattgcccatacctgtgggctcatatgaaaaagtacactgaaatcactgctacctactttcagggggtccgcctggacaactgccactccaccccgctgcacgtggccgagtacatgctggacgcggctcgaaacctgcagccgaacctctacgtcgtcgcggagttgtttactggttcggaagatttggacaatgtctttgtcactcgccttgggatcagctcattgatacgcgaggccatgtccgcatacaattcgcacgaagaaggccgcctcgtgtaccggtacggaggagaaccggtgggttcgttcgttcaaccgtgtctgcggccactgatgcctgctatcgcacacgccctgttcatggatatcacccatgataacgaatgcccgattgttcaccggagcgcgtacgatgccctgccatcgactactatcgtctcaatggcctgctgtgcctctgggagcacccgcggctacgatgaactcgtgccacaccagatctcagtggtgagcgaagaacgtttttacactaaatggaacccggaggccctgccttccaacaccggtgaggttaacttccaatccggaatcatcgccgcaagatgcgcaatctccaagctgcatcaggagctcggagcgaagggattcatccaggtgtacgtcgatcaggtggatgaggatattgtggcggtcacgagacactcaccgtccatccaccagtcagtcgtggctgtgagccggaccgcattccgcaacccaaaaacgtccttttactcgaaggaagtcccacagatgtgcatcccaggaaaaatcgaggaagtggtcctcgaagcgcgcaccatcgagcgtaatactaagccatacagaaaggacgaaaattccatcaatggaaccccggacatcaccgtggagattcgggagcacatccagctgaacgaatcaaagatcgtgaaacaggccggtgtggcgacgaaaggaccgaacgagtacatccaggagatcgagtttgaaaacttgtcgccagggtcagtgatcatcttccgggtgagcctcgaccctcatgctcaggtagccgtcggcattctccgcaatcacttgactcagttctcaccacatttcaagtccggctccctggctgtcgataacgcggatccgatcctcaagatcccgttcgcgtcgttggcgtccagattgacccttgcggaactgaaccaaattctgtacagatgtgaatcagaagagaaggaggacggcggtggatgttacgacatcccaaactggtccgctcttaagtacgctggactccaaggactcatgtcggtacttgcagaaatccggcctaagaatgatctgggacacccgttttgtaacaatctgcggtcgggtgactggatgatcgactacgtctcgaaccgattgatctctaggagcggaactatcgccgaagtgggaaagtggctgcaggctatgttcttttacctcaaacagatcccgcgctacctgatcccgtgctactttgacgcgatcctcatcggggcatacaccactcttctcgacactgcgtggaaacagatgtcatcattcgtgcagaacggtagcacctttgtcaagcatctctccctggggtccgtgcagctgtgtggcgtgggcaagtttcccagcctccctattcttagcccggcgctcatggacgtgccatacagactgaatgagatcactaaggaaaaagaacagtgctgcgtctctctggccgcaggactgcctcattttagctccggaatctttaggtgttggggacgggacactttcattgcgctgaggggaatcttgttgattaccgggagatacgtggaggcccggaacattatcctggccttcgcagggactctcagacacggactcatccccaatttgctgggtgaaggaatctatgcaagatacaattgtcgggacgccgtgtggtggtggctccagtgcatccaggactactgcaagatggtgccgaacgggctcgacattctcaagtgcccagtgtcgcggatgtaccccactgacgactcggcgcctcttccggcaggcacccttgaccaacctctgtttgaagtgatacaggaggcaatgcagaagcacatgcagggaatccagttcagagagcgcaacgctggccctcaaattgataggaacatgaaagacgagggatttaacatcaccgccggagtggacgaagaaaccggcttcgtctacggaggcaaccggttcaattgcggaacctggatggacaaaatgggagagtcggaccgggccagaaatcgggggatccccgcaaccccgagagacggctccgctgtcgaaatcgtcggactgtcaaaatcggccgtgaggtggttgctcgagctttccaagaagaatatcttcccataccacgaagtgacggtgaagaggcacggaaaggccatcaaagtctcttacgacgaatggaaccgcaagattcaagacaacttcgaaaagttgttccatgtgagcgaggatcctagcgacctgaacgaaaagcatccgaacctggtccataagcggggaatctacaaagactcatacggcgcatcatcaccatggtgcgattaccagctgcgtccgaacttcacgatcgcgatggtggtggcgcccgaactgttcactacggagaaggcgtggaaagcgctcgaaattgcagaaaagaagctgctcggaccattgggcatgaaaaccctggacccggacgacatggtttactgcggcatttacgacaacgcgctggataacgacaactacaaccttgccaagggattcaactaccaccaaggacctgaatggctttggccaatcggctacttcctcagagcgaagctgtatttctctcgcttgatgggaccagagactactgccaaaactatcgtcctcgtgaagaacgtcctgagcaggcactacgtgcatctggaaagatcgccgtggaagggcctgcccgaactgactaatgagaacgcgcagtattgccccttctcctgcgagactcaagcatggtccatcgcgactatcctggagactctgtacgatctt

SEQ ID NO: 6074 - DNA, 4596 bp, synthetic construct
  misc_feature 1..4596: note = source = /note="Description of Artificial Sequence: Synthetic coding sequence"
  source 1..4596: mol_type = other DNA
atggggcattcaaagcagatccgcatcctgttacttaacgaaatggagaaactggaaaaaactctgtttcggctcgagcagggctatgaactgcagtttcgattagggcccactttgcagggtaaggcagttaccgtatacacaaattacccgttccctggcgagacatttaaccgcgaaaagttccgaagcctagactgggagaatcctacagaacgagaggatgatagtgataagtactgtaagttgaacttgcaacagtctggatcctttcaatactattttctccagggcaacgaaaaaagtggtggcggttacatcgtggtggatccaattctgcgcgtgggggccgacaatcatgtgctgccattagattgtgtgacattacagacatttctcgctaaatgcttaggcccgtttgacgagtgggagtctaggctgagagttgcaaaagaatccggttacaacatgatccatttcacccctttacaaaccttaggcctgagccggagttgttactctctggccaaccagctggagctcaatccagactttagcagacctaacagaaagtacacttggaatgacgtaggacagctggtagagaaacttaaaaaagaatggaatgttatttgcatcaccgacgtggtgtataatcatactgcagccaatagcaagtggatccaggagcatccggagtgtgcatataacctcgtgaactctccccacttgaaacccgcttgggtgttagacagggcactgtggaggttctcatgcgacgtagcagagggcaaatataaagagaaagggattccggccctaatagaaaatgatcaccacatgaacagcatccgcaaaattatatgggaagacatcttccccaaactcaaactgtgggaattctttcaggtcgacgtgaacaaggccgtggagcagtttcgtcggttgctcacgcaggagaaccgacgcgtgacaaagtccgatcccaaccagcacctgacgatcattcaggacccagagtatcgccggttcggatgtactgtcgacatgaatattgcactcactactttcataccccacgataagggccctgccgctatcgaggagtgctgtaactggttccataagcgaatggaggagctcaattctgagaagcaccgcctgattaactatcatcaggaacaggctgtaaattgcctactcggcaatgtattctatgagcggctagccggacacggacccaagctgggacctgtgactagaaaacacccattagtcacaaggtacttcacttttccttttgaggagatagacttctcgatggaggagagtatgattcacctgcctaacaaggcctgctttctaatggcacataatggatgggtgatgggcgacgacccgcttcgcaatttcgcggagccaggcagtgaggtgtatctgcggcgagaacttatttgttggggcgactccgttaaacttcggtacggtaacaaacctgaagactgtccttacctatgggcccacatgaaaaaatacaccgagatcacagcaacatatttccagggagtgcgcctggataactgccacagcaccccattacatgtggccgaatatatgttagacgctgcacggaacctgcaacctaatctgtatgttgtggcagagctctttacagggagcgaggacctagataatgtgttcgtgacccgactcggtatttccagcctgatccgggaggctatgagtgcctacaacagtcatgaagagggtcgactcgtgtacagatatggcggggaacctgttggttcttttgtgcagccctgcttgcggcccttgatgcctgcgattgctcacgcactcttcatggatataacacacgacaatgagtgccctattgtgcacaggtccgcttacgatgcgctcccctccactacgatcgtcagcatggcctgctgtgcctctggcagtacccgagggtatgatgaactagtccctcaccagatttcggtggtctccgaagagagattttacacaaagtggaatccagaagcgttaccgagcaatacaggcgaagtgaattttcagagcggaattatagcggccaggtgcgcaatctctaagctacatcaggagctgggcgccaaaggattcatacaggtgtatgtcgatcaggtcgatgaagacattgtagctgtaaccagacactcccctagcatccaccaatctgtggttgccgtctcaagaacagcgttccgaaaccctaagacaagtttttatagcaaagaagtgccacagatgtgcatccccggtaaaatcgaagaggtagtgctggaggcccgaacaatcgagcgcaataccaaaccttaccggaaagatgagaattccataaacgggacccctgatatcactgtggaaatcagggagcatatccaactgaacgaatcgaagatcgtcaagcaggccggcgtcgctactaagggacctaacgaatatatacaggaaatcgaattcgaaaatctgagtccaggctccgttatcatctttcgtgtctctctggaccctcatgctcaagtcgcggttgggatcctgagaaatcacctgactcagttcagtccacatttcaagtcagggtcgcttgccgtcgacaatgcggacccgatcctaaaaatcccattcgctagcctcgcatcccggctcactcttgctgagctcaaccagatcctatacagatgtgaatcagaggaaaaggaggatggaggcggatgctacgacattccaaattggagcgccttgaagtacgctggcttacagggcttgatgagcgtcctggcggaaatacggcccaagaacgacctcggccaccctttctgcaacaacttgcgctcgggggattggatgatagattatgtgtcaaataggctgatcagtcggtcagggacgatcgcagaggtgggaaagtggttgcaggccatgttcttctacctgaagcagattcctagataccttatcccctgctacttcgacgcaatattgataggggcctatactacactgcttgacacagcttggaagcagatgtcaagtttcgtgcagaatggcagcaccttcgtcaaacacctctccctaggcagtgtccaactttgcggggtcggtaaattcccctccctgccaatattatcgccagcccttatggatgttccatatcggttgaacgagattactaaggagaaggagcagtgctgcgtgagcttagctgccggactcccacatttctctagcggtatctttcggtgttggggacgagacaccttcatcgccctccgtggaatattgctgatcacgggtcgctatgtggaggcaagaaatattatccttgcttttgctggcaccctgcgtcatggattgatccctaatctcctcggagaggggatctatgcacgctataactgccgtgatgccgtgtggtggtggttacagtgcatccaggattactgtaaaatggtgcctaacgggttggatatcctgaaatgtcctgtgtctcggatgtatcctaccgacgattcggccccccttcccgccggtacactcgatcaacctttatttgaggttattcaggaagcaatgcagaaacacatgcaggggatccaatttagagagcgaaacgctggcccacagatcgaccggaatatgaaagatgaaggcttcaacatcaccgcaggggttgacgaggaaaccggtttcgtttacggaggcaatagatttaactgcgggacttggatggataagatgggagaatctgaccgggctagaaacaggggcatccctgccacaccccgcgacggctctgcggtggaaatagtgggtttgtccaagtcagccgttcgttggcttctcgagctttcaaaaaagaatattttcccgtaccatgaggtcactgtgaaacggcatgggaaggcgatcaaagtgagctacgacgagtggaaccgcaagatacaggacaactttgaaaaattgttccacgtgtccgaggatcctagtgaccttaatgaaaaacatcccaatctggtgcacaagagagggatttacaaggattcctacggggcttcttctccctggtgtgactaccagctgcgccccaattttacgattgctatggttgtggctcctgaactctttaccactgagaaagcctggaaagcattggagatcgccgaaaagaagttactggggcccttaggaatgaagacactggatccagacgacatggtgtattgcggcatatatgacaatgcgttggataacgacaactacaacctggccaaggggttcaattaccaccagggaccagagtggctgtggccgattggctattttctgcgggcaaagctgtatttttcccgcctcatgggcccagagaccaccgccaagaccatcgttctggtaaaaaacgtgctatcacgccattacgttcacctggaacgctcgccctggaaaggactccccgagctaacaaacgagaacgcccagtactgcccatttagttgtgaaacccaggcgtggtcaatagctaccatcctcgaaaccctgtacgacctc

SEQ ID NO: 6075 - DNA, 4596 bp, synthetic construct
  misc_feature 1..4596: note = source = /note="Description of Artificial Sequence: Synthetic coding sequence"
  source 1..4596: mol_type = other DNA
atgggtcattcaaagcagattaggattctgttgctcaacgagatggaaaaactcgaaaagaccctttttcgcttggagcaaggatacgaacttcagtttagactcggcccgaccctgcagggcaaggccgtcaccgtgtacaccaactacccttttcccggagaaacttttaacagagaaaagtttcgctccctggattgggagaaccctaccgagagggaagatgatagcgataagtactgtaagctgaacctccagcagtccggatcgtttcagtactacttcctccaaggaaatgagaagtcagggggaggatacattgtggtggacccaatccttagggtgggagcagataaccacgtccttccgcttgactgcgtcaccctccaaacgttccttgcaaagtgtctgggaccatttgatgaatgggaatcccgtctgagagtggcgaaggagagtgggtacaatatgatacacttcaccccgcttcagactctgggactctcacgttcctgctactccctggccaaccagctggagctcaatcctgatttttccaggcccaacagaaaatacacctggaacgacgtgggacagctcgtcgaaaagctcaagaaggagtggaacgtgatctgtattaccgatgtggtctacaatcataccgcagccaactccaagtggatccaggaacatcctgagtgcgcatacaacttggtgaattccccacatctgaagcctgcatgggtgctggacagagccctgtggagattctcgtgcgatgtcgcggagggcaaatacaaggagaaaggaattcctgcactgatagaaaatgatcatcatatgaactctattcgcaagatcatttgggaggacatttttcctaaactcaagctgtgggagttcttccaagtcgatgttaacaaggcagtcgaacaatttcgtcggctgcttactcaggagaacaggcgggttaccaagtcggacccaaaccaacatttgaccattatccaggacccagagtatcgcagatttggctgtaccgtcgacatgaacattgcgcttactacctttattccacacgataagggtcctgcagccatagaggagtgctgtaactggtttcacaaacggatggaagagctgaatagcgaaaagcacagacttatcaattatcaccaagaacaagcagtaaactgtctgcttggtaacgtcttttacgaacggctcgcgggccacggtccaaaactgggtccggtgactcgcaagcatcctcttgtgaccaggtatttcacctttccttttgaagaaatagatttttccatggaagagtcgatgatccatcttcctaacaaggcatgcttcctgatggcacataacgggtgggtgatgggagacgatcctctgcgcaactttgcagaacctggatcggaagtgtacctgagacgcgaactcatttgttggggagatagcgttaaacttcgatacggcaacaagcccgaagattgtccatacctctgggcccatatgaaaaagtatactgaaattactgcaacctactttcagggcgtgcggcttgataattgccactcaacgccccttcatgtggcagaatacatgttggatgcagcccgtaacttgcagcctaatttgtacgtggtggccgagcttttcaccggctccgaggatctggataacgtgttcgtgaccagacttggtatctcctcactgattcgtgaggctatgtcggcctacaatagccatgaagagggacggcttgtgtaccgatacggcggggaaccagtgggatcctttgtccagccttgtctgcggcccctcatgccagctatcgcacacgcactcttcatggatataactcacgataacgaatgcccaatcgtccatcggagcgcgtacgatgcgttgccttcaacgaccattgtcagcatggcatgctgtgcaagcggctcgacccggggatacgatgaacttgttcctcatcaaataagcgtcgtgtctgaagaacgcttttacaccaagtggaatcctgaagcactcccttcgaacactggggaagtcaattttcaatccggtataatcgcagcaaggtgcgcaatctccaagttgcatcaggaactgggtgccaagggtttcatccaagtgtatgtcgatcaagtcgacgaggatattgtggccgtgactaggcattccccatcgatccatcaaagtgtcgtcgcagtgtcgcgcaccgcgttccgtaacccgaaaacctccttctactcgaaagaggtgccgcagatgtgtatcccaggcaagattgaagaggtcgtgctggaggcaagaaccattgagcggaacaccaaaccttacagaaaggatgaaaattccattaacggaactcccgatattaccgtcgaaatccgagaacacattcaactcaacgaatccaagattgtgaagcaggcgggggtggcaacgaaggggcccaacgagtacattcaggagattgagtttgaaaacctgagcccgggatcagtcatcatctttagagtgagtctcgacccacatgcacaggtggcagtgggcatcctgaggaaccatctgacccagttctctcctcactttaagtcaggttcccttgcagtggataacgccgatcctatcctgaagatcccgtttgcgtcgcttgcatcacgactcactctggctgagctgaaccaaatcctgtatagatgtgaatcggaggagaaggaagatgggggcgggtgttacgatatccccaattggtccgccctgaagtacgcaggactgcaaggactgatgtcagtgctggctgagattcggcctaagaacgatcttggacaccctttctgtaataacctccggtcgggagactggatgatcgattatgtttccaacagattgatctcccgttcggggaccattgccgaggtcggaaagtggctccaagccatgttcttttacctcaaacagatacctcggtacttgattccatgctacttcgatgctattctgattggagcatacactactcttcttgatactgcctggaagcaaatgtcgagctttgtgcaaaacggatccacttttgtcaagcatctgtctctgggctcggtgcagctctgtggcgtgggtaagttcccatcactccccatcctttcgccggcccttatggatgtgccctaccggcttaacgaaataactaaagagaaggaacaatgttgcgtgagcctggcagccggtctgccacactttagcagcggtatctttcgatgttggggccgcgatactttcatcgctctccgtggcatcctgctgattaccgggaggtacgtggaggcccgaaatatcatacttgccttcgctggcactcttcgacatggtctgatccctaatctgctgggagaaggaatctacgcaagatacaactgtcgggacgctgtgtggtggtggctccaatgcatccaagattactgtaaaatggtgcccaatggtcttgatattctgaaatgtcccgtttcgcgcatgtatccaaccgatgattccgcacctctcccagcaggtactctggaccagcctctttttgaagtgatacaggaggcaatgcagaagcatatgcaaggaatccaattcagggaaagaaatgcagggcctcagatcgatcgcaacatgaaggatgagggctttaacattacggcaggtgtggatgaggaaacgggatttgtgtacggaggaaacaggtttaactgcgggacctggatggataagatgggggagtcggatcgtgcccgtaatagagggatcccggcgactccccgtgacggttcggcagtggaaattgtcgggttgtcgaagtccgcggtcagatggcttctcgagctttccaagaagaacatttttccgtaccatgaggtgactgtcaagaggcacggaaaagctataaaggtttcgtatgatgagtggaacagaaagattcaagataactttgaaaagctctttcacgtgtcagaagatccctccgatttgaacgaaaagcacccaaaccttgtgcataagagaggaatttacaaggattcttacggcgctagcagcccttggtgtgattatcagctgcggcctaacttcactatcgccatggtggtcgcaccagaactgtttactactgaaaaagcctggaaagcgctcgagatcgcagaaaagaagctcctcggtccactcggcatgaaaaccctggacccggatgacatggtgtactgtggaatttacgacaacgcactggataacgataactacaatctcgcaaaaggatttaactaccatcaaggaccagagtggctttggcctatcggctactttcttagagcaaaactttacttttcgagactgatggggcctgagactaccgccaagactatcgtgctggtgaaaaacgtgttgtcgcgccattacgttcacctggaacgctccccctggaaggggctccccgaacttaccaacgaaaatgcacagtactgccccttttcatgtgaaactcaagcatggtctattgctacgatcctcgaaaccctttacgatctg

SEQ ID NO: 6076 - DNA, 4596 bp, synthetic construct
  misc_feature 1..4596: note = source = /note="Description of Artificial Sequence: Synthetic coding sequence"
  source 1..4596: mol_type = other DNA
atgggtcactccaaacaaatccgtatcttgctcctcaatgagatggagaagctcgaaaaaaccctctttaggcttgagcagggttatgagctacagtttagactaggtccaacactgcaaggtaaagctgtgacagtttacaccaactaccccttccccggcgagactttcaatagagaaaagtttaggtcacttgattgggagaaccctacggagagagaagatgactccgataagtattgcaaattaaatttgcaacagtctggcagctttcagtattactttctccaaggtaacgagaaaagcggaggaggatatattgttgtagatcccattctccgtgttggggctgataatcatgtccttcccctggattgtgtgaccttgcagacttttctcgccaaatgcttgggtccattcgatgaatgggagtcacgattgagagttgccaaagaaagtggatataatatgattcattttacaccattgcaaactcttggtttaagtagatcttgttacagtcttgcgaaccagttggaactcaaccccgacttcagtaggcccaataggaagtatacctggaacgatgtgggccagcttgttgagaagttaaagaaggagtggaatgttatatgtattactgatgtggtttataaccatactgctgctaattccaagtggatccaagagcatccagaatgcgcttacaatcttgttaattctccacaccttaagcccgcttgggttcttgacagagccttatggcgcttctcatgtgatgttgccgaggggaaatacaaggaaaagggaatccccgcattgattgaaaacgaccaccacatgaattctattcgaaaaatcatttgggaagatatttttccgaaactcaaattgtgggaatttttccaagtcgacgtgaataaggcagtggaacagtttagacggctgcttacacaagagaaccgtagagttacgaaaagtgatcctaatcaacatttgacaattattcaagatcctgaataccgcagatttggttgtacagttgatatgaacatcgcactcactacatttattccacatgataagggacccgcagccattgaggaatgttgtaattggtttcataaacgaatggaagaactgaacagtgaaaagcatcgattgataaactaccaccaagagcaggccgttaactgccttttgggaaatgttttttacgagcggcttgcaggacatggtcctaagcttggtccagtgacaagaaagcatcctctggtcacacgatatttcacctttccgtttgaagagatagatttttcaatggaggagtctatgattcatcttcctaacaaggcttgttttttaatggctcataatgggtgggttatgggggatgatccattgagaaatttcgccgaaccagggtccgaagtctatttgaggagggaattaatatgctggggagactcagttaagcttcgctacggcaataaacctgaggattgcccatacttgtgggctcacatgaaaaagtacacagagattacggcaacttacttccaaggggtcaggcttgacaattgccacagcactccacttcacgtggctgaatacatgctggacgccgctaggaatttacaacccaatctttatgtggtcgcagagctgtttacggggtcggaagatctagataacgtattcgtgacaaggttgggtatttcttcgttaataagagaggcaatgagtgcatataatagtcatgaagagggaaggctggtctatcggtacggcggagaacctgttggatcatttgttcaaccctgtctgcgaccattaatgcctgccattgcgcatgccttgttcatggacatcacccatgataacgagtgtccaattgttcatagaagtgcttacgatgcactgccctctacaacgattgtatctatggcatgttgcgcttccggttcgacccgtggttatgatgagctagtgccacatcagatcagtgttgtttcggaagaacgattttacacaaagtggaaccccgaggcactcccgtcgaacaccggtgaggtcaattttcagtccgggattatcgcagccaggtgtgccatttctaaacttcatcaagagttgggtgctaaagggttcatccaagtttacgtggatcaggttgacgaggatattgtggctgttactcgtcattcgccatctatccaccagtctgtggtagctgttagtagaacggcgttcagaaaccccaaaactagcttttatagtaaagaagtaccccagatgtgtatacctgggaagatcgaggaggttgtgcttgaagctagaacaattgaaagaaacacaaaaccttaccgtaaagacgagaactctatcaatgggaccccagacataacggtcgaaatacgcgaacacatacaacttaacgaatcgaagatagtgaagcaggcaggggtcgccaccaagggtcccaatgaatatattcaggagatcgaatttgaaaacctctcaccaggtagcgtgattatcttcagggtttcactcgatcctcatgctcaagttgctgtgggtatcttacgcaatcatctcactcagttttcacctcattttaaatcagggtctctcgcagtagataatgcagatcctatccttaagattccttttgcttcacttgcatcaagactaacgcttgcagagctcaatcaaatactttacagatgtgagtctgaagagaaagaagacggcggcgggtgttatgatattccaaactggtccgctcttaagtacgccggtctccaaggtttgatgtccgttctcgctgagatacgtcccaaaaacgacctcggacacccattttgcaacaatctgcgttccggtgattggatgattgactacgtaagtaacaggctcattagccgttcgggaaccattgcagaggttgggaagtggctgcaagcaatgtttttctatcttaagcaaattccaagatatttgatcccttgttattttgatgcaattttgattggtgcttataccacattactagatacagcttggaagcagatgagctcgttcgttcaaaacggctccactttcgtgaagcatttgagcttgggttccgttcagttgtgtggtgtgggtaagttcccatctctccccatcctctcgccagctctgatggatgtcccttaccggttgaatgagatcaccaaggagaaggagcagtgttgtgtatcacttgctgcaggtttaccccacttctcctctggaatttttagatgctggggacgtgacaccttcattgcgctcaggggcattcttttgataactggcaggtacgtggaggccaggaatattattctcgcattcgccgggacccttcgtcatggtcttattccaaacttgctaggggagggcatctacgcacggtataattgcagggacgctgtttggtggtggctgcagtgtattcaggattattgtaaaatggttccaaacggtctggatattcttaagtgcccggtgtcccgaatgtatcctaccgatgactccgcgccattaccagcaggaacactagatcagccactgtttgaagttatacaagaagccatgcaaaaacatatgcagggaatacaattccgtgagagaaatgcgggacctcagattgatagaaacatgaaagatgaaggattcaatatcaccgccggagtcgatgaagagactggattcgtctatggaggtaatcgcttcaattgcgggacctggatggataaaatgggagaatctgatagagcgagaaatcgaggaattccagcaacccctcgggacggatcggccgtggagatagtcggcttgtctaaatctgcagttcgatggctacttgagcttagtaaaaagaatatattcccttatcatgaagtcactgttaagcgtcatggtaaggcaattaaagtttcctacgacgaatggaacagaaagatccaggataatttcgaaaagcttttccacgtaagtgaagatccttccgacttaaatgaaaagcatccaaacttggttcataagaggggtatctacaaggattcctatggtgccagctccccatggtgcgactatcaattgaggcctaactttacaatcgctatggttgtggcacccgagctcttcactacggaaaaagcctggaaggccctggagattgccgagaagaagttgcttggtcctcttggaatgaaaacgctggacccggacgacatggtttattgcggtatttacgataacgcgctcgataatgacaattacaatcttgccaagggctttaattatcatcaaggaccagagtggctttggcctatcgggtacttccttagggctaagctttacttctctcgtttgatgggtccggagaccaccgcaaaaactatcgtattagtgaaaaacgtgttgtcccgtcattatgtgcatctcgagcggtccccctggaaagggttgccagaactgaccaatgaaaacgcccagtattgtcctttttcctgtgagacacaagcttggagtatcgccactattctcgagaccttgtatgacctt

SEQ ID NO: 6077 - DNA, 4596 bp, synthetic construct
  misc_feature 1..4596: note = source = /note="Description of Artificial Sequence: Synthetic coding sequence"
  source 1..4596: mol_type = other DNA
atgggacactcgaagcaaattcgcattctcctgctcaacgaaatggagaagctggaaaaaaccctgtttagacttgaacagggatacgagctgcagtttcgtcttgggccgactctgcaaggtaaagcagtgactgtctacaccaattatccttttcctggcgagactttcaacagggagaagtttagatccttggactgggagaatcccaccgagcgtgaagatgatagcgacaagtactgtaaattgaaccttcaacaaagcggttccttccagtactactttctgcaaggcaacgaaaaatccggcggaggatacatcgtggtggaccctattctgcgggtcggggccgataaccacgtccttcctctggactgtgtcacgcttcaaacctttttggccaaatgtcttggaccttttgatgaatgggaatcacgcctccgggtggcaaaggaaagcggttacaacatgatccatttcacccctctccaaaccctggggctctcgagatcctgctacagcctggcaaaccagcttgagcttaacccggacttttctcggccgaaccgcaaatacacgtggaatgacgtgggacaactggtcgaaaaacttaagaaagaatggaacgtcatttgtattaccgatgtggtgtacaaccataccgcagcaaattcaaagtggatacaagaacacccagaatgtgcatacaaccttgtgaatagccctcatctgaagcctgcctgggtccttgacagagcgctgtggagattctcttgcgatgttgcggaaggtaaatacaaggagaagggaattcccgcgctgattgagaacgaccatcacatgaactccattcgaaagattatctgggaggacatattcccaaagctgaagttgtgggagttttttcaagtggatgtgaacaaagccgtcgagcagttcagaagattgcttactcaagaaaaccgtcgagtcactaaatcggatcctaaccaacacctgactatcatccaagatccagagtacagacgttttggatgtactgtggatatgaacattgcgctgacgacctttatccctcatgataagggtcctgctgcgatagaagaatgctgcaactggtttcacaagcggatggaagaactgaacagcgagaagcatcgcctcattaactaccatcaggagcaggccgttaactgtctgcttggaaacgtcttttatgaacgacttgcgggtcatggaccaaagttgggtcccgtgaccagaaagcacccactggtgacccggtacttcacctttccattcgaagagatcgatttctcaatggaagaatcaatgattcatcttcccaataaggcatgttttcttatggcccacaatggctgggtgatgggggatgaccctctgaggaattttgcagaaccagggtcggaagtctatctccggcgtgagcttatatgctggggagattcagtgaaactgaggtacggtaataagccagaggactgtccctatctctgggcacatatgaaaaagtacaccgaaatcactgcaacttactttcaaggtgtgagacttgataattgtcattccactccccttcatgtggcagagtacatgttggatgcggctagaaacctccagcctaacttgtacgtcgtggctgaactttttaccggctcagaagatctggataatgtgtttgttactcgcttggggatctcctcgcttattcgcgaagcaatgtctgcatacaacagccatgaagaaggaagattggtgtaccggtacggtggggaaccagtgggtagctttgtgcaaccttgtttgcgccctctgatgccagcaattgcgcacgcacttttcatggatattactcatgacaacgaatgccctatcgtgcatcgttcagcgtacgatgctctgccttctactaccatagtctcaatggcctgttgcgccagcgggtccactcgcggctacgatgaactggtgccgcatcagatttctgtcgtgagcgaggagcgattttacacgaagtggaatcctgaagctcttccttcgaacaccggagaagtcaattttcaaagcggcattatcgcagcccgatgtgcaatctcgaaacttcatcaagaactgggggccaaggggtttatccaggtctacgtggaccaggtcgacgaagatatagtggccgtgactagacattcaccttcgatccatcagtctgtcgtggccgtgtccagaaccgcattccgcaaccctaagactagcttctactcgaaggaggtcccacaaatgtgtatcccaggtaagattgaagaagtggttcttgaggcaagaacgattgagagaaacaccaaaccataccggaaagacgagaactccataaatggcaccccagacataaccgttgagataagggagcatattcagcttaatgagtcgaagatagtgaaacaagcaggggtggccacgaagggaccgaacgaatacatccaggaaattgaattcgaaaacttgagcccgggatcggtgattatctttagagtgtcgcttgatccacatgctcaagtggcagtgggaattctgcggaaccatctgacccagttcagcccccacttcaaatcagggtcgctggcagtggataacgcagatcccatactgaaaattccattcgcgtcccttgcatcccggctgaccctggccgagctcaatcaaatcctgtaccgttgcgaatccgaagagaaggaagatgggggaggatgctacgatataccaaactggagcgcactcaaatacgcaggtctgcaaggactcatgagcgtccttgcagagatccgaccaaaaaacgatcttggccacccattctgcaataatctgcgcagcggggattggatgatagactacgtgtcgaacaggctgatatcccggtcgggcaccattgcggaagtggggaagtggcttcaggcaatgttcttttaccttaaacaaattccacgctatcttatcccctgttactttgacgccattcttattggggcctatactactctgctcgataccgcatggaagcaaatgtcctcatttgtgcagaacggatcgactttcgttaagcaccttagcctcggcagcgtgcagttgtgtggcgtcggaaagttcccctccctgcctatcctgtcccctgctcttatggatgtgccatatcggctcaacgagattactaaagaaaaggaacaatgctgcgtctcacttgcagcagggcttccccacttttcttccgggatttttcggtgttggggaagggacacctttatcgccttgcgaggcatactcctcatcaccggacgctacgtggaagcccggaacattattcttgcttttgctggaactctgaggcacggtcttatcccaaacctgctgggtgaaggtatttacgctagatacaattgccgcgacgccgtttggtggtggctccaatgtattcaggattattgcaagatggtgccgaacgggctggatattcttaagtgtcctgtcagccggatgtaccccaccgacgattcggcacctctcccagcaggcaccctggatcaaccactgtttgaggtgatacaagaggcaatgcagaaacatatgcaagggatacaatttagagaacgcaatgcaggcccccagattgatagaaacatgaaggatgaaggatttaacattactgccggtgtggatgaggaaaccggttttgtgtacggtggcaacagattcaactgtggaacctggatggataagatgggagagtccgatcgcgcacggaatagaggaatcccagcaacgcctcgtgatggaagcgcagtggagatcgtcggactctctaagtcagccgtgagatggctgttggagctttcaaagaagaacattttcccataccatgaggtcaccgtcaagagacatggtaaggcaatcaaggtgtcatacgacgaatggaacagaaagattcaggacaactttgaaaagctgtttcacgtctcggaagatcctagcgacttgaatgagaagcatcctaatctcgtccataagaggggcatttacaaggactcatacggagcatcatcgccttggtgtgactaccagctccgacccaatttcacgattgcgatggtggtggcacccgagttgttcaccactgaaaaggcgtggaaggcacttgaaattgcagagaaaaagctgcttggtcctctgggtatgaaaactctcgatccggatgacatggtttactgtggaatatacgataatgcactggacaacgataactacaacctggcaaaggggtttaactaccaccaaggacccgaatggctttggcccatcggatatttcctcagagctaagctgtactttagccgcctgatgggtcctgaaaccactgcaaagacgattgtcctggtcaagaatgtcctctcgcgtcactacgtgcatctcgaaagatcaccttggaagggtctgccggaactgaccaacgaaaatgcccagtactgtccattttcgtgcgagactcaggcatggagcattgctactattcttgagacgctgtacgatctt

SEQ ID NO: 6078 - DNA, 4596 bp, synthetic construct
  misc_feature 1..4596: note = source = /note="Description of Artificial Sequence: Synthetic coding sequence"
  source 1..4596: mol_type = other DNA
atgggacattcgaaacagatcaggatcttactgctaaatgaaatggaaaaactggaaaagacactgtttcggttggaacaggggtatgaactgcagttcagactaggacccacactccaggggaaagctgtaactgtctacacaaattatccattccctggggagacatttaaccgggaaaaattccgaagtctggattgggaaaaccctactgaaagggaagatgacagtgataagtattgtaaattaaaccttcagcagtcagggtccttccagtactacttcctccaggggaacgaaaaatctggaggggggtatatcgtggtcgatcccatactccgggtgggagccgataatcatgtacttcctcttgattgtgttacactccagacatttctggcaaagtgcttgggaccctttgatgaatgggagtccaggctgcgggttgcaaaagagagtggatataatatgatacacttcactcccctccagacactgggactaagtcgctcctgctattccctcgcaaatcagctagaactcaaccctgatttctcgcggcctaataggaaatatacttggaacgatgtggggcagctcgtagaaaagctaaagaaagaatggaacgtgatatgcattactgatgtggtctataatcacactgctgctaactctaaatggatacaggaacatccagaatgtgcctacaatcttgtaaattctccccatctaaaacctgcatgggtgctcgatagagcactatggcggttttcgtgcgatgtagctgaagggaaatacaaagaaaaagggattccagcgctgatcgagaatgaccatcatatgaattccataaggaaaataatctgggaagatatattcccaaaactaaaactctgggagtttttccaggtcgatgtgaataaagctgtcgaacagttccgccgtctgctaactcaggaaaaccggcgggtcacaaaaagtgaccctaaccagcatctgacaataatacaggatccagaatatagacgatttgggtgtactgtcgatatgaacatagccctgactactttcattccccatgataaaggacccgctgctatcgaagaatgttgcaactggttccacaaaaggatggaagaactgaattccgaaaaacatcgacttatcaattatcaccaggaacaggccgttaattgtctgctcgggaatgtcttttatgaaagactcgctgggcatgggcctaagttagggccagtcacaagaaagcatcctctggtgactcgctattttacattcccattcgaggagatcgatttttctatggaagaatcaatgatacacctacccaataaagcttgttttctcatggctcacaatggatgggtcatgggggacgacccccttagaaattttgcagaacccggatctgaagtgtatctacggagggaactcatttgctggggagactccgtgaaattaagatatggaaataaaccggaagattgcccatatctgtgggcccacatgaaaaaatacacagaaatcacagcaacatattttcagggggtcagacttgataattgtcattcaactccactgcacgtcgccgaatacatgctcgatgccgccaggaatctacagcccaacctctacgtggtagcagaactgttcacagggtctgaagatctcgataatgtatttgtgactcgactcggaatctcttcccttatcagggaagctatgtccgcatacaatagtcatgaggaagggcgactcgtgtataggtatgggggggaacccgtcggatctttcgtacagccatgtctgagaccactgatgcccgctatcgcccacgcccttttcatggatatcacacacgataacgaatgtcccatcgtacatcggtccgcatacgatgccctgccctcaacaacaatcgtttctatggcttgctgcgcttctggatctactcgcggatacgatgagcttgtgcctcatcagattagtgttgtgtctgaagaacggttctatacaaaatggaaccccgaagcgctcccctccaacacaggagaagtgaattttcagtctgggatcatagccgctcggtgcgcaatatcaaaactgcatcaggaacttggggccaaagggttcatccaggtgtacgttgatcaggtggatgaagatatcgtggccgttacacgacattctccatccatacatcaaagtgtggtggcagtgagtagaactgcctttcggaacccaaaaacatcattctattctaaagaggtccctcagatgtgcatcccagggaaaatagaggaagtagtgcttgaagctagaacaatagaacggaacacaaaaccgtacagaaaagatgaaaacagtatcaatggaactcccgatattacagtcgaaattcgggaacatatacagttaaatgagtccaagattgttaaacaggcaggggttgccacaaaagggccaaatgaatacatacaggaaattgaattcgaaaatctttcacccgggtccgttataatatttagggtgtccctggatccacacgcccaggtggccgtcggaatactccgcaaccacctgactcagttctctccccattttaaatcggggtcattggcagtggataacgcagatcctatactgaagattccattcgcctcactcgcttcccgattgacattggccgaactgaaccagatactctacagatgcgaatccgaagaaaaagaagatggagggggatgttatgatatacccaactggtctgcactcaaatatgcagggctgcaggggctcatgtcagtgttagcagaaatccgacccaaaaatgatctggggcatccattttgtaataatctgaggagtggggattggatgattgattatgtatctaaccggctgataagtaggtctgggacaatcgctgaagtggggaaatggctgcaggcaatgtttttttatctcaaacagattccccgctatctcatcccatgttattttgatgccatcttgattggggcatacactacactactcgatacagcctggaaacagatgtcttcgtttgtgcagaatgggtctacattcgtcaaacatctcagtctcgggtcagtgcagctgtgcggggttgggaagtttccatctctgcccatcctctcacccgcccttatggatgtgccttataggctcaacgagatcacgaaggaaaaagaacagtgctgcgtgtccctggcagctgggctacctcacttctcttccggaatatttcgctgctggggacgtgacacattcatagctctcagagggatactgctaatcactggacgctatgttgaagctaggaacatcatccttgctttcgctgggactctgaggcatggacttatccctaatcttctaggggaagggatttacgccagatataattgtcgggatgccgtgtggtggtggctgcaatgtatccaggactactgcaaaatggtccccaatgggcttgatatactgaaatgtcctgtgtccaggatgtatcccacagatgactctgcccccctgcccgccggaacactagatcagcccttattcgaggtcatacaggaggcaatgcagaagcatatgcagggaatccagttcagggaacgcaatgcaggaccacagattgatcgaaatatgaaagatgaaggattcaatatcacagccggggtcgacgaagaaactgggttcgtttacggagggaataggtttaattgcggaacttggatggacaaaatgggggagagtgatagggcccgaaacaggggaatcccagccacacccagagatggatctgctgtggaaatagtcggactttccaaatccgcagtgcgatggcttcttgaattgtcaaaaaaaaacatcttcccctaccacgaagtcactgtaaagcgacacggaaaggcaatcaaagttagttacgatgaatggaatcggaaaatccaggataacttcgagaagttgttccatgtgagtgaagacccgtctgatttaaatgaaaaacaccccaacctcgtgcacaaacggggaatatacaaggattcttatggagcatcttctccttggtgtgattaccagctgcggccaaatttcacaattgccatggtggtagcccctgagctgtttactactgaaaaagcctggaaagccctcgaaattgcagaaaaaaaattactggggccactcggaatgaagactctcgatccagatgatatggtctattgtgggatatatgataacgcgctcgataacgataactataacctggcgaaaggattcaattatcatcaggggcccgagtggctatggcctatcgggtactttctgagagcgaaactgtattttagtcgcctgatggggcctgaaacaacagccaaaacaatagtcttagttaaaaacgtgttatctaggcactacgtgcacctcgagagaagtccatggaagggacttcccgaactgacaaatgaaaatgcccagtactgtccctttagttgtgaaacacaggcttggagtatcgccactatcctagagactctgtacgatcta

SEQ ID NO: 6079 - DNA, 4596 bp, synthetic construct
  misc_feature 1..4596: note = source = /note="Description of Artificial Sequence: Synthetic coding sequence"
  source 1..4596: mol_type = other DNA
atgggacattcgaagcaaattagaattctccttctgaatgaaatggagaaacttgaaaagactctctttaggttggaacaagggtacgagttgcagttccggctcggtccgacgcttcaaggcaaggcagtgactgtctacaccaattaccctttcccaggagaaacctttaacagagagaagtttcgtagcctggattgggaaaatcctaccgagagagaagatgactccgataagtactgtaagctcaaccttcagcagagcggatcattccagtactatttcctgcaagggaacgagaagagcggcggtggctacattgtggtcgatcctattctgagggtgggggcagataatcatgttctgcccctcgattgtgtcacgctgcaaacttttttggccaagtgtctgggtccatttgacgaatgggagtcaagacttcgcgtggccaaggaatccgggtacaacatgattcattttaccccactgcagaccctgggtcttagcaggtcctgttactcacttgcaaatcaactggaactcaatcccgatttttcgcgacccaaccgcaagtacacctggaatgatgtcggacaacttgtggaaaaactgaagaaagaatggaacgttatctgcattactgatgtggtctataaccacactgcagcgaactcgaagtggatacaggaacaccccgaatgcgcatacaatcttgtgaattccccccaccttaagcctgcctgggtgttggatagggcgctgtggaggtttagctgtgatgtggcggaaggaaagtacaaagaaaagggaattccggcattgatcgaaaacgatcatcatatgaactctatcagaaagatcatatgggaggacatatttccaaagctgaagctgtgggagttttttcaggtggatgtgaataaggcagtggagcaatttcggaggctgctgactcaggaaaatcgtcgggtgaccaaatcggatccaaaccaacatctgactattatccaagacccagagtacagaagatttggatgcactgttgatatgaatattgctttgaccaccttcattcctcatgataagggacctgcagcaatcgaggagtgctgtaattggttccataagagaatggaggagttgaactcagaaaagcaccgtctgataaactaccaccaggaacaagcggtgaactgcttgcttggcaatgtattctatgaaagacttgccgggcatggccctaaacttggtccagtcaccaggaagcacccactcgtcacccgatacttcacttttccctttgaggaaattgatttctctatggaagaatccatgattcatctgccgaacaaagcctgctttctgatggcacataatgggtgggtgatgggcgacgatcccctgaggaacttcgcagagccaggttccgaggtttaccttcgtcgggagctgatttgctggggagattccgttaaacttcgatacggcaataagccagaggattgtccctacctttgggcgcatatgaagaagtacactgaaatcaccgcaacctatttccagggtgtgagattggataactgccacagcactccactccatgtcgcagaatacatgctggatgccgccagaaaccttcaacctaatctgtacgtggtggcagaactctttactgggtccgaggaccttgacaacgtgtttgtcaccagacttgggatttcgtcgcttattagagaggcaatgtctgcatacaattcacatgaagaaggacggcttgtgtaccgatatggtggagaacccgtgggatcatttgttcagccctgtcttaggccacttatgccagctattgctcatgcgctgtttatggacattacgcacgataacgaatgtcctatcgtgcatcgctccgcctacgacgctctcccatccactactattgtctcaatggcatgttgtgccagcgggagcaccagagggtacgatgaactggtgcctcatcaaataagcgtcgtgagcgaggagaggttttacactaaatggaaccctgaagcacttccatccaataccggcgaggtcaactttcagtcggggattattgccgcacgctgcgcgatatcaaagctgcaccaggaacttggagccaagggattcatccaggtgtacgtcgatcaagtggacgaagatatcgtggcggtgacgcggcattctcctagcatccatcaatccgtggtcgcagtgagcagaaccgctttccgcaaccctaagacctccttctactctaaggaggtcccccaaatgtgtatcccaggcaagatcgaagaggtcgtgctggaagcccgtaccattgaacgaaatactaagccctacagaaaggatgaaaactcgatcaatgggacccctgacatcacggtggaaatccgagaacacatccaactcaacgaatccaagatcgtgaaacaggcaggtgtcgccaccaagggtcctaatgaatacatccaggaaattgaatttgaaaacctgtccccaggctccgtgatcatattccgtgtctccctcgacccccatgcacaggttgcagtggggatcctgaggaaccaccttacccaattttccccacacttcaaatcgggatcccttgcagtggataacgccgacccaatacttaagatccctttcgcatcactggcctctcgactcactctggcagagttgaaccaaattctgtaccggtgtgaatcagaagaaaaagaagatgggggagggtgctacgacattcctaattggtcggccctgaaatacgcaggccttcagggacttatgtcagttttggcggaaatccggcctaagaatgatctggggcacccattttgcaataacctcaggtccggagattggatgatagattacgtctcgaatcgccttatttcgagatcaggcactattgcagaagtgggtaagtggctgcaagcaatgttcttttacctgaagcaaattccacgttatcttattccatgttactttgacgcaattcttattggagcttacacgactctcctggacactgcatggaagcagatgtcctcctttgtgcagaacggttccacctttgtgaaacacttgtcactgggttccgtacaattgtgtggggtcggtaagtttccaagcctgccaatcctctcgcccgcgcttatggatgtgccctatagactgaacgaaattactaaggaaaaggaacaatgttgcgtgtcgcttgcagcaggactgcctcattttagctcaggcattttcagatgttggggaagagataccttcatcgctctgaggggtattcttcttattaccggacggtacgtggaggcacgcaacattattcttgcatttgcaggtactcttagacatggacttattccaaatctgctcggagagggtatttacgcacgctacaattgccgagatgcagtgtggtggtggctccaatgcattcaggactattgtaagatggttcctaatggactggacattctcaagtgccctgtctcccgtatgtaccctactgacgattcggcccccctgcctgccggcactcttgatcaacctcttttcgaggtgatccaggaagccatgcagaagcatatgcagggtattcagtttcgagagagaaacgcaggaccgcaaattgatagaaacatgaaagatgagggcttcaacatcaccgcaggcgtggacgaggaaaccggctttgtctacggcggtaaccgtttcaattgtgggacctggatggacaaaatgggggagtcggatagggcgcgcaaccgtggcatacctgccactcctcgcgacggtagcgctgtcgagattgtgggattgtccaagtcagcagtgcgatggctcctggaactcagcaagaagaacatcttcccataccatgaggtgaccgtgaaacggcatgggaaggccattaaagtgagctacgatgaatggaaccgaaagattcaagataactttgaaaagctcttccatgtctccgaggatccatccgatctcaatgaaaagcatcctaatctggtccacaagcggggaatatacaaggatagctacggagcaagctcaccttggtgtgattatcagctgcgtcccaactttactattgcaatggtcgtcgcaccagaactgtttactaccgagaaggcatggaaagcactcgagattgcagaaaagaagctccttgggccgctgggaatgaaaaccctcgatcctgacgatatggtgtactgtggcatttacgataatgccctcgacaacgacaattacaaccttgctaagggatttaactaccatcaaggtcctgagtggctgtggccaatcggttactttcttcgcgcaaaactttacttcagccgcctgatgggcccagagactactgcaaagactattgtgcttgtgaaaaatgtgctttcacgccactacgtccatcttgagagatcgccgtggaagggacttcctgaacttacgaatgaaaatgcacaatactgtccttttagctgcgagactcaagcatggagcattgctactattctggagactctttacgacctg

SEQ ID NO: 6080 - DNA, 4596 bp, synthetic construct
  misc_feature 1..4596: note = source = /note="Description of Artificial Sequence: Synthetic coding sequence"
  source 1..4596: mol_type = other DNA
atgggacactccaaacagatccggattctgcttctaaacgagatggaaaagttagagaagaccctgtttcggttggagcagggctacgaactccagttccgtctggggcccacactccagggaaaagccgtgactgtctataccaattatccttttcccggagagacttttaatcgcgagaaattcaggtctcttgattgggagaacccaactgagcgcgaagacgactctgataagtactgcaaactcaatctgcagcagtcgggaagcttccagtattacttcctccagggaaacgagaagagtggcggaggatacatcgtcgttgatcctattctacgggttggggcagataaccacgtgttgccactcgactgtgttacactgcagacttttctggctaaatgtttgggcccattcgatgagtgggagagtcgcctcagagttgctaaggaaagcggatataacatgatccactttacgccactccagactcttggcctaagtcgatcttgctactcgctagctaatcagcttgagcttaatcctgactttagtcggcctaaccgaaaatacacatggaacgatgtggggcagctggtcgagaaattgaaaaaggagtggaacgtgatttgcattacagacgtagtctataaccataccgccgctaacagcaagtggatacaggagcaccctgaatgtgcctacaaccttgtgaatagcccccacttgaagcctgcttgggtcctcgacagagcactgtggcgattttcttgcgacgtcgctgaaggtaagtataaagaaaagggaattcccgcactaattgagaacgatcatcacatgaattccatacgaaaaattatttgggaagatatcttcccaaaattaaagctgtgggagtttttccaggttgacgtgaacaaagctgttgagcagtttcgcagacttctgactcaggagaatcgtcgagtgaccaagagcgatcccaatcaacaccttactattattcaggacccggaatataggaggtttggctgcacagtagatatgaatattgcactgactacgtttatcccccacgataagggccccgcagccattgaggagtgctgtaattggtttcacaaacgcatggaagagctcaactcggaaaaacacaggctcataaattatcatcaggagcaggccgtaaattgcctgctggggaacgtcttctacgaaagacttgctggtcatgggcctaaactcggccctgttacacgcaagcatcctctcgtgacgaggtacttcacgtttccatttgaagagatcgacttctcaatggaggagtcaatgatacatctgcctaacaaggcatgctttcttatggcacataatgggtgggttatgggcgatgacccactgcggaacttcgccgaaccgggctctgaggtttacctcagacgggaattgatctgctggggggatagtgtaaaactgcggtacggcaacaaacccgaggactgcccatacttgtgggcgcacatgaaaaagtataccgagataacagccacctacttccagggagtcagattggacaattgtcactccactcccctgcatgtcgccgagtacatgcttgatgctgccagaaatctccaacctaacctgtatgtcgttgcagaactgtttaccggttccgaagacctggataatgtgttcgtgaccaggctaggaataagtagtctcatccgtgaggccatgtctgcctataacagccatgaagagggaaggctggtctacagatacggcggggaacccgtgggatcatttgtgcaaccatgtctccgtccattgatgcccgcaatcgcccacgcactgttcatggacatcacacatgataacgaatgtccaatagtgcacagatcagcctatgacgccctgccctcaacgactatcgtctcgatggcatgttgcgcatcaggaagtactagaggttatgacgagctggtgccccaccagatcagcgtcgttagcgaggagaggttctataccaagtggaacccggaagcactacctagtaacaccggcgaggtgaactttcaatctggaattattgctgcaaggtgcgccataagcaaattacaccaggagttgggggccaagggcttcatacaagtatatgtggatcaggtggacgaggacatcgtcgccgtgacgcggcattctcctagcatccaccagtccgttgttgccgtcagcagaaccgctttcaggaaccccaaaaccagtttttactctaaagaggtgccccagatgtgcatccccggcaagatcgaagaggttgtgcttgaggcccgtactatagagcggaacaccaagccttaccggaaggatgagaattccatcaacggaactcccgacatcactgtagagatcagggagcatattcagctaaacgaatcaaagatcgtgaaacaagccggtgtcgccactaaggggccaaacgagtatatccaggagattgaatttgaaaacttgtcgccgggatctgtaatcatcttccgggtttctctggaccctcatgcccaggtggccgttggcatactccgcaatcatctgacccagtttagcccacatttcaagtccggatccctggctgtggacaatgccgatcccattctgaagatcccgtttgccagcctggcttcccggctgaccctggctgagctgaatcagattctctaccgatgtgaatcagaagaaaaagaagacggcggcggttgttatgacatcccaaattggagcgctttaaagtacgccggcctgcagggcctcatgtctgtgctcgccgaaatccgacctaaaaacgacctgggtcatccattttgtaacaatttgagatccggcgactggatgatcgactatgtgtccaaccgtctaatctccaggtctggcacaatcgctgaggtgggaaaatggctacaggccatgtttttctacctgaaacagatccctcgatacctgataccgtgctacttcgacgcaatcctgataggagcctacactacgttactcgacactgcatggaagcagatgagctcatttgtgcaaaatggatccactttcgtaaaacatctgtctttaggctctgtacagctttgtggggtggggaaatttcccagcctccccattttgtcacccgcccttatggacgtaccctacagacttaacgaaattacaaaagagaaagaacagtgctgtgtctcccttgcggccgggttgccccacttctctagtgggatttttaggtgctggggcagggacacatttatagcccttcgggggatcctcttgattactgggaggtacgttgaggccagaaacattattttggcttttgccgggactctccggcacggcctcattccgaatttgcttggcgagggcatttacgcccggtacaactgtcgggacgccgtgtggtggtggctgcagtgcatccaggattattgtaagatggtgcctaacggactcgatattctgaagtgccctgtttcccggatgtatccgaccgatgatagcgcaccactccctgccggcaccctggaccagcccctgtttgaggtgatccaggaggcaatgcagaaacacatgcagggcatccagttccgggaaaggaacgcagggccacagatagaccggaatatgaaggatgagggattcaacattactgccggagttgacgaggagaccgggttcgtgtatggtggcaataggttcaactgtggtacatggatggacaagatgggagagtccgatagggcccgcaaccgaggaatcccagcaactccccgagacggatcagcagtagaaatagtcggcctctccaagtctgccgtccgttggctcctggaactgagcaaaaaaaatatatttccatatcacgaggtgacagtcaagagacacgggaaggctattaaagtttcctatgatgagtggaataggaagatacaggataatttcgagaagctttttcacgtgtctgaggacccaagtgacttgaatgaaaagcaccccaatctcgtgcataagcgcgggatctacaaggatagctacggcgcctctagcccttggtgcgattatcagttgcgaccaaatttcaccatcgctatggttgtggcacccgagctatttaccaccgaaaaggcctggaaagccctagagatcgcagagaaaaaattgctgggccccctcggaatgaagacactggaccccgacgatatggtttattgcggcatctatgacaacgcactcgacaacgacaactacaacctggcaaaggggttcaactaccatcaggggcccgaatggctctggcccatcggatacttccttcgggccaaattgtattttagtcggctgatgggccctgagaccacagccaagactatcgtgctcgtgaagaatgtgctgtcaaggcattacgttcacctggagaggtctccctggaagggattgcccgagctaactaatgagaacgctcagtactgccccttttcctgtgagacgcaggcatggtcgatcgccaccattctggagaccctgtatgacctt

SEQ ID NO: 6081 - DNA, 4596 bp, synthetic construct
  misc_feature 1..4596: note = source = /note="Description of Artificial Sequence: Synthetic coding sequence"
  source 1..4596: mol_type = other DNA
atgggccactccaagcaaatcagaatactattgctgaatgagatggagaagctggaaaagacactgtttagactcgagcagggctatgagttgcagttccgtctgggacccacgctccagggaaaggccgtcaccgtgtacacgaactacccatttcccggagaaacttttaaccgcgaaaaattccgcagcctcgattgggagaatcctactgagcgggaggatgattcggataagtattgcaaactcaacttacagcagagcggttcattccagtactatttcctacaagggaacgagaagtcaggcggtgggtacatcgtcgtcgatcctatcctcagggtgggggccgacaaccacgtgctcccacttgattgcgtaactctgcaaaccttcctcgctaagtgcctggggcccttcgacgaatgggagagcagattacgggtggcaaaagaatccgggtataacatgattcacttcacaccacttcagaccctggggctctcccggtcatgctattcccttgctaaccaactggaactgaatcctgacttcagcagacctaatagaaaatacacgtggaacgatgtcggtcagcttgtcgagaaactcaagaaagagtggaacgtgatatgcatcaccgacgtagtctacaaccacaccgcagccaatagtaagtggatccaagaacatccggagtgtgcttataatctggtgaatagcccccatttgaagcctgcttgggtgctcgaccgggccttgtggcggttctcttgcgacgtggcagagggaaagtataaggagaagggaataccggccctgatcgagaatgatcatcatatgaactccattagaaagataatctgggaggacatttttccaaagctaaagttgtgggaattcttccaagtggatgtgaacaaggccgtggagcagtttcgtcggttgttgacacaggagaatcgtcgtgtgacgaagagcgatcctaatcagcatttgaccataatccaggatcccgagtatcgtaggttcggatgcactgttgacatgaatattgccttaactacttttattcctcatgacaagggaccggcagccattgaggaatgctgcaactggtttcacaaacggatggaagaacttaattccgagaaacaccggctgatcaattatcaccaggaacaggccgtgaattgcctactcgggaatgtgttttacgagaggctcgcggggcacggaccaaagctgggtccagtgacacgaaaacaccctcttgtgacacgatactttacctttccattcgaggaaatcgactttagcatggaggaatccatgatccaccttcccaacaaagcctgcttcctaatggcgcacaatggttgggtgatgggagacgatcctctccgcaacttcgcagagcccggatcggaggtgtacctgcgtcgagaactgatttgttggggcgattcagtaaagctgcggtacggaaacaaaccagaggactgtccctatctgtgggcacatatgaaaaagtatactgaaatcaccgcaacctacttccaaggcgtgcgcttggacaactgccactctacgccactgcatgtggccgagtatatgctcgacgctgcaaggaacctccagcccaatctctatgtagtggctgagctctttaccgggtctgaagacctggacaatgtatttgtcacccgcctaggaattagctctctaatccgtgaagcgatgtctgcatataatagtcacgaagagggccgcctggtgtaccgctatggcggcgagccggtgggcagtttcgtgcaaccatgcctacgacccttgatgcctgctatcgctcacgctttgttcatggatatcacccacgacaatgaatgccctatcgttcataggtcggcatacgacgctctaccttcgacaaccatagtgagcatggcctgttgcgcaagtggatcaacgcgaggttacgacgaactggtcccacaccagatctctgtggtgagcgaggaaaggttctacaccaagtggaacccagaggccttaccttcaaacactggggaagtcaatttccagagtggaatcattgctgctcgttgtgccatatcaaagctgcaccaggagctcggagccaaaggctttattcaggtgtacgtcgatcaggtcgacgaggacatcgttgctgtgactaggcacagccctagcatacatcagagtgtggtggcagtctctcggaccgctttccggaatcccaaaacatccttttatagcaaggaggtgccacagatgtgcatacccggaaaaatcgaggaggtcgttctcgaggccagaactatcgagaggaatacaaaaccataccgaaaggatgagaattcaattaatggcactcctgatatcacagtcgaaattcgggaacatatccaactgaatgaatcaaagatcgtgaagcaggcgggggtagccactaaaggcccaaatgagtatattcaggaaatcgagttcgagaacctgtctcccggctctgtgattatcttccgggtgtcccttgacccgcacgcacaggtggccgtgggcattcttcgtaaccacctcacacaattctctccccactttaagtcgggctcgctggccgtcgacaacgctgatcccattctgaaaattccatttgcctcacttgcgagccgcctcaccctggccgaattgaaccagatattgtacagatgcgagagtgaggagaaggaggacggcggcggctgctacgatattccaaattggtccgccttaaaatatgctgggctgcagggtttgatgtcggtgttggctgaaataagacctaaaaacgatctgggacatcctttttgtaataacctgagatccggcgattggatgattgactacgtgagtaacagattgatatcccgctctgggactattgccgaagtgggaaaatggctgcaggcaatgtttttctatctcaagcagatccctaggtatctcatcccatgttacttcgatgccatattgattggagcctataccacactcttggataccgcttggaagcagatgtcatcgtttgtgcagaacggttcgacttttgtgaaacacctcagcttggggagtgtgcagctgtgcggggtcggcaagttcccaagcctgcctatactaagtccagctcttatggatgtgccataccgactaaacgaaatcaccaaggaaaaggagcagtgctgtgttagcctggctgccggcctcccccatttcagcagtgggatcttccgctgttggggacgagataccttcatcgccctgagagggattttactgattacaggacggtacgtcgaagcaagaaatatcattctggccttcgccgggacattgcgtcacggactcatacctaacttgctgggtgaaggcatttacgcccgttataactgtcgggacgccgtttggtggtggctgcaatgcattcaagactattgcaagatggtacctaacggactggatatactgaagtgccccgtgtctagaatgtatcctaccgacgactccgcccctctgccggcagggacactggaccaacctctgtttgaggtgattcaggaggctatgcagaagcacatgcagggaattcagtttcgggagcggaacgcaggcccacagatagaccggaacatgaaggatgagggcttcaatattactgccggcgtggacgaagaaacagggtttgtatacggcgggaaccgcttcaactgtggcacctggatggacaaaatgggagaaagtgatagagccaggaaccgtggcatccccgccactcctagagacggttcagccgtggaaatcgtaggacttagtaaaagcgccgtaagatggctgctggagctcagtaagaaaaatattttcccataccacgaggtgactgtcaagcggcacgggaaagcaatcaaggtgtcttacgatgaatggaatcggaagattcaggataattttgaaaaattgttccacgtgtctgaggatcccagtgacctgaatgagaaacatcccaatctggtccataagcgtgggatttataaggactcatacggcgcctcttctccttggtgcgattaccaactccgtcctaacttcacaatcgcaatggtggtagcaccagagttgttcacaaccgaaaaggcgtggaaggccctagagatcgccgaaaaaaaactgctgggaccactcggaatgaaaacacttgatccagatgatatggtttactgcggtatctacgacaatgctttagacaacgacaactataacctggcgaaaggtttcaactatcatcaaggacctgaatggctttggccaattggttatttccttagagccaaattatattttagccggctcatgggtcccgaaacaactgcaaagacaatcgttctcgtaaagaacgtgctgtcccggcattacgtgcatctggagcggtccccctggaaagggttgcctgaactgacaaacgaaaacgcccaatattgccccttctcctgtgaaacacaggcatggtcaatcgccactattttggagaccctctacgacctg

SEQ ID NO: 6082 - DNA, 4596 bp, synthetic construct
  misc_feature 1..4596: note = source = /note="Description of Artificial Sequence: Synthetic coding sequence"
  source 1..4596: mol_type = other DNA
atgggacactcaaagcagatccgcattttgctgctcaacgaaatggagaaacttgagaaaactctgtttcgtctggagcagggctacgaactccagtttcggcttggccccacactgcagggtaaggcggtgactgtttatacaaactacccttttccaggcgaaaccttcaacagagaaaaattccggtccctcgattgggagaacccaaccgaacgagaggacgactctgataaatactgtaagctgaacttacaacaatctggaagcttccagtactactttctgcaaggcaacgaaaagtcaggcgggggatacatcgtagtggaccccatactgcgggtgggtgccgacaaccacgtgttgcctctggattgtgtgaccctgcagacttttctggctaaatgccttggacccttcgatgagtgggagtcacgactgagggtggcgaaagaaagtggctacaatatgatccattttactccactgcagacactgggactatctcggtcatgttattcgttggccaatcagttggagctgaatcctgactttagcaggcccaatcggaaatacacctggaatgacgtcgggcagcttgtcgaaaagctgaaaaaagaatggaatgtcatttgcattaccgatgttgtgtacaaccacacagccgctaactccaaatggatacaggagcaccctgagtgcgcctacaatctagtcaactctccccacttgaaacctgcatgggtcctcgatagagccctgtggcgcttctcttgcgatgtggcagaagggaaatataaggaaaaggggattcccgctctaatcgagaacgatcatcatatgaacagcatacgcaaaattatatgggaggatattttcccgaagctgaaactgtgggagttctttcaggttgatgttaacaaagcagtggagcagttcaggcgactgctgacccaggagaacaggagagtgacaaagagcgatcccaatcagcacttgacaataattcaggatcctgagtacaggaggtttggctgtaccgtcgacatgaacatcgccttgactacatttatcccccacgacaaaggtcccgccgctatcgaagaatgctgtaactggtttcacaagcggatggaagaactgaatagcgaaaaacacaggctaataaattatcaccaggagcaggcagttaattgcttgttgggaaatgtattctacgagcgtcttgctggacatggtcctaagttaggacccgtaacacgtaagcacccgttggtcacaaggtactttactttcccctttgaggagatcgacttctcaatggaagagtctatgattcacctgcctaacaaggcatgctttcttatggcacataacgggtgggtaatgggagatgacccgctgcgaaatttcgcagagccggggagcgaagtttatctgcgccgcgaacttatctgttggggagatagcgtgaagctgcgctatgggaataaaccagaagattgcccctacctgtgggcacatatgaaaaagtatacagagattacagcaacatatttccagggcgtacggctagataattgtcattccacaccccttcacgtagcagagtacatgcttgacgccgccagaaacctgcagcctaatttatacgtggtcgcagaactcttcaccggatccgaggacctagacaacgtgtttgtgactaggctgggaattagctcactaataagagaggcaatgagtgcatacaatagtcacgaggagggacgcctggtatataggtatgggggtgagcccgttggctcattcgtccaaccttgcctgagacccttaatgccagcgattgcccatgctctttttatggacattacccatgataacgagtgtcccattgtgcatcgaagcgcttatgacgcccttccctcaacaaccatcgtgagtatggcctgttgcgcatctggatctacacgcggttacgatgagcttgtgcctcaccagatttccgtggtttccgaggagagattttatacaaagtggaacccagaggccctgcctagtaacactggcgaggtgaattttcaatctggaatcatagccgcccggtgtgctatctctaaattacaccaggaattgggagctaagggattcatccaggtgtatgtagatcaagtcgacgaggatatcgtcgccgttacaagacatagcccgtctatacatcagtctgtggtggcagtgtctagaactgccttccgaaaccccaaaactagtttctacagcaaagaagtaccacaaatgtgtattccgggcaagattgaagaggtggtcctggaggccagaacgatagagagaaatacaaagccctacaggaaagacgaaaattccattaatgggaccccggacatcacagttgaaattagagaacatattcaattgaatgagtccaagatcgtgaagcaggccggggttgccactaaagggccaaacgaatatatccaagagattgaattcgagaacctgtctcctgggtcagtgataatctttcgggtgagcttagacccacatgcacaagttgctgtggggatactgcgcaatcacttgacccaatttagtccccactttaagagtgggagtttggccgtggataatgccgaccctatcctgaagataccctttgcaagtctcgcttccagactgacgctcgctgagttgaaccaaatcctctaccggtgtgagtcggaagaaaaggaggatgggggaggctgctatgatatcccaaactggagtgcgctgaaatatgcaggcctgcaaggcctgatgagcgtgctggcagaaatacggcctaagaatgacctaggccatccattttgtaataacctgaggtccggcgattggatgatcgattacgtttccaaccgactcatatccagatccggaacgatagccgaagtggggaagtggctacaggccatgttcttctacctcaaacagatcccccggtacttgatcccctgctactttgatgccatcctgattggcgcctacaccacgcttttggacacagcatggaagcagatgtcaagttttgtgcagaacggatccaccttcgtcaagcacctgtctctgggcagcgtccagctgtgcggcgtgggcaagtttccaagcttaccgattctgagtccagcactcatggacgtgccctatcgcctcaatgagattaccaaagagaaggaacagtgctgcgtttcactggccgcaggtctgccacactttagttctggtatcttcagatgctgggggagggacacatttattgccctgcgcggcatcctgctgattactggccgctatgtggaggccaggaacattatcctagccttcgcgggaacgctgcgccatggcctgatcccaaatctcctgggggaggggatatatgcacggtataattgtagagacgccgtgtggtggtggcttcagtgtatccaagattattgtaagatggtcccgaatggcctcgatatacttaaatgcccggtgagtaggatgtacccaactgatgactccgcgccccttccagccgggacactggaccagcctctctttgaggtgattcaggaagccatgcagaaacatatgcagggcattcagttcagagagaggaacgcggggccacagatagaccgtaatatgaaagatgaaggatttaatattaccgctggcgtggatgaagagactgggttcgtgtacggcggtaaccgctttaattgcggcacctggatggataaaatgggtgaaagtgacagggctcgtaacagggggatacctgcaacgcccagggatggatccgccgtcgagatagtcggcctctcaaagtccgcggtgcggtggttgctggagctgtcaaagaaaaacatttttccataccacgaggtgacggtcaagaggcacgggaaggcaataaaggtgtcctacgacgaatggaaccgaaaaatccaggacaacttcgagaaactgtttcacgtgtcagaggatccctcagacctcaacgagaagcaccctaatctcgtgcataaacgggggatatacaaggatagctacggagcctctagcccatggtgtgactaccagctgagaccgaacttcacaattgctatggtcgttgcccctgagctgttcactaccgaaaaagcatggaaagccctcgaaatcgcagaaaaaaagctactgggccccttgggtatgaagacactagatcctgacgacatggtgtattgtggtatctacgataatgccctggacaatgacaactataacctcgcaaagggtttcaattatcatcagggaccagaatggctgtggcctatcggctacttcctgagagccaagctgtatttctcacggctcatggggccagagaccactgccaaaactattgtgttagtgaaaaatgtcctctcccgacactatgtccacctcgagaggtctccctggaagggactgcctgagctaacaaacgaaaacgcccagtattgccccttctcctgtgaaacacaggcatggtctatcgcgacaatcctggaaactctctacgacctg

SEQ ID NO: 6083 - DNA, 4596 bp, synthetic construct
  misc_feature 1..4596: note = source = /note="Description of Artificial Sequence: Synthetic coding sequence"
  source 1..4596: mol_type = other DNA
atgggacacagcaagcagatcagaatcctgctgctcaatgagatggagaagctcgagaaaactttgttccggctggaacagggatacgagctccagtttcgcctgggtcccactctgcaggggaaggccgtgactgtctataccaactaccccttcccgggtgaaacctttaacagggagaaattccgcagcctcgattgggagaacccgaccgagcgcgaggatgattcggataagtactgcaaacttaacctgcagcagtcggggtcctttcaatactatttcctgcagggtaacgaaaagtccggcggcggttacatcgtggtcgatccgatcctcagggttggtgcggacaaccacgtgctgccgctggactgcgtgaccctccaaaccttcctggccaagtgcctgggaccgttcgacgaatgggaatcaagactgagagtagccaaggaatcgggctacaatatgatccatttcacgccgcttcaaaccctcggcctgtcccgctcctgttactccttggcgaaccaactggagctcaatccagacttctcacgccccaatcgcaagtacacctggaatgacgtgggccagctcgtggaaaagctgaaaaaagaatggaacgtcatctgcatcactgacgtcgtgtacaaccataccgcggccaattcgaagtggattcaggaacatcctgagtgcgcttacaacctggtgaactcaccacatctgaagccagcatgggtgttggatcgcgcgttgtggcgcttttcgtgcgacgtggccgagggcaagtataaggagaagggaattccagccctgatagagaatgaccaccatatgaactccatccggaagatcatctgggaggacatcttcccgaagctgaaattgtgggagttttttcaagtcgacgtcaacaaagctgtcgagcagtttaggcggctgctcacgcaggaaaaccggcgcgttaccaagtcggatcccaaccagcacctgactatcatccaggacccagaatatcgacgatttggatgtaccgtggacatgaacattgccctcaccaccttcattccacacgataaagggccggcggccatcgaagagtgctgcaactggtttcacaaacgcatggaagagttgaattcggaaaaacaccggctgatcaactaccaccaggaacaagccgtgaattgcctgctggggaacgtgttctacgaaagactggcggggcacgggccaaagctgggaccggtgacgcgcaagcatcccctcgtgaccagatacttcactttcccattcgaagagatcgacttctccatggaagaaagtatgatccacctgcctaacaaggcgtgctttctgatggcgcacaatggatgggtcatgggcgacgatccactgcggaactttgccgaaccgggatccgaagtgtatcttcgccgcgagctgatctgctggggagattcggtgaaactgcgatacggcaacaagccggaagattgtccctacctctgggcacatatgaagaagtacacggaaatcacggcgacctacttccaaggcgtccgactggacaattgccattccactcctctgcatgtggcggaatacatgcttgatgctgctagaaatcttcaaccaaatctgtacgtcgtcgcggaactcttcaccgggagcgaagatctcgacaatgtgttcgtcacgcgactgggaatctcctcgctcatccgcgaagccatgtcggcatacaattcccacgaggaagggcgccttgtgtacaggtacggcggtgagccggtgggctccttcgtgcagccttgtctgcgccccctgatgccggctatcgcccatgcactctttatggatatcacccatgataacgaatgtccgatcgtccatcgtagcgcgtacgatgcccttcctagcactaccatcgtgagcatggcctgttgcgcttccggatcaaccaggggttacgacgaactggttccgcatcagatctcggtggtgtcggaagaacgcttttacactaaatggaaccccgaagccctgccatccaacactggagaggtgaattttcagtcaggaatcatcgcagctagatgtgcaatctccaagctccaccaggagctgggagccaagggatttatccaggtgtacgtggatcaggtggatgaggacatcgtggcagtcaccagacatagcccgtcaatccaccagtcggtggtggcggtgtcgaggactgccttccgcaatccgaaaacctcgttctactccaaagaggtgccgcagatgtgtatcccgggtaagatcgaggaggtcgtgctggaggccagaaccatcgagaggaatactaaaccgtaccggaaagacgaaaactccatcaacggcactccggacatcacggtggagatccgggagcatatccagctgaacgaaagcaagatcgtgaaacaggctggcgtggccactaagggtcctaatgagtacatccaggagattgagttcgaaaatctctcgccaggctcagttatcatcttccgagtcagcctggacccgcacgcccaggtggcagtcggtatcctcagaaatcatttgacccagttttccccgcacttcaagtcgggatcgctggcggtcgataatgctgatcctatcctgaagatcccttttgcaagcctggcatccagactcactctggcggaactcaaccagatcttgtacagatgcgaaagcgaggagaaggaagatggaggaggatgctacgatatcccgaactggagcgcgttgaagtatgccggtctgcagggcttgatgtccgtgctggcagaaataaggccaaagaacgaccttggacaccctttctgtaacaatctgagatccggagattggatgatcgactacgtgtcgaaccggctcatctccaggtctggaactatcgcggaagtcggaaaatggctccaggccatgttcttctatctcaaacaaatcccgagataccttatcccgtgttacttcgatgccatcctcattggagcctacactacccttctcgataccgcctggaagcagatgtcgagctttgtgcaaaacggatccactttcgtgaaacacctgtcgctgggtagcgtgcagctttgcggcgtgggaaagtttccgagcctgccaattctctccccggcgctcatggacgtgccgtacagactcaacgaaatcaccaaggagaaggagcaatgctgcgtgtccctggccgcaggactgccgcacttctcctccggaatctttcggtgttggggacgcgacaccttcattgctttgcgcgggattcttctgatcaccggacggtatgtggaggctcgcaatatcatcttggcgtttgcgggcaccctgagacacggcctgatccctaatctcctgggggaaggaatctacgcacgctacaactgccgcgacgccgtgtggtggtggctgcaatgtattcaggactactgcaagatggtgccaaatggactggatatcctcaagtgcccagttagccggatgtatccgactgacgattcagcacctctcccggctgggactcttgaccagccgctcttcgaggttatccaggaagccatgcagaaacacatgcaaggaatccagtttcgcgaacggaatgccggacctcagattgaccgaaacatgaaggacgagggattcaacattaccgcgggcgtggacgaagaaaccggcttcgtgtatggtggtaatagattcaattgcggcacctggatggacaagatgggagagtcagacagagccagaaaccggggaatcccggccaccccaagggatggctcagcggtcgagatcgtgggactgagcaagtcggctgtgcggtggcttctcgaattgtcaaaaaagaacatctttccgtaccatgaagtgaccgtgaagcggcacggcaaggccatcaaagtgtcatacgatgaatggaacaggaaaatccaggacaacttcgagaagctgtttcacgtgtcggaagatccatcagacctgaacgagaaacacccaaacctggtgcataagcgcggtatctacaaagactcatacggcgcatcttcgccctggtgcgattaccagctgcggcccaatttcactatcgcgatggtggtggcgccggaattgttcacgacggagaaggcgtggaaagccctcgagattgcggagaaaaagctgttgggaccgctgggaatgaaaacccttgacccagatgacatggtgtattgtggaatctacgataatgccctcgacaacgacaattacaacctcgccaaagggtttaactaccatcaaggccctgaatggctctggcccatcggttactttctgagagcaaagctctatttctcgcgcctcatgggaccggagactacggcaaagactattgtgctggtgaagaacgtcctctccagacattacgtgcatcttgaacgctccccatggaagggactccccgagctcaccaatgaaaatgcgcaatactgcccgttctcctgcgaaacccaggcttggtcgatcgccaccatccttgaaactctctacgacctc

SEQ ID NO: 6084 - DNA, 4596 bp, synthetic construct
  misc_feature 1..4596: note = source = /note="Description of Artificial Sequence: Synthetic coding sequence"
  source 1..4596: mol_type = other DNA
atgggtcacagcaagcaaattcgcatactactgctgaacgagatggagaaactggaaaaaacgttgttccgcttggagcagggttacgagctgcagtttaggctaggcccaacgctacaggggaaggcggtgaccgtgtatactaactacccttttccaggcgagacctttaaccgcgagaagtttcggtccttagattgggaaaaccccactgagagggaagacgactccgacaagtactgcaagctgaatctacagcagtctggatccttccaatactatttcttgcagggtaacgagaagtcaggcggcgggtacatagtggtcgatccgattctgcgagtcggagctgataaccatgtgctgcccctggactgcgtgacccttcagactttcctggctaaatgcctgggacccttcgacgaatgggagagcagacttagagttgctaaggaaagtggttacaacatgattcattttacaccgctgcagactctcgggctgtccagatcctgctattctctggccaatcagctcgaactgaatcctgacttctcaagaccaaatcgaaaatacacatggaacgatgtgggacagctggtcgagaaactcaagaaagaatggaacgtcatttgcatcaccgacgttgtctacaatcacacagctgccaattccaaatggattcaggaacacccagagtgcgcctataacctcgtgaatagccctcacctgaagccagcctgggtgctggaccgtgctctgtggagattctcatgcgatgtggctgagggaaagtacaaagaaaaaggcatcccagcgctgattgaaaacgatcaccacatgaattctataaggaagattatttgggaggatatcttcccaaaactcaagttgtgggagttcttccaggtggatgttaacaaagctgttgaacagtttcggcggctcctgacccaggagaacaggcgagtgaccaagtctgaccccaaccagcatctcactattatacaggaccccgaataccgccgcttcgggtgcactgtggatatgaacatcgctcttaccactttcattccacacgataaagggcccgcagcgatcgaggagtgttgtaattggttccacaaaagaatggaggaactgaattcagaaaaacaccggttgataaattaccaccaggagcaggccgtgaattgcctgttaggaaacgtgttttatgagcggctggctggccatggtcccaagttaggtcctgtgacaagaaagcatcctctggttactagatacttcacgttcccattcgaggaaatagattttagtatggaggaatccatgatacacctccccaacaaagcctgcttccttatggcgcataatgggtgggtaatgggcgacgatccccttagaaacttcgctgaacccggctccgaagtgtaccttcggcgggaactgatctgttggggggattccgtgaaattgaggtacggcaataagcccgaagactgtccatatctgtgggcccatatgaagaaatacaccgagatcacggctacttatttccagggagtaaggctggataactgtcacagtacccctctgcacgtggcagagtatatgctagacgctgcacgaaacctgcagcccaacctctacgtagttgccgagctgttcactggcagtgaagatctggataatgtcttcgtgactcgcctgggaatctcatctctgataagagaagcgatgtcagcctacaacagtcacgaagaaggccgtctggtatatagatatggcggtgaacctgttggatcctttgttcagccatgcctgcgcccgctaatgcctgctatcgcccacgcgctcttcatggacattacccatgataatgagtgccctatcgtgcatcggagcgcatacgacgccctgccttctacaacaatcgtgtcaatggcttgctgtgcatcgggatctactaggggttatgatgaactggttccccaccagatatccgtggtgtccgaagagcggttttatacaaaatggaacccagaagcactcccctctaatactggggaagtgaacttccagtccggtattattgccgcacggtgcgctattagcaagctgcatcaggagctgggcgcaaaaggattcatccaggtgtacgtagatcaggtcgatgaagacatcgtggccgttactcgtcattctccatcgatccaccaaagcgtggtggctgtgagccggaccgctttcagaaacccgaagacctctttctattctaaggaagtgccccagatgtgcatcccaggaaagattgaggaggtagtcctcgaggcacgcacgattgaacgaaatactaaaccatacaggaaggatgagaacagtatcaacggcactccagatattacagtcgaaattcgcgaacacatacaactgaacgagtccaagatagtcaagcaagccggagtggctactaaggggcccaacgagtacatccaggagatcgagtttgagaacttgtcgcctgggtctgtgattatttttcgtgtgtctcttgacccgcacgctcaagtggctgtcgggattttaaggaatcatctaactcagtttagtcctcatttcaaatcgggctctttggccgtggataatgcagatccgattctgaagatcccttttgcctctttagcctcacgtctcacactggcagagcttaaccagattctgtacaggtgtgagtcagaagagaaggaggatggagggggttgttatgatattcccaattggtccgcactgaaatacgccggtctgcagggattgatgtctgttctcgcggagattcggccgaagaacgaccttggccatcctttttgtaataatttgaggtctggtgattggatgatagactatgtttctaaccgacttatctctcgaagcgggaccatcgccgaggtgggcaaatggctgcaggcaatgtttttttatctgaaacagattcctcgctatcttatcccttgttatttcgacgccatccttattggggcatatactacactacttgatactgcatggaaacagatgagcagctttgtccagaacgggagcacctttgttaaacatctgagtctggggtctgtgcagctgtgtggtgtcggcaagtttccatctcttcccattctcagtcccgcgcttatggacgtgccttaccgcctgaatgagatcaccaaggagaaggaacagtgttgtgtgtccctagccgcaggcctgccacacttctccagtggaatcttccgctgttggggtagggacacatttatcgccctgcgcggcatccttcttataactgggcgctacgtggaggctaggaacataattttggcatttgccggaactctcagacacggacttatccccaatctactgggcgagggaatctatgcacgctataactgcagagatgccgtgtggtggtggctgcagtgcatccaggattactgcaaaatggtccccaacggccttgacattcttaagtgccctgtgtcccggatgtaccccacagacgacagcgcccccctgccagctgggactctggatcagcctctgtttgaagtgattcaggaggcgatgcaaaaacatatgcagggcattcagtttagagagcgcaatgccggcccgcagattgatcgcaacatgaaagatgaaggcttcaacatcacggcgggggtggatgaagaaactggcttcgtctatggaggcaataggttcaactgtgggacgtggatggacaaaatgggggaatcagatagggctcgaaaccgcggaattccggcaactccccgcgatggctccgcagtggaaatagttgggctgagtaagtcggcagtaaggtggttgctcgagctttccaagaaaaacatattcccttaccacgaggtcactgtgaagagacacggaaaggccatcaaggtgtcctacgatgagtggaaccgaaaaattcaagacaatttcgagaaactgtttcacgtaagtgaagacccatccgatcttaatgagaagcacccaaacctggtccacaaacgaggaatctacaaggactcgtacggagccagcagtccttggtgtgattatcaactgagaccaaacttcacaatcgccatggtggtggcccccgaattatttaccactgagaaagcctggaaggcccttgagatcgcagaaaagaagttgctggggccattaggcatgaagactcttgaccccgacgacatggtctactgtgggatttatgataacgccctcgataatgacaattacaacttggccaaaggtttcaactatcaccagggacccgaatggctgtggcctatcgggtatttcctgcgagcaaagctctatttttcacgcttgatgggccctgaaaccaccgcgaagaccattgtcctggtgaagaatgtgctcagtagacattacgtgcacctcgagaggtccccatggaagggccttcctgagctaaccaacgaaaacgctcagtattgtcccttcagttgtgaaactcaagcctggagtatagcgacaatcctggagactctttacgactta

SEQ ID NO: 6085 - DNA, 4596 bp, synthetic construct
  misc_feature 1..4596: note = source = /note="Description of Artificial Sequence: Synthetic coding sequence"
  source 1..4596: mol_type = other DNA
atgggtcattcgaaacaaatacgaatactattactaaatgaaatggaaaaattagaaaaaacgctatttcgattagaacaaggttatgaattacaatttcgattaggtccgacgctacaaggtaaagcggttacggtatatacgaattatccgtttccgggtgaaacgtttaatcgagaaaaatttcgatcgttagattgggaaaatccgacggaacgagaagatgattcggataaatattgtaaattaaatttacaacaatcgggttcgtttcaatattattttctacaaggtaatgaaaaatcgggtggtggttatatagtagtagatccgatattacgagttggtgcggataatcatgtactaccgttagattgtgttacgctacaaacgtttttagcgaaatgtttaggtccgtttgatgaatgggaatcgcgattacgtgtagcgaaagaatcgggttataatatgatacattttacgccgctacaaacgttaggtttatcgcgttcgtgttattcgctagcgaatcaattagaactaaatccggatttttcgcgaccgaatcgaaaatatacgtggaatgatgttggtcaactagtagaaaaattaaaaaaagaatggaatgtaatatgtataacggatgtagtatataatcatacggcggcgaattcgaaatggatacaagaacatccggaatgtgcgtataatttagtaaattcgccgcatctaaaaccggcgtgggtattagatcgagcgttatggcgtttttcgtgtgatgttgcggaaggtaaatataaagaaaaaggtataccggcgttaatagaaaatgatcatcatatgaattcgatacgtaaaataatatgggaagatatatttccgaaactaaaactatgggaattttttcaagttgatgtaaataaagcggttgaacaatttcgtcgtctattaacgcaagaaaatcgtcgtgtaacgaaatcggatccgaatcaacatttaacgataatacaagatccggaatatcgtcgttttggttgtacggtagatatgaatatagcgttaacgacgtttataccgcatgataaaggtccggcggcgatagaagaatgttgtaattggtttcataaacgaatggaagaactaaattcggaaaaacatcgtctaataaattatcatcaagaacaagcggtaaattgtctactaggtaatgtattttatgaacgactagcgggtcatggtccgaaattaggtccggtaacgcgtaaacatccgctagtaacgcgatattttacgtttccgtttgaagaaatagatttttcgatggaagaatcgatgatacatctaccgaataaagcgtgttttttaatggcgcataatggttgggtaatgggtgatgatccgctacgaaattttgcggaaccgggttcggaagtatatctacgacgagaactaatatgttggggtgattcggtaaaactacgttatggtaataaaccggaagattgtccgtatctatgggcgcatatgaaaaaatatacggaaataacggcgacgtattttcaaggtgtacgtttagataattgtcattcgacgccgctacatgttgcggaatatatgttagatgcggcgcgaaatttacaaccgaatctatatgttgttgcggaactatttacgggttcggaagatctagataatgtatttgttacgcgactaggtatatcgtcgctaatacgagaagcgatgtcggcgtataattcgcatgaagaaggtcgattagtatatcgatatggtggtgaaccggtaggttcgtttgtacaaccgtgtttacgtccgctaatgccggcgatagcgcatgcgttatttatggatataacgcatgataatgaatgtccgatagtacatcgatcggcgtatgatgcgctaccgtcgacgacgatagtatcgatggcgtgttgtgcgtcgggttcgacgcgaggttatgatgaactagtaccgcatcaaatatcggttgtttcggaagaacgtttttatacgaaatggaatccggaagcgttaccgtcgaatacgggtgaagttaattttcaatcgggtataatagcggcgcgatgtgcgatatcgaaattacatcaagaactaggtgcgaaaggttttatacaagtatatgtagatcaagtagatgaagatatagttgcggttacgcgtcattcgccgtcgatacatcaatcggtagtagcggtttcgcgaacggcgtttcgtaatccgaaaacgtcgttttattcgaaagaagttccgcaaatgtgtataccgggtaaaatagaagaagtagtactagaagcgcgaacgatagaacgtaatacgaaaccgtatcgtaaagatgaaaattcgataaatggtacgccggatataacggttgaaatacgtgaacatatacaattaaatgaatcgaaaatagtaaaacaagcgggtgttgcgacgaaaggtccgaatgaatatatacaagaaatagaatttgaaaatctatcgccgggttcggtaataatatttcgtgtttcgttagatccgcatgcgcaagttgcggtaggtatactacgaaatcatctaacgcaattttcgccgcattttaaatcgggttcgttagcggttgataatgcggatccgatattaaaaataccgtttgcgtcgctagcgtcgcgattaacgctagcggaattaaatcaaatactatatcgatgtgaatcggaagaaaaagaagatggtggtggttgttatgatataccgaattggtcggcgctaaaatatgcgggtctacaaggtttaatgtcggtattagcggaaatacgtccgaaaaatgatttaggtcatccgttttgtaataatctacgttcgggtgattggatgatagattatgtatcgaatcgtctaatatcgcgatcgggtacgatagcggaagtaggtaaatggctacaagcgatgtttttttatttaaaacaaataccgcgttatctaataccgtgttattttgatgcgatactaataggtgcgtatacgacgctattagatacggcgtggaaacaaatgtcgtcgtttgttcaaaatggttcgacgtttgttaaacatctatcgttaggttcggttcaattatgtggtgttggtaaatttccgtcgctaccgatactatcgccggcgttaatggatgttccgtatcgtctaaatgaaataacgaaagaaaaagaacaatgttgtgtttcgttagcggcgggtttaccgcatttttcgtcgggtatatttcgttgttggggtcgagatacgtttatagcgttacgtggtatattactaataacgggtcgttatgtagaagcgcgtaatataatattagcgtttgcgggtacgctacgtcatggtctaataccgaatttattaggtgaaggtatatatgcgcgttataattgtcgagatgcggtatggtggtggttacaatgtatacaagattattgtaaaatggtaccgaatggtttagatatattaaaatgtccggtatcgcgtatgtatccgacggatgattcggcgccgttaccggcgggtacgctagatcaaccgctatttgaagttatacaagaagcgatgcaaaaacatatgcaaggtatacaatttcgagaacgtaatgcgggtccgcaaatagatcgtaatatgaaagatgaaggttttaatataacggcgggtgtagatgaagaaacgggttttgtttatggtggtaatcgttttaattgtggtacgtggatggataaaatgggtgaatcggatcgtgcgcgaaatcgaggtataccggcgacgccgcgtgatggttcggcggttgaaatagttggtttatcgaaatcggcggttcgatggctattagaactatcgaaaaaaaatatatttccgtatcatgaagtaacggtaaaacgacatggtaaagcgataaaagtatcgtatgatgaatggaatcgtaaaatacaagataattttgaaaaattatttcatgtttcggaagatccgtcggatttaaatgaaaaacatccgaatctagtacataaacgaggtatatataaagattcgtatggtgcgtcgtcgccgtggtgtgattatcaactacgtccgaattttacgatagcgatggtagttgcgccggaattatttacgacggaaaaagcgtggaaagcgctagaaatagcggaaaaaaaactactaggtccgctaggtatgaaaacgctagatccggatgatatggtatattgtggtatatatgataatgcgctagataatgataattataatctagcgaaaggttttaattatcatcaaggtccggaatggttatggccgataggttattttctacgagcgaaattatatttttcgcgattaatgggtccggaaacgacggcgaaaacgatagtattagttaaaaatgttttatcgcgtcattatgtacatttagaacgttcgccgtggaaaggtctaccggaattaacgaatgaaaatgcgcaatattgtccgttttcgtgtgaaacgcaagcgtggtcgatagcgacgatattagaaacgctatatgattta

SEQ ID NO: 6086 - DNA, 4596 bp, synthetic construct
  misc_feature 1..4596: note = source = /note="Description of Artificial Sequence: Synthetic coding sequence"
  source 1..4596: mol_type = other DNA
atgggacattccaaacaaatccggatccttctgctcaacgagatggagaagctcgagaaaacacttttcagacttgaacagggctacgagttacagtttaggttgggcccaacccttcaaggaaaagctgtgaccgtttacaccaactacccattccccggagagactttcaacagagagaaatttaggtctctggactgggaaaaccctacagaacgtgaagatgacagtgacaaatactgtaaattgaatctgcagcaaagcgggtcattccaatattactttctgcaggggaacgagaaaagcggaggaggatatatcgtggttgaccccatcctgagagttggcgcagacaaccatgtcctccccctggactgtgtgactctgcaaacttttttagcgaagtgcctgggaccatttgatgagtgggagagcaggcttagagtcgcgaaggaatctggctacaacatgatccatttcacccctctgcaaaccctgggacttagtcggtcttgttacagcctggctaaccaacttgagctcaacccagattttagtcgtccaaacaggaagtacacatggaacgatgtcggacagctagtggagaagttgaaaaaggaatggaacgtgatctgtatcacagatgttgtttacaaccatactgctgcgaactctaaatggattcaggaacacccggaatgtgcttataatcttgttaacagcccacacctgaagcctgcttgggtgctggatagagcactgtggaggttttcctgcgacgtggccgagggaaaatataaagaaaagggcatacccgccttgatagagaatgatcaccatatgaacagtatcaggaaaataatctgggaagatatcttccccaagttgaagctgtgggagttttttcaggtggatgtcaataaagcagtggaacagttccggaggctccttacacaagagaatcgcagggtcactaagagcgaccccaatcaacatctcacaattatccaggatccagaataccgccgctttggctgcactgtggacatgaacatcgccctgacgactttcatccctcatgacaaaggacctgctgccattgaagagtgctgcaactggtttcataagcgaatggaggagctcaacagcgagaaacaccgcctgattaactatcatcaagaacaggcagtcaactgccttcttgggaacgttttctacgaaaggttggctggacacggccccaaactggggccagtgacaaggaagcaccctctcgtcacaaggtactttacctttccatttgaggaaatcgacttctctatggaagaatctatgattcaccttcccaataaagcctgctttctgatggctcataacggatgggtgatgggcgacgatcctcttcgtaattttgcagaacccggcagcgaggtctacctgagacgggaacttatctgttggggcgattcagtgaagctgagatatgggaacaagccagaagactgcccatacctgtgggcacatatgaagaaatacaccgagattaccgcaacctatttccaaggagttaggctggataactgccattctacccccctccatgtcgccgagtatatgctcgacgcagctagaaatctgcagcccaacctttacgttgtggccgagctgttcacaggatctgaagacctcgataacgttttcgttactcgacttggcatctctagcctgatcagggaagcaatgtccgcttacaacagtcatgaggagggaaggcttgtgtatcgctatggcggagaaccagtgggcagctttgtccagccttgcctgaggcccctgatgccggcaattgcccatgctctgttcatggatatcacacatgacaacgagtgcccaatagtgcataggtccgcttacgatgccctgccgtcgacaaccattgtctcaatggcttgctgcgcgtctggaagtacgaggggttacgacgaactcgtgccccaccaaattagcgtggtgagtgaggagaggttttacactaaatggaatccagaggctctcccgagtaatacgggcgaagtcaacttccagagtgggattatagccgcgagatgcgcaattagcaagctgcatcaggagttgggtgccaagggctttattcaggtgtatgtcgaccaggtcgacgaagacatcgtggctgtgacacgccatagcccctcgatccaccagagtgtggtagccgtatcaagaacagcattccgaaaccctaagacatctttttactcaaaagaagttcctcagatgtgcatacctggcaagatcgaagaggtggtgcttgaggctcgcaccattgagaggaataccaagccatacagaaaggacgagaatagcattaatggtacaccagatatcaccgtcgaaataagggaacatatccagctgaatgagtccaaaatcgtaaaacaggccggagtcgcaactaagggccccaacgaatacatccaggagatagagttcgaaaacctgtctcctggaagtgtcattattttcagggtgagccttgacccacatgctcaggttgctgttggaatccttcgcaaccacttgacgcagttttctccacattttaaatccggatctctcgccgttgacaatgctgacccaatcctgaaaattccttttgcctctctggcatctaggctcaccttggccgaactgaatcagattctgtatagatgtgaaagtgaagaaaaggaagacggaggaggctgctatgacatccccaactggtccgcgcttaaatatgcaggacttcaagggctgatgtccgtactggccgagatcaggcctaaaaatgatcttgggcacccattctgcaataacctgaggagcggagattggatgattgactatgtttccaacaggctcattagccgcagcggcaccatcgctgaggtgggaaaatggttgcaagccatgtttttctacctgaagcagattcccaggtatctcatcccctgttattttgatgcgatcctgatcggtgcttacaccacactgctggatacagcttggaaacagatgagtagctttgtccagaacggctctacatttgtgaagcacttgagcctgggctctgtccaactctgcggggtcggcaagtttccaagtctgccgatcctcagtcctgcactcatggacgttccgtaccgtctgaacgaaatcaccaaggaaaaagaacagtgttgcgtttcattagcagctggattgccccatttttccagcggcatctttcgttgctgggggcgggatacatttatcgcccttcgcggaattcttcttatcacagggcgctacgttgaagcccggaacatcattctcgccttcgctgggaccctcagacacggactgatcccaaacctgcttggcgaggggatatatgctagatacaactgtcgcgatgctgtctggtggtggctgcagtgtatccaagattactgcaagatggtacctaacggattagatatcctgaaatgtccagtgagcagaatgtacccaaccgatgactcggctccactgcctgcaggtacactcgaccagccgctctttgaggtaatccaagaagcgatgcagaagcatatgcagggtattcagtttagggagcgcaatgctgggccgcagatcgacagaaacatgaaggacgagggtttcaacataaccgccggtgttgatgaggaaactggatttgtgtacgggggaaacaggttcaactgcggcacctggatggataagatgggcgaatccgacagagccagaaaccggggcatccctgctactcccagagacggcagtgctgtggagattgtgggcctgtccaaatcagcggtgcgctggctcttggaactctcaaagaaaaacatattcccctaccacgaggttacagttaagcggcatggaaaagcgataaaggtcagctacgatgagtggaacaggaaaatacaggacaacttcgaaaaactttttcacgtgtccgaagatccttctgaccttaacgaaaagcatcccaacctcgtgcacaaaaggggcatttataaggattcttacggggctagctccccttggtgtgattaccagctgcggccaaacttcactatcgccatggtagtggctcctgagctgtttactacagaaaaggcttggaaggccttggagattgcagaaaaaaaacttctgggacctcttggaatgaaaactttagaccccgatgatatggtgtactgcggcatctacgacaatgcactcgacaacgacaactacaaccttgcgaagggctttaactaccaccagggcccagagtggctttggccgattggatacttcttgcgcgcaaagctgtactttagcagactgatgggccctgaaaccaccgccaagacaattgtgctggtcaaaaacgtccttagtagacactatgtgcatttggaacggagcccttggaagggtttgcccgagctgacaaatgagaacgcccagtattgcccattcagctgcgagacccaagcgtggtcaatagcaaccatccttgagactttgtacgacctg

SEQ ID NO: 6087 - DNA, 4596 bp, synthetic construct
  misc_feature 1..4596: note = source = /note="Description of Artificial Sequence: Synthetic coding sequence"
  source 1..4596: mol_type = other DNA
atgggccacagcaagcagatccgaatcctgctgctcaacgaaatggaaaagctggaaaagactctcttccgcctggaacagggatacgaactccagttccggctcgggcctactctccaggggaaggcagtgaccgtgtatactaattaccctttcccgggcgagacgttcaatagagagaagttcaggtcgttggactgggaaaacccaactgagcgcgaggatgattcggacaaatactgtaagctgaacctgcagcagtctggctcgttccagtactacttcctgcaaggcaatgagaagagcggagggggatacatcgtcgtggatcccatcctgcgcgttggcgcggacaatcacgtactcccgctcgactgcgtcactctgcagactttcttggccaagtgtctggggccgttcgacgagtgggaatcacgcttgcgcgtggcgaaggaatccgggtacaatatgatccatttcactcctctccaaactctcggactgagcaggtcgtgctactcacttgccaaccagctggaactgaacccggacttctcgcgcccgaacaggaagtatacctggaacgacgtcggtcaacttgtagagaagttgaaaaaagagtggaatgtgatctgcatcaccgacgttgtgtacaatcataccgcggcgaattctaaatggatccaagaacaccctgagtgcgcctacaacctcgtaaactcaccgcatcttaagccggcgtgggtccttgacagagctctctggcgcttcagctgcgacgtggccgagggaaagtacaaagagaaaggcatcccggccctcatcgaaaatgatcaccacatgaactcaatccgcaaaatcatctgggaggacattttcccaaagctcaagctgtgggagttcttccaggtcgatgtcaataaagccgtggaacaattccggcggctcctgacccaggaaaaccggcgagtcaccaaatccgacccaaaccagcaccttactattatccaggatcccgaataccgccggttcgggtgcaccgtggacatgaacatcgccctgactacctttatccctcatgataagggaccggcggcgatagaggaatgctgcaattggttccacaagcggatggaggagctgaactcagagaagcaccgcttgatcaactatcaccaagagcaagccgtaaattgcctgctgggaaacgttttctacgaaagactggcaggccacgggccaaaacttggccccgtcacgcgtaaacaccccctggtgacgagatatttcacctttccgttcgaggaaatcgacttttctatggaggaatcgatgatccatcttcccaataaggcgtgcttcctgatggcgcacaatggatgggtgatgggtgatgacccgctgaggaacttcgcggaaccaggatccgaagtgtacctgcgccgggaactcatctgttggggggacagcgtcaagctgagatacggcaataagccggaggactgcccgtatctgtgggcccatatgaaaaagtacactgaaatcaccgcaacttacttccagggtgtgcggctggacaactgtcactcgaccccactgcacgtggctgagtatatgctggatgccgccagaaatctccaaccgaatttgtacgtggtggccgaacttttcaccggaagcgaggacctggacaacgtgttcgtgactagacttggaatctcgagccttatccgcgaggcgatgtccgcgtacaattcccatgaggaaggtcgcctggtgtaccgctacggaggtgaacctgtcggatcgttcgtgcaaccttgcttgcggcccctgatgccggccattgcgcacgcactcttcatggatattacccacgacaacgaatgcccgatcgttcaccggtcagcctacgatgccctgccatcgaccactatcgtgagcatggcttgttgtgcgagcggatccacccgcggatacgatgaactggtgccacaccagatctcggtggtgtctgaagagagattctacaccaagtggaaccccgaagcactcccctcaaacaccggcgaagtcaactttcagtcaggaatcatagcggcgcgctgtgcgatctccaagctgcatcaagaactgggagcgaagggatttatccaagtgtacgtggaccaggtggacgaggatatcgtcgccgtgactaggcattcaccgagcatccatcagagcgtggtagcggtgtcccggaccgctttccgcaacccaaagacctcgttctattccaaggaggtcccacaaatgtgtatccccggcaagatagaagaggtggtgctggaggccaggactatcgagcgcaacaccaaaccgtacaggaaggatgaaaactcaatcaacggaaccccggatatcaccgtggagattagagaacatatccaactgaacgagtccaagatcgtgaagcaagcaggagtggcaaccaaagggccaaatgaatacatccaagagatcgagtttgaaaatctgtctccaggtagcgtgataatcttccgggtgagccttgatccacacgcgcaggtcgccgtgggtatcctgcgcaaccacctgacccagttttcgccacatttcaaatccggatctctcgcggtcgacaatgcggaccctattctgaagatcccttttgcttcactggcttcgcgtcttacccttgcagaactcaatcagatcctgtaccgctgtgagtccgaagaaaaagaggacggaggaggatgctacgacatacccaactggtcggccctgaagtacgcaggactccagggactcatgtcagtgctggccgagattcgcccaaagaacgacttgggtcatccattctgcaataacttgaggagcggcgattggatgatcgattacgtgtcgaaccgcctgatctccaggtccggaaccatcgctgaggtcggaaaatggctgcaggctatgtttttctacctgaagcaaatcccgcgatacctgatcccatgctactttgatgcaatcctcattggcgcctacaccaccctgctggacactgcctggaagcaaatgagctcgttcgtccagaatggaagcacttttgtgaaacacctgagcttgggatcggtgcaactctgcggagtgggaaaattcccgtcacttccgatcctgtcccctgccttgatggatgtgccgtatagattgaatgaaatcacgaaggagaaggaacagtgctgcgtctccctcgcggctggcttgccacatttctcgtccggcattttccgctgctggggaagggatactttcattgcgctcaggggaattttgcttatcaccgggcggtacgtggaggcacggaacatcattctggcctttgccggaactctgcgccatggactcatccccaatctgctgggagaaggcatctacgcacgctacaactgccgtgatgccgtgtggtggtggctccaatgcatccaggattactgcaagatggttccgaatggtctggacattctgaaatgccccgtgtcgcgcatgtatccgaccgatgatagcgcccctctgcctgccggcactctcgaccagccactgttcgaggtgatccaggaagcaatgcaaaagcatatgcagggcattcagtttcgcgaacgcaacgctggaccgcaaatcgaccggaacatgaaggacgaggggttcaacattaccgcaggagtcgacgaagagactgggtttgtctacggaggaaacagatttaactgcggaacgtggatggacaaaatgggtgagtccgaccgggcccgcaaccggggaatccctgccactcctcgagacggatccgctgtggaaatcgtgggtctgtccaagtcggctgtgcgttggttgcttgagctgtctaagaaaaacatcttcccgtaccacgaagtcactgtcaagcgccacggcaaggccattaaggtttcatacgacgaatggaacagaaagattcaggacaacttcgaaaaactcttccacgtgtcagaagatccatccgacctcaacgagaagcacccaaatctcgtgcataagcggggcatttacaaagacagttacggcgcatcgtccccgtggtgcgactatcagctcagaccgaatttcactatcgccatggtggtcgcaccagaactgttcacgactgaaaaggcctggaaggcactcgaaatcgccgagaagaaacttctcgggcccctggggatgaaaacgctcgacccggatgacatggtgtactgtggaatttacgataacgcacttgataatgacaactacaatctcgccaagggcttcaattaccaccagggtccagaatggctgtggcctatcggatactttctgagagcgaaactctacttctcgagactgatgggccctgaaaccactgcaaagactattgtgctggtcaagaatgtcctctcgaggcattacgtgcacctcgaacgctcgccttggaagggtctgccagagcttaccaacgaaaacgctcagtactgcccgttttcctgtgagactcaggcgtggtccattgcgacgatcctggagactctgtacgatctg

SEQ ID NO: 6088 - DNA, 4596 bp, synthetic construct
  misc_feature 1..4596: note = source = /note="Description of Artificial Sequence: Synthetic coding sequence"
  source 1..4596: mol_type = other DNA
atgggtcacagcaaacagatccggatcctccttctgaatgagatggaaaagctggaaaagacgctgtttagactcgagcagggatacgagcttcaatttcggctcggaccaaccctgcagggcaaagcagtcaccgtgtacactaactacccgttcccgggtgaaacttttaaccgcgaaaagttccgctcgctcgactgggaaaacccgactgaacgggaggacgattcagataagtactgcaaactcaaccttcagcagagcggttccttccaatactacttcctccagggaaacgaaaagtcaggtggaggatacatcgtggtggaccccatcctccgcgtcggcgcggataaccacgtgctcccactggattgcgtcactctgcagaccttcctggcgaagtgcctcggaccgtttgatgagtgggaatcccgcctgcgggtggcgaaggaatcaggctacaacatgattcatttcactccgctccaaaccctgggactgtcgcgctcgtgctactcgctggcaaatcaactcgaactgaacccggacttcagccgcccgaacagaaagtacacctggaacgacgtgggacaactcgtggaaaaactgaagaaggagtggaatgtgatctgcatcaccgacgtggtctacaaccatactgccgccaattcaaagtggatccaagaacatccggaatgcgcctataatctggtcaactcgccccacctgaagcccgcctgggtcctggatcgcgctctgtggcggttctcctgtgacgtggccgagggcaaatacaaggaaaagggaatcccagccctgatcgaaaacgatcaccacatgaattccatcagaaagatcatctgggaggacatctttccaaagttgaagctgtgggaattctttcaggtcgacgtcaacaaagctgtggaacagttcaggagactgctcacgcaggaaaatcggcgggtgaccaagtcagatcctaaccaacacttgacgatcattcaggacccggagtaccggagattcggctgtactgtcgacatgaacattgcgctgactaccttcatcccgcacgataagggaccggcggcaatcgaggaatgctgcaactggttccataaaagaatggaggagttgaactccgaaaagcatcgtctgatcaactatcaccaggaacaggcagtcaactgcctgctgggaaacgtcttttacgaaagactcgcgggacacggcccgaaactgggacctgtgacccgtaaacacccgctggtgacccgctacttcaccttccctttcgaggagatcgacttctcaatggaagagtctatgattcatctcccaaataaggcgtgtttcctgatggcgcataacgggtgggtgatgggtgatgacccactgaggaactttgccgaacctgggtccgaagtgtacctgcgccgggaactgatctgttggggcgacagcgtgaagctccgctacggaaacaagcccgaagattgcccttacctgtgggctcatatgaagaagtacactgaaatcactgcgacctactttcaaggtgtgcggctggacaactgccattccaccccactgcacgtggccgaatacatgctggacgccgcccggaatctgcagccgaacctttacgtcgtcgcggagctgttcaccggcagcgaagatctggacaatgttttcgtgaccagactgggcatcagctcgctgatccgggaggcaatgtcagcttacaattcgcacgaagaaggtagacttgtctacagatacggaggggaaccggtgggctcgttcgtgcagccgtgcctgcgcccgctcatgccggcgatcgcgcacgccctgttcatggacattacccacgacaatgagtgcccgatcgtgcataggtcggcctacgatgcactcccaagcactactatcgtctcaatggcctgctgtgcgtcggggtcgactagaggctatgacgaactggtgccacaccaaatttctgtcgtgtcggaagaaagattttacaccaagtggaacccggaggctctgccatctaataccggcgaagtcaacttccaatcagggatcatcgcggcacgctgcgcaatctccaagctgcaccaagaactgggagctaagggattcatccaggtgtacgtggatcaggttgatgaggatatcgtggcggtgacccggcatagcccttccatccatcagtcggtcgtggcagtgagcagaaccgcatttcgcaatcctaagacctcgttctattcaaaggaggtgccgcagatgtgtatcccgggcaagattgaggaagtggtcttggaggcccggactatcgaaaggaacaccaagccgtacagaaaagacgaaaattcaatcaacggcactccagacatcaccgtcgagatccgcgaacatatccaactgaacgagtccaagattgtgaagcaggctggtgtcgcaaccaaaggacctaacgagtacatccaggagatcgaattcgaaaacctgtctcccggatccgtgatcatattccgcgtgtcacttgacccgcacgctcaagtggccgtgggtatcttgcgcaaccacctgacccagttctcaccgcacttcaagtcgggatcactcgcggtggacaatgcggacccgatcctcaagattccgttcgctagcctcgcttctaggctcacgcttgcggaactcaatcaaatcctgtaccgctgcgagtcggaggagaaagaggacggaggaggatgctatgatattcccaactggtccgcccttaagtacgccgggctgcagggactgatgtcagtgctggctgagatccggcccaagaacgacttgggacacccattttgcaacaacctgcgctccggggactggatgatcgactacgtgagcaatcgcctcatctcgagatctggcaccatcgccgaagtgggcaaatggctgcaggccatgttcttttatctcaaacagattcctcgctacttgatcccgtgctactttgacgccattctcatcggagcttacaccactctgttggacaccgcgtggaagcagatgtcatccttcgtccagaatggcagcacgtttgtgaagcacctttcactgggctcagtgcaactgtgcggtgtggggaagtttccgtcgctcccaatcttgtccccggcactgatggacgtcccctatcgattgaacgagatcaccaaggaaaaggaacagtgttgcgtctcgctggcggccggacttccacacttctcgtcgggtatctttaggtgttggggacgcgacactttcatcgccctgagagggattctgctgattactggccgctacgtcgaagcacggaacattattctggcgttcgctgggacgctccggcatggactgatcccgaacctcttgggagagggcatctacgctagatacaattgccgcgatgcggtgtggtggtggctccaatgcatccaggattactgtaagatggtcccgaacggactggacatactgaaatgcccggtcagcagaatgtacccgaccgatgattccgcgccgctgccagctggtaccttggaccagccactgttcgaagtcatccaggaagcgatgcagaaacatatgcaggggatccaatttcgggaacgcaacgcgggaccgcagatcgaccgcaacatgaaggatgaaggctttaacatcaccgccggagtggatgaggagacgggattcgtgtacggaggaaatcggttcaactgcgggacctggatggataagatgggagagagcgaccgggcgcggaacagagggatcccggccacgccccgtgacgggtccgccgtggagatcgtcgggctgtcaaagtccgccgtcagatggctcctggaactgtcgaagaaaaacatttttccataccatgaagtcaccgttaaacgccatggaaaagccatcaaagtgagctacgacgagtggaaccgcaagatccaggacaacttcgaaaaactgttccacgtctcagaagatccatccgatctgaatgaaaagcatcctaacctggtgcacaaacgcggaatctacaaggatagctacggggccagctccccatggtgtgattaccaactgcgcccgaatttcaccatcgccatggtggtggcaccggaattgttcaccaccgaaaaagcctggaaggccctcgagatcgccgagaagaagttgcttggcccactcggaatgaaaacgctcgacccggatgacatggtgtactgtgggatctacgataatgcattggacaacgacaattacaatctcgcgaaaggcttcaactaccatcaggggcctgagtggctgtggcctatcggttacttcctccgcgccaagctctacttctcccggctgatgggtcctgaaaccaccgccaaaacgatcgtcctggtcaaaaatgtgttgagccggcactacgtgcacctcgagcgctcaccgtggaagggactgcccgaacttactaatgaaaatgcccagtactgcccgttttcgtgcgaaacccaggcctggtccatcgcaactatcttggaaaccctgtacgatctg

SEQ ID NO: 6089 - DNA, 4596 bp, synthetic construct
  misc_feature 1..4596: note = source = /note="Description of Artificial Sequence: Synthetic coding sequence"
  source 1..4596: mol_type = other DNA
atgggacattcaaagcagatccgcatcctactactgaacgaaatggaaaagctggaaaagacactgttccgactggagcagggatatgagctccagtttagactgggaccgaccttacagggaaaagctgttactgtctacactaactatccatttcctggtgagacatttaatagggaaaagtttagatcgctggactgggagaatcctactgagagggaggacgattcagacaagtattgtaagctgaatctgcagcaaagtggctcattccagtattactttttgcagggaaacgagaaatctgggggtggttacattgtagtggatcctattctgagggtaggcgctgacaaccatgtcctgcccttagattgcgtcacgcttcagacattcctcgctaaatgtctggggcccttcgatgagtgggagtcaaggctacgggtagcaaaggaaagcggatacaacatgatccactttaccccactccagacccttggcttatctagaagctgctactctcttgccaaccagctggagctgaacccagattttagcagacctaaccggaagtatacttggaacgatgtcgggcaacttgtcgaaaagctcaaaaaagaatggaacgtcatttgtatcacagatgtggtctacaatcatactgcagccaactcgaagtggatacaggagcacccagaatgtgcctataatctcgtcaactcacctcacttaaagcccgcctgggtgcttgacagggcattatggaggtttagctgtgacgtggcagaaggcaagtataaggagaaagggattccagcccttattgagaatgaccatcacatgaactccataagaaagatcatatgggaggacatctttccaaaactgaagctttgggagtttttccaggtagacgtgaacaaggcagtcgagcaattccgcaggctgctgacccaagagaatcggagagttaccaaatctgacccaaatcagcacctgacaatcattcaggacccggagtaccgacggttcgggtgcaccgttgacatgaatatagctctaaccacattcatccctcacgacaagggcccggccgctatcgaggagtgctgtaattggttccataaacggatggaagagttgaacagcgaaaagcatcgtctaatcaactaccaccaggaacaagccgttaactgtctcttgggaaatgtgttctacgagcgactagccggccacggcccaaaactggggcccgtgacccgcaaacacccactcgtcacccgctactttacatttccttttgaggagatagacttttcgatggaagaaagcatgatccacctccccaacaaagcatgctttctgatggcgcacaacggatgggtcatgggcgatgatccccttagaaattttgccgagccggggtcagaggtgtatctgcgccgggagctcatttgttggggcgactccgttaaattgaggtatgggaataagcccgaggattgtccttatctctgggctcacatgaaaaaatatacagaaattactgccacttacttccagggcgtgcggcttgataactgccatagcacccctctccacgtagccgaatatatgcttgatgcagcaaggaacttgcagccaaacctctacgtggtcgcggaactgtttacagggtctgaagacctggataacgtctttgtaacgaggcttggcattagcagtcttattcgcgaagcaatgtctgcgtacaactctcacgaagagggaaggctggtgtatcggtacggaggagaacctgtgggttcctttgtgcagccttgcctgcgacccttgatgccggctattgctcacgctctgttcatggatataacacacgataatgagtgtcctattgtgcaccggagtgcgtacgacgcacttcccagtacaaccattgtgagcatggcctgttgtgcaagtgggagcacaagaggatacgacgaattagtgccccaccagatatcagtcgtttcagaggagagattctataccaagtggaatcctgaagcgctacccagcaatacaggcgaagttaactttcagtccggaatcatcgccgccagatgcgctatctcgaaactccaccaagaactgggggcaaaaggtttcattcaggtgtatgtagatcaggtcgacgaggacattgtcgcagttacaaggcacagcccgagcatccaccagtccgtcgtggcagtctctaggaccgctttccggaacccgaagacttcattctacagtaaagaggtcccccagatgtgtatcccgggaaaaattgaggaagtggtgctggaagctcggaccatcgagcggaacaccaaaccatacagaaaggacgagaattctatcaacggtacccctgacatcacagtggagatcagagaacacatccagttgaacgagagcaagatagtgaagcaagccggggttgccacaaagggccctaacgaatatatacaagagatcgagtttgaaaatctgtccccgggatccgtgataatattccgggtgagcctggacccccatgcccaggttgcggtcggaattttacgcaaccacctgacccaattttccccccactttaaaagtggatccctggcggtcgataatgcagaccctatcctcaagataccattcgcatccttggcctcccggctgactttagcggagctgaatcagatcctgtatagatgtgaatcagaggagaaagaagatggcggcgggtgttatgacataccgaattggtccgctttaaaatatgccgggctacaggggctgatgtctgtcctggctgaaattcgacctaaaaatgatcttggccatcccttctgtaataacctgagatctggagactggatgattgattatgtgtcaaaccgcctcatctctcgatctggaacaattgccgaagtcgggaagtggctccaggcaatgtttttttaccttaagcaaatccctcgatatttgatcccttgctattttgatgcaattttaatcggtgcttatacaacgctcctggacacagcctggaagcaaatgtcttcgtttgtccagaacggaagcaccttcgtgaagcaccttagtctgggctccgtgcagctgtgcggtgtagggaaattcccatccctcccaatcctctctccagctctcatggacgttccttacagactgaatgagatcacaaaggaaaaagagcaatgctgcgttagcctggccgcagggctgccccacttttcgtcaggaatcttccgctgctggggcagggatacatttatcgctctgaggggaattttgctcataaccggacgttacgtagaggcacgcaacatcattctggcttttgctgggacgcttcggcacggactgatcccaaaccttctcggagagggcatctacgcacgttacaattgtagggacgcagtgtggtggtggctgcagtgtatccaggactactgcaagatggtccccaatggtctcgacatcctcaagtgtccggtttcgcggatgtacccaactgatgactcggcacccctccctgccggcacattggaccagcccttgtttgaggtgattcaagaagccatgcagaaacacatgcaggggatccagttccgggagaggaacgccggcccccagatcgatagaaacatgaaagacgaaggtttcaacatcacagcgggcgttgacgaggagaccggtttcgtttacggcgggaacagatttaactgcggcacttggatggataaaatgggagaaagcgacagggcccgtaataggggcatccctgccacccctcgcgatgggtcagccgttgagattgttggtttgagcaagtctgccgtgcgctggctgcttgaactttctaagaagaatatttttccttatcatgaggtgacggtaaagagacacggcaaggccattaaggtttcctacgacgagtggaaccggaagatccaggacaattttgagaagctctttcatgtgtccgaagatccgtccgatctgaacgaaaaacatccaaatttggtgcacaagcgagggatctataaggattcgtacggtgccagcagcccctggtgtgattaccaactgcggccaaatttcaccatcgctatggtagtcgccccagagctcttcaccacagaaaaggcatggaaagcactcgaaattgcagaaaaaaaactgctgggaccactgggtatgaaaactctggatcccgacgatatggtctattgcggcatctatgacaacgccctggataacgataactacaacctggcgaagggcttcaattaccatcagggcccagagtggctctggccaattggctatttcctgcgggccaaactgtacttctcacgtctgatggggccggaaacgacagctaaaaccatcgtcctagtcaaaaacgtgctgtcaagacactacgtgcacctggagaggagcccttggaaagggttgcccgaactaaccaatgaaaacgcacaatattgtcccttcagctgtgaaacacaagcctggtccatcgctactattttggaaaccttgtacgacctt

SEQ ID NO: 6090 - DNA, 4596 bp, synthetic construct
  misc_feature 1..4596: note = source = /note="Description of Artificial Sequence: Synthetic coding sequence"
  source 1..4596: mol_type = other DNA
atgggccattccaaacaaattagaatcctactcctgaacgaaatggaaaagttagagaagacgttgtttcgtctggagcagggttatgaactccaattccgactcggcccaactctgcagggcaaagctgttaccgtatacacaaactacccatttccaggcgagacttttaacagagaaaagttcaggtcactagactgggaaaacccaaccgagagggaggacgattccgacaagtactgcaagctaaacctccagcaatccgggtcctttcagtactacttcctgcagggaaacgaaaagtcagggggcggctacatcgtcgtagatccgatcttacgagttggtgcagacaatcacgttctcccgctggattgtgttacacttcagaccttcctggcaaaatgcctgggccccttcgacgagtgggaatcgcgattgagagttgctaaagaatccggctacaacatgatccactttaccccattgcagactctgggattatccagatcatgttatagtctggccaaccagttggaactgaaccctgactttagcaggccaaacaggaagtacacctggaacgacgttgggcagctcgtcgagaaactcaaaaaggagtggaatgtaatttgtatcaccgacgtcgtctacaaccatacagccgctaattcaaagtggattcaggaacatcctgaatgtgcatataatctggtgaactccccacatcttaaacctgcttgggtgttggaccgtgcgctttggcgattcagctgtgatgtagcagagggcaaatacaaggaaaaggggatacctgcattgatcgagaacgatcaccacatgaatagcatccgaaagatcatctgggaagacatttttccgaaactcaaactctgggagtttttccaggttgacgtgaataaagccgtggaacaatttcgcagactgctgacacaggagaaccgaagagtgacaaagtcagacccaaaccagcacttaacgattatccaggatcctgaatatagaagattcggctgtactgtggacatgaatatagccctgacgactttcatcccacacgacaaaggccccgccgccatcgaagaatgttgcaattggttccataagaggatggaggagctgaacagtgagaagcacaggctgattaactatcaccaggagcaggctgtgaattgtttattggggaatgtgttctatgaacgactagctgggcacgggcccaagctgggacctgtgactcgaaaacaccccctcgtgacccgttactttaccttcccgtttgaggaaattgatttctctatggaagaaagtatgattcacctgccaaataaagcttgctttctgatggcacacaacggctgggttatgggtgatgatcctctaaggaacttcgccgagcctggttctgaggtctatcttcgcagggaattaatttgttggggggattcagtaaagctccgctacggaaataagcccgaagactgcccctacctatgggctcacatgaagaaatacacagaaattacagcaacctacttccagggcgtgcgtttggataattgtcattctacaccgctccacgtcgctgagtatatgctcgatgctgcgagaaatctgcaaccaaatctttatgttgttgctgaattgtttaccggctctgaagatctcgataatgtcttcgtcacacgtctcggaataagttcattaatccgagaagctatgtccgcgtataatagccacgaagaggggcggctcgtgtaccggtatggcggcgaacctgtaggaagttttgtgcagccctgtttgagacccttgatgccggccatcgcccacgccctattcatggatattacccacgacaacgaatgcccaatcgtgcatcgctccgcttatgatgcattgccgtctacgacaatcgtatctatggcctgttgcgcgtctggctctacccgagggtacgatgagcttgtgccccatcagattagcgtagtgagcgaagaacgattctacactaagtggaacccagaagctctacctagtaataccggagaagtgaacttccagtccggaatcatcgccgctcgatgtgccatttccaagctgcaccaggagttgggtgccaagggcttcatacaggtatatgtggatcaggttgatgaagacatcgtcgcggttacccgacacagtccttcaatccaccaatcagtagtggcggtgagcaggaccgccttcagaaatccaaagacaagtttttattccaaggaggtgccgcagatgtgcattccagggaagatcgaggaggtagtattggaggcacgaacaatcgagagaaatacgaaaccctatcgaaaggatgagaacagcataaacggaacacctgacattaccgttgaaatcagggagcacatccagctaaacgagtctaaaattgttaaacaagcgggtgtagctacaaaaggacccaatgagtatattcaggagatagagtttgaaaacctgtcacccgggtctgtgatcatttttagagtcagtcttgacccgcatgcacaagtggccgtcgggattttgagaaatcacctcacgcagttttcccctcattttaagagtggctccctggccgtggataacgccgacccaatcctgaagattccgttcgcttcactcgcatctcgactgacactagctgaactgaatcagatactctatagatgtgagagcgaagagaaggaagacggcggagggtgctatgacatacctaattggtcggcgcttaagtatgccgggctgcaagggctcatgagcgtactagccgaaatccgtcctaagaacgatctggggcatccattctgtaataacttgagaagcggcgattggatgattgactacgtcagcaaccgactgatcagtaggagcgggacaattgctgaagttgggaaatggttgcaggctatgttcttctaccttaagcaaatccctaggtatttgatcccatgctactttgacgccattctgatcggcgcatacacaactctcctggacaccgcttggaagcaaatgagttcattcgtacaaaatgggtcgacatttgtaaaacatctgtcattagggtccgttcaactgtgtggcgtcgggaaatttccatctctaccgatattaagcccggctctcatggacgttccttatcggctgaatgaaatcacgaaggagaaggaacaatgttgtgtatcccttgccgcaggacttccccacttttcgtccggaatctttagatgttggggtagggatacattcatcgccctaagaggtatccttctcatcactggtaggtatgttgaggcccgaaatatcatcttagcatttgcaggtactctgcgacacgggctgatccccaatctccttggggagggtatctatgcacgctataactgcagggatgccgtgtggtggtggctgcaatgtattcaagactactgcaagatggttcctaatggactagatatattgaaatgtcccgtcagccgcatgtaccctaccgatgactcagcacctctcccagctggaacactggaccagccactgtttgaagtcatccaggaagccatgcagaaacatatgcagggcattcagttccgagagagaaatgcagggccccagatcgatcgaaacatgaaggacgagggatttaacattaccgccggcgtcgatgaggaaacagggttcgtgtatggcggaaacaggttcaactgtggcacctggatggataagatgggggagtctgaccgagcaagaaacagaggaattcccgccactcctagagatggatctgcagtggagattgtggggctcagcaagagtgccgttaggtggctcctggagctgagtaaaaagaacatcttcccgtatcacgaggtcaccgtaaagagacatggtaaggcaatcaaggtgagttacgatgaatggaatagaaagattcaagataactttgagaaattgttccacgtgtccgaagaccccagtgacctgaatgaaaaacacccgaatcttgtccacaaaagaggaatctacaaagattcctatggagcctcctcaccctggtgcgactaccagttgaggcctaacttcaccattgctatggtggtggcgcctgagctctttacgacagagaaggcgtggaaagccctggaaatcgccgagaaaaagctgttgggtcccctagggatgaaaacactggatcccgatgacatggtatactgcggaatttacgacaacgctttggataatgacaattacaatcttgccaaggggttcaattatcaccagggccccgaatggctctggcctatcggctattttttgagagcaaaactgtacttttccaggctgatgggccccgaaactaccgccaagacaatcgtcctggttaaaaacgtgttgagccgtcactacgtccaccttgagagatccccctggaaaggcttgcccgaacttactaacgaaaacgcgcagtactgtcctttcagctgtgaaacacaggcttggtcgatcgctaccatactcgagacactctacgacctg

SEQ ID NO: 6091 - DNA, 4596 bp, synthetic construct
  misc_feature 1..4596: note = source = /note="Description of Artificial Sequence: Synthetic coding sequence"
  source 1..4596: mol_type = other DNA
atgggacattccaagcagattagaatccttctccttaacgaaatggagaaactggaaaaaacactcttccgcttggagcagggatatgaactacagttcagactcggacctactcttcagggaaaagcagtgactgtgtatactaactatccttttcccggagagacattcaatagggaaaaattcagaagtctcgattgggagaaccctacagaacgggaagatgatagtgacaaatattgcaaacttaatctccagcagtctgggtcattccagtattatttcttgcagggaaacgagaaatccggaggaggatatattgttgtcgaccctatcctgcgcgtaggagccgataaccacgtcttacccctggactgcgtgacactgcagacttttctagccaagtgcctcgggccatttgatgaatgggaatcacgcctccgggtcgccaaggaaagtggatataatatgatccacttcacaccactccagacacttggactatcccgcagttgttattctctcgcaaatcagctagaactcaacccagatttctctaggcctaacaggaaatatacttggaacgatgttggacagctcgttgaaaaactaaagaaagaatggaacgtaatctgtatcactgatgtagtgtacaatcacacagccgctaattctaaatggatacaggaacatcctgaatgcgcctataatctcgtgaattctccccatctgaaacctgcctgggtgctcgacagggcactctggaggttctcttgcgatgtagcagaaggaaagtataaagagaaagggatacccgctttaatcgaaaatgatcatcatatgaactccattcggaaaatcatctgggaagacatatttcccaagcttaaactctgggagttttttcaggtcgatgtgaacaaagcagtagaacagtttcggcggctactgacacaggaaaacagacgagtgactaagtctgatcccaaccagcacttaactatcatccaggatcctgaatatagacgcttcgggtgtactgtggatatgaacatcgcactcactacttttataccacatgataaagggccagccgctatcgaggaatgctgtaattggttccataaaaggatggaagaattaaactccgaaaaacaccggttgatcaattaccaccaggaacaggcagtgaattgtctgctggggaacgtgttttacgaaagactagctggacatgggcccaaacttggacccgtaacaagaaagcacccactggtgactaggtattttactttcccctttgaagaaatcgatttttctatggaagaatctatgatacatctcccaaacaaagcttgctttctcatggctcacaacgggtgggttatgggggatgatccactcaggaatttcgccgaacctgggtccgaagtttatctaagacgggagctgatctgttggggagattctgtgaaactacgctacggaaataaacccgaagattgcccatatctgtgggcacatatgaaaaaatatacagaaattacagcaacatatttccaaggagtgcggctcgacaactgtcatagtacaccccttcatgtggccgaatatatgctagatgccgcccgcaacttacagccaaatctgtatgtagtcgcagaactcttcactgggagtgaagatttagataacgtcttcgttacaagactgggaatctcatcattgataagggaagcaatgtctgcttataactcacatgaggaaggacggctagtctatcgctatgggggagaacccgtcggatctttcgtgcagccttgtttaagacccctaatgcccgctatcgctcacgctctcttcatggatataacacacgacaacgaatgcccaattgtgcacaggtcggcctacgatgctctgccaagtacaacaatcgtgtccatggcttgctgtgcatccgggtccactcgaggatatgatgaactcgtgcctcatcagataagtgtggtgtctgaagaacggttttatactaaatggaaccctgaagcactaccctctaacactggagaagtgaattttcagagtggaatcatcgctgctaggtgtgctatatcaaaactacatcaggaactgggagccaagggatttatccaggtctacgtggatcaggtagatgaagatatcgttgcagtgactaggcattccccttctatacatcagagtgtcgtggccgtgtcacgcactgcatttcggaaccccaaaacatcgttctattctaaggaagttccccagatgtgtattcccggaaaaattgaggaagtggtgctagaagcacggactattgaaaggaatactaagccttatcggaaagatgaaaattccataaacgggacaccagatataacagtggaaataagggagcatatccaactcaatgaatccaaaatcgtgaaacaggctggagttgccacaaaggggccaaacgagtatattcaggaaatagagttcgaaaatctgtcccccggatctgtaattatatttcgcgtcagtctagatccacatgcgcaggtcgctgtggggatcctgagaaatcatctcactcagtttagtccccacttcaaatccggatccttggccgttgacaacgctgaccctatacttaaaatacctttcgcctccctggcatctcgattgacactagcagaactcaaccagatcttgtataggtgcgaatctgaagaaaaggaagatggggggggatgttatgatatccccaactggtctgctctcaaatatgcggggctgcaggggctaatgtctgtactggctgaaatccgccctaagaacgatctagggcatcccttctgtaacaatctacggtcaggggattggatgatcgactacgtgtccaaccggctgatatccaggagtgggacaatcgccgaagtcggaaaatggctgcaggccatgtttttctatttaaaacagatacctcggtatcttataccttgttacttcgatgccattctgataggggcttatactactcttcttgatactgcttggaaacagatgagttcttttgtgcagaatgggtcgacatttgtcaagcatctctctctggggagtgtgcagttgtgcggggtgggaaagttcccttcgcttcctatccttagtcccgccttgatggatgttccttaccgccttaatgaaatcacaaaagaaaaggaacagtgttgtgtgtcactcgctgctggactgccccatttcagtagtggaatctttcggtgttggggacgagatacttttattgcccttagggggattctactcataactggaagatatgtagaagccaggaatataatacttgcctttgccggaactcttagacacggactgatcccaaacctactgggagaaggaatatatgcccgctataactgtcgggatgcagtgtggtggtggttacagtgtatacaggattattgtaagatggtccccaatggactcgatatcctcaaatgtcccgtgagtcgaatgtaccctacagatgatagtgcaccactgcctgcaggaactttagatcaaccactctttgaggtgattcaggaggcaatgcagaagcacatgcagggaatccagtttcgagaacgaaacgccggacctcagatcgatcgcaatatgaaggatgagggattcaatattacggccggagtcgatgaggaaactgggttcgtgtatgggggaaacaggttcaattgtggaacttggatggataaaatgggggaatctgatcgcgctcggaacagggggattccagccactccaagggatgggtccgccgttgaaatcgtaggactcagtaaatctgccgtaagatggctcctcgagctctctaaaaaaaacatcttcccctatcatgaagtgactgtgaaacggcatggaaaagcaatcaaagtaagttacgatgaatggaataggaagatccaggataacttcgagaaactgtttcatgtgtctgaagatccttctgatctcaacgaaaagcacccgaacctcgtgcataaaagggggatatataaagattcatatggggcctcttccccatggtgtgattatcagctccgccccaatttcacaattgcaatggtggtggctccagaactgttcactactgagaaagcctggaaagcattggaaatcgcagaaaaaaaactgctggggcccctgggaatgaaaactctggatcctgacgatatggtatactgcggaatctatgataacgccctcgataacgataattataatctagcaaaagggttcaattatcaccaggggcccgaatggttgtggcccatcgggtacttcttgagggcaaaactctatttttctcgacttatggggcccgaaactacagccaaaacaatcgtgcttgtcaaaaacgttctgtctcgccactatgtgcatctggagaggtcaccttggaagggactcccagaactaactaatgaaaatgctcagtactgtcctttctcttgcgaaacacaggcttggtccatagcaactatccttgaaacattatacgatctt

SEQ ID NO: 6092 - DNA, 4596 bp, synthetic construct
  misc_feature 1..4596: note = source = /note="Description of Artificial Sequence: Synthetic coding sequence"
  source 1..4596: mol_type = other DNA
atgggtcattcaaagcagatcagaattctgttgctgaacgagatggagaagctcgaaaagaccttgttccgcctggaacagggatacgagttgcagtttcgcttgggaccaaccctgcaaggtaaagctgtgaccgtttacactaattaccccttccctggagagactttcaacagagagaagttccgttccctcgattgggagaatcctactgaaagggaggatgacagtgataagtattgcaaactgaacttgcagcaatccggttccttccaatactattttcttcagggaaatgagaaatcaggaggaggatatatcgttgtagaccctattcttcgtgttggtgctgacaaccacgttctcccattggattgtgtgactcttcagaccttcctggctaaatgcctgggccctttcgatgagtgggaaagcaggctccgtgtggcaaaggagagcggttacaatatgattcatttcacacctctgcagaccctgggccttagccgttcatgctactcccttgccaaccagctggagctcaaccctgacttcagcagacccaatcgcaaatacacttggaacgacgttggacagctggtcgagaagctgaagaaagagtggaacgtaatctgtattacagatgttgtttacaaccatactgccgcaaattccaagtggatccaggagcatcctgagtgcgcctacaacctggtgaactctcctcaccttaagccagcatgggtgctggatagagccctttggaggttctcctgcgacgtggctgaaggaaagtacaaagagaagggaatacctgcactgattgagaacgaccaccacatgaattccataaggaaaatcatctgggaagacatcttccccaaactcaagctttgggaatttttccaggtggacgtgaacaaggccgtggagcaatttaggcgcttgttgactcaggagaaccgccgcgttaccaagagcgaccctaatcaacatctcaccattatccaggatcctgaatacagaaggttcggatgcactgtcgatatgaacatagcactgaccactttcatcccacatgacaagggtcctgctgccatcgaggagtgttgcaactggttccataagcgcatggaggagttgaatagtgagaagcataggctgatcaactatcaccaagagcaggctgtcaactgcctcttgggaaacgttttctatgagcgcctcgctggccatggccccaagctgggacctgtgacacgcaagcatcctctcgtgaccagatatttcacttttccttttgaggaaattgatttcagtatggaggagtcaatgatacatttgcctaataaggcctgtttcctcatggctcacaatggatgggtaatgggcgacgaccccctgcgtaacttcgccgaaccaggctccgaggtgtatctgaggagagaactcatttgctggggagactccgtaaagcttcgttatggtaacaagcccgaggattgtccctacttgtgggctcacatgaaaaaatataccgagatcaccgccacatatttccagggagtcagactggacaattgccactccactcctttgcacgttgccgaatacatgcttgacgccgctagaaatctgcagcccaatctgtatgtggtcgccgagctgttcaccggctccgaggacctcgataatgtgttcgtcactagacttggtatcagctccttgataagggaggcaatgtccgcctacaactcccacgaggaaggccgcttggtgtaccgctacggaggcgaaccagttggatcttttgttcaaccctgcctgcgtccactgatgcccgctatcgcccacgctttgttcatggacatcacccacgataacgagtgccctatcgtgcataggagtgcatacgacgctcttccatcaaccaccattgtcagcatggcatgttgtgcatctggctctactagaggctatgatgagctggtaccccatcaaatctctgttgtttccgaagagcgtttctatacaaagtggaaccctgaagcactcccctcaaacacaggcgaagtaaattttcaatctggcattatcgcagctagatgcgctatctccaagctgcaccaagagcttggcgccaagggcttcatccaagtctacgttgatcaggtcgacgaggatatcgtcgctgtcacacgccattcacctagcattcatcagtcagtggtggccgtttctaggactgcttttcgcaatccaaagacttcattttactctaaggaggtacctcagatgtgtatcccaggtaaaatcgaggaagtggtgctggaagcacgtacaatcgagagaaataccaaaccctacaggaaagatgagaacagcatcaacggcacaccagatatcaccgttgagataagagaacacatccagcttaacgaatctaagatagtcaagcaagcaggtgtcgcaaccaagggtcctaacgagtacatccaggagatcgagttcgagaatctgtctcctggttcagtaatcatattcagggtctcacttgaccctcatgctcaagtcgccgtaggcatcttgagaaatcatcttacacaattcagcccccacttcaagagcggtagcctggccgttgataacgccgaccctattctgaagataccatttgctagcttggcttctagactgactctggccgaactcaaccagatcctctatcgctgcgaatcagaggaaaaagaagacggcggaggatgctatgatatcccaaattggtctgctctgaagtacgctggcctgcagggactgatgtccgtgctggctgaaatccgtccaaagaacgaccttggacatccattctgtaataacctgagatctggagactggatgattgactacgtcagcaaccgtctgataagtaggagcggcactattgccgaggtgggcaagtggctccaggcaatgtttttctacctgaagcagatcccaagatacctcattccatgctatttcgacgctatcctgataggtgcctacactactctcctcgacactgcatggaagcaaatgtctagttttgttcagaatggctcaacattcgtcaaacacctttctttgggtagtgtccagctttgtggagtgggaaaatttccttccctgccaatcctgagtcctgccttgatggacgtgccctacagattgaacgagattaccaaggaaaaggaacagtgctgcgtgtcactggccgctggcctgccccacttcagtagcggcattttccgttgctggggaagggatacattcatcgccctgcgcggaatactgctgatcacaggcaggtatgtcgaagctaggaacattatactcgcctttgcaggcactctgcgccacggtttgatccctaacctcctgggagagggtatctacgcccgctacaactgcagagacgcagtctggtggtggttgcagtgtatacaagactattgcaagatggtccccaatggattggacattcttaaatgtcctgtctcaaggatgtaccctacagatgattccgctcctcttcctgccggcaccctggatcagcctttgtttgaggtcatccaagaagctatgcagaaacacatgcaaggtatccaattcagagagcgtaatgcaggacctcagatcgaccgtaatatgaaggatgagggattcaacatcacagcaggtgttgacgaagagactggatttgtctacggcggtaacagattcaactgtggtacatggatggataagatgggagagtccgaccgtgctaggaatcgtggtattcccgctaccccaagggacggatccgctgtcgagattgtgggtctttccaaatctgctgtgcgctggcttctggaactgagtaagaagaacattttcccataccatgaggtcactgttaaacgccatggcaaagccatcaaagtctcttacgatgaatggaaccgtaagatacaggacaatttcgaaaaattgttccacgtatctgaagatccaagcgacctcaatgaaaagcaccccaacctcgttcacaagaggggcatctacaaggatagttacggagcctcatctccatggtgcgactatcagctgcgccccaattttaccatcgccatggtggtcgctcctgaactttttacaacagagaaagcctggaaggcacttgaaattgctgagaagaagttgcttggtccacttggtatgaaaaccttggaccccgatgacatggtatactgtggcatctacgacaatgctcttgacaacgacaattataatcttgctaagggcttcaactatcaccaaggtcctgaatggctgtggcctattggatacttcttgagagctaagctgtacttctccagactgatgggtcccgagactactgccaagactatcgtcctggtgaagaacgttcttagtcgccattatgtacatctcgaacgctctccctggaaaggtctgccagagcttacaaacgagaacgctcaatactgcccattcagctgcgagacacaggcatggagcatcgctactatcctcgaaaccctgtacgatctg

SEQ ID NO: 6093 - DNA, 4596 bp, synthetic construct
  misc_feature 1..4596: note = source = /note="Description of Artificial Sequence: Synthetic coding sequence"
  source 1..4596: mol_type = other DNA
atgggacattcaaagcagatacgaatccttctcctgaacgaaatggaaaagctggaaaagactctgttcagactggaacagggctacgaactccagtttcgcctggggcctactctgcaagggaaggcagtgactgtgtatactaactacccttttcctggagaaacttttaaccgcgaaaagtttcggagcctggattgggagaacccaactgagagggaagatgactcggacaaatactgtaaacttaatctgcagcagtcgggaagtttccaatactattttcttcaagggaacgaaaagtctggaggcggatacattgtcgtggatcctattttgcgcgtgggagcggacaaccatgtgttgcctctggattgtgtgaccctgcagacttttcttgcaaaatgtctcggaccctttgacgagtgggaatcccggcttcgggtcgcaaaggagtcgggttataacatgatccacttcactccccttcagacccttggattgtcgcgcagctgttactccctggcaaatcaactcgagctcaatcctgatttttcgaggcctaacagaaagtacacctggaacgatgtgggacaacttgtggaaaagctgaaaaaggaatggaacgtgatttgtatcaccgatgtcgtctataatcacaccgcagccaacagcaagtggattcaggaacatccagaatgtgcgtacaacctcgtgaacagcccacacctgaagcccgcttgggtcttggatcgtgcactctggcgattttcctgcgacgtcgccgagggtaagtacaaggagaagggaattcctgcactcattgaaaacgaccaccatatgaactccattcgaaagatcatatgggaagatatctttcctaagctcaaactgtgggagtttttccaggtggatgtcaataaggcagtcgaacagttccgccgtctgttgactcaagagaatcggcgggtcactaaatcggacccaaaccaacatcttaccattattcaagacccagaataccgccgattcggttgtaccgtcgacatgaacattgcattgactaccttcattccgcatgacaaaggacctgccgcaattgaagaatgttgcaactggtttcataaacgaatggaagaattgaattcagaaaagcaccgacttatcaattatcatcaggaacaagccgtaaactgtctgcttggcaatgtgttctacgagcgcctggcgggccacggtccaaagctgggtcccgtgactcgaaagcaccccctggtgacgagatacttcaccttcccatttgaagagatagactttagcatggaagaatcgatgattcacctgccaaataaggcatgttttctgatggcacataacggatgggtgatgggagatgatcctctgcgtaactttgccgaacctggcagcgaggtgtaccttagaagggagctgatctgttggggagattccgttaagctgcgttacggaaacaaacccgaggactgtccatacctctgggcacatatgaagaaatacactgagatcacggccacctacttccaaggggtgagactggataattgtcattcaacccctctgcatgtcgccgaatacatgctggatgccgcaagaaatcttcagcccaatctttacgtggtggcagagctgtttaccggatcggaggaccttgataacgtttttgtgacgcggctgggtatttcatccctcatccgcgaagcaatgagcgcctacaactcccacgaagaaggtaggctggtctaccggtacggaggggaaccagtgggatcgtttgtgcaaccgtgcctgcgcccacttatgcctgccatcgcacatgctcttttcatggatattactcatgacaatgaatgccccatcgtgcatagatcagcatacgacgctctgccttccaccaccatcgtgtccatggcttgttgcgcttctggatcaacgagagggtacgacgagttggtgccccaccagatttctgtggtgtcggaagaaagattttacaccaagtggaacccagaagcgcttccttcgaataccggtgaggtgaatttccaaagcggaattatcgcggcgagatgtgccatatcgaagctgcaccaagaactgggagcgaaaggcttcatccaagtgtacgtcgatcaagtggatgaggacatcgtggcagtgactagacattcgcctagcatccatcagagcgtggtggcagtgtcgcggaccgcattcagaaacccgaaaactagcttttactcgaaagaagtccctcaaatgtgtattccgggaaagatagaagaggtggtccttgaagctagaactattgaacgaaacaccaagccctacaggaaggatgaaaatagcatcaatggaacccccgatattaccgtggaaattagagaacacatccagcttaacgaaagcaagattgtgaagcaagctggcgtggcaacgaaaggacctaacgagtacatccaagaaatagagtttgaaaacctgtccccgggctccgttatcatttttcgcgtaagtcttgatccccacgcgcaagtcgccgtcggtattcttcgcaatcatctgacccagttttcccctcatttcaaaagcggttcattggccgtggataacgcagaccctattctcaaaattccgtttgcatcccttgcatcacgtctgacccttgcagagctgaaccaaatcctttaccggtgtgaatccgaagagaaggaagatggcggcggttgctacgatatccctaattggtcggctctcaagtacgcaggactgcaaggactgatgtccgtgctggccgagattaggccaaagaacgatctggggcatccattttgtaacaatcttaggtccggagattggatgattgattacgtgtccaacaggttgatcagtagatctggtaccatagccgaagtggggaagtggcttcaggcaatgtttttctatcttaagcagattccacgctacctgatcccctgttactttgatgcgatactgataggtgcatacactaccctgcttgataccgcgtggaagcaaatgtcctcctttgtgcagaatggttctacctttgtgaaacatctttcgttgggtagcgtgcaactgtgcggtgttggcaagtttccctctctgcctatccttagccctgcactgatggacgtgccatacaggcttaatgagattactaaagaaaaggagcaatgttgtgtctcattggccgcaggcctcccacacttttctagcgggatctttcgttgttggggaagggatacgttcattgcactgcgcggaattctgcttataacgggtcggtacgtcgaagctcgcaacattattcttgccttcgcaggcactctcagacatggactgataccaaaccttctgggggagggcatatacgcaagatacaactgccgggacgcagtgtggtggtggcttcagtgtattcaagattactgtaagatggtgccaaacggacttgatatcttgaaatgtcctgtgagcagaatgtaccctaccgacgattcagcgccacttccagcaggaacgctggatcaacctctgtttgaagtgattcaggaagcaatgcagaagcatatgcagggtattcaatttcgggagcgcaacgccggaccgcaaattgatcgaaatatgaaagacgaaggattcaacatcacggcaggagtcgatgaggaaactggatttgtgtacggtggaaacaggtttaactgtggaacctggatggacaagatgggagagtccgatcgggcacgaaatcggggcatcccagctacccctagggacggatccgctgtcgaaatcgtcggtttgagcaagtcagcagtgagatggctgcttgaattgagcaaaaagaacattttcccataccatgaagtgacggtcaagcgccacggtaaggccatcaaggtgagctacgatgagtggaacagaaagattcaagataactttgaaaagctctttcatgtctctgaggatccttccgatctgaacgaaaagcaccctaacctggtgcataagcgcggcatctacaaagattcatacggtgcctcgtccccttggtgtgactaccagcttcggcctaatttcaccattgccatggtggtggcaccagagctttttaccaccgaaaaggcgtggaaggccctcgagattgcggaaaagaagctgcttggtcctctcggaatgaaaaccctggatccagatgacatggtgtactgcgggatctacgataatgctctggataacgataactacaacctggccaaaggtttcaactaccaccaggggcctgagtggctctggccgatagggtactttctgcgggcgaagctctacttttccaggctgatgggtcccgagactacggccaagaccatcgtgcttgtgaagaatgtgctctcccggcattacgtgcaccttgagcggtcgccatggaagggtctgccagaacttaccaacgaaaatgctcaatactgcccattcagctgcgaaacccaagcctggtcaatcgccaccatacttgagactctgtacgacctt

SEQ ID NO: 6094 - DNA, 4596 bp, synthetic construct
  misc_feature 1..4596: note = source = /note="Description of Artificial Sequence: Synthetic coding sequence"
  source 1..4596: mol_type = other DNA
atgggccactccaagcaaattagaatccttctcttgaatgaaatggaaaagctggagaaaacgctgttcaggctcgaacaaggatacgagctgcagtttcgccttggaccaacccttcaaggaaaggcggtcaccgtctacactaactacccttttcctggggaaacctttaacagggaaaagtttagatccttggactgggaaaacccgaccgaacgtgaagatgattcggacaaatactgtaagctcaacctgcaacagtcgggatcctttcaatactacttcctgcagggaaacgagaagtccgggggtggctacatcgtggtggaccccatactgcgcgttggtgcagacaatcacgtcttgcccctggattgtgtcacccttcagacgttccttgcaaagtgtctggggccttttgatgaatgggaatcgaggcttcgggtggctaaggagtcaggttacaatatgattcattttacccccctgcaaactctgggccttagcaggtcctgttacagcctcgcaaatcagctggaactgaacccggatttttcccggccaaatagaaaatacacttggaacgatgtgggtcagctcgtcgaaaagctcaagaaggaatggaacgtgatctgtattactgacgtggtgtacaaccataccgcagctaacagcaaatggatccaagagcatccagaatgtgcatacaacctggttaattcgcctcatctcaagcctgcctgggtcctcgatagagcgctgtggcgattttcgtgcgatgtggcagagggtaaatacaaggagaagggaattccagcactgattgaaaacgaccatcatatgaactcgataagaaaaatcatttgggaggatatcttccctaaattgaagctgtgggagttcttccaggtggatgtgaataaggcggtggaacagttcagacggctgttgactcaggaaaacaggagggtgaccaaatcggatcccaatcagcatctcactattatccaagatcctgagtaccggaggtttggttgtacggtcgacatgaatatcgcacttaccacctttattcctcatgacaagggccctgccgcaatcgaagagtgctgtaattggttccacaaaagaatggaagagctgaattcggaaaaacacagactgatcaactaccatcaagagcaggcagtgaattgccttctgggaaacgtgttttatgagcgcctggcaggacatggccctaagctcggtcctgtcactcgaaagcaccctcttgtgaccagatacttcacttttccgtttgaagaaatcgatttttcgatggaggagtcaatgattcatctgccaaacaaggcctgttttctgatggcacataatggctgggtgatgggagatgatcctctgagaaatttcgccgaacctggatccgaagtctaccttcgcagagaactgatctgctggggtgacagcgtcaagctgaggtacggtaacaagcctgaagattgcccatacctttgggctcacatgaagaagtacactgagatcactgcaacgtatttccaaggagtgcggctcgataattgtcatagcactccactccacgtggcagagtacatgctggatgcagcacgaaacctgcaaccaaatctgtacgtcgtggcagagctcttcactggttcagaggatctggataacgtgttcgtgacgaggcttggtatctcctcactgattagagaggctatgtcagcatacaactcacacgaagaaggaaggcttgtgtacagatacgggggagagcctgtgggatcctttgtccagccttgcctgcgacccttgatgcctgcaattgcgcatgcgctgtttatggatatcactcatgataacgaatgccctatcgtgcaccgatccgcctacgatgcactcccttcgactaccattgtgtcaatggcctgttgtgcatctgggtccaccagggggtatgatgagcttgtcccacatcaaattagcgtcgtgtcagaagagcggttttacacgaaatggaatccggaagcacttccgtcaaacaccggagaagtgaactttcaatcgggtattatcgcggcacgatgtgccatttccaaacttcatcaagaactgggcgcgaaaggctttattcaggtttatgtggaccaggttgatgaagatattgtcgcagtcactcgccattcaccatcgatccatcaaagcgtggtcgcggtttcaaggacggcatttcgaaaccctaaaacctcattctactccaaagaggttccccagatgtgcatccccggaaagattgaggaggtggtgcttgaagcaaggaccattgagagaaacaccaagccttacagaaaggacgaaaactcgatcaatggtaccccggatatcacggtggagatccgagaacacatccagttgaatgaatccaagattgtgaagcaggcaggggtggctaccaagggaccaaacgagtatattcaggaaatcgaatttgaaaacctttctccgggttcggtgatcatattccgcgtttccttggatccacacgcccaagtcgccgttggaattctgcggaatcatctgacccaattttccccgcacttcaagtcaggatcccttgcagtggataacgccgatcctattttgaagattccgttcgcatcgctggcaagccggctgactctcgccgaattgaatcagatcctttacaggtgtgagagcgaggaaaaagaggatggcggaggttgctacgatattcctaattggtcagcacttaagtacgctggacttcagggtttgatgtcagtgctggcggaaatccgccctaaaaacgaccttggacacccattttgcaacaatttgagaagcggtgattggatgatcgattacgtgtcaaaccggctcatttccagatccgggactattgccgaggtggggaagtggctgcaagctatgtttttctacctcaagcaaataccaaggtacctgatcccctgttactttgatgccattttgatcggggcgtacaccactcttcttgataccgcgtggaagcaaatgagctcgttcgtgcaaaacggctccacctttgtcaagcacctgtcccttgggtctgtgcaactgtgtggagtgggaaagttcccaagccttccaattttgtcccctgctctcatggatgtcccctacaggctgaacgaaattactaaggaaaaggaacagtgttgtgtgtcactggcagcaggactccctcatttttcgagcggaatcttcagatgttggggtcgggacacctttattgcactccgtggcatcctgctgatcaccggacggtacgtggaagcaagaaacatcattcttgcatttgccggaaccctccgacacggactcattcctaatcttcttggtgagggaatctacgcccgttacaactgtcgcgatgcagtgtggtggtggctgcagtgcattcaagactactgcaaaatggtccctaacggtctggatattctgaagtgtcccgtgtcgcgtatgtaccctactgatgacagcgcccctttgcctgccggcactctggatcaacccctgtttgaagtcatacaggaagcaatgcaaaagcacatgcaaggaattcagttccgagaacgcaacgcaggcccacaaatcgaccggaacatgaaggacgaaggctttaacattactgccggggtggacgaagaaaccggctttgtgtacggaggcaatagattcaactgcggaacgtggatggataagatgggagaaagcgatcgggccagaaatcggggtattccagcaacccctcgtgacgggtctgcagtggaaatagtgggcctgtccaaatcggcagtgcgctggttgctcgagctgtcgaaaaagaacatttttccgtaccacgaagtgaccgttaagaggcacggtaaggccattaaagtctcgtacgacgagtggaaccgcaaaattcaggacaactttgagaagctgtttcacgtgtccgaggacccgtccgatctgaacgagaagcatcctaatttggtccataaaaggggcatttacaaagactcctacggcgcctccagcccatggtgtgactaccagcttagacctaactttactatagcaatggtagtggcaccagaattgtttactactgaaaaggcatggaaggcactggaaattgcagagaaaaagctcctcgggccgcttggaatgaaaacgctggaccctgatgacatggtgtattgtggtatttacgataacgcgctggataatgacaattacaaccttgcaaagggctttaactaccaccagggaccggagtggctttggccgattggttatttccttcgagccaagttgtactttagccgccttatggggcctgaaaccactgcaaagaccatcgtgctggtgaaaaatgtgctgtcgcgacattacgttcaccttgaacggtccccttggaagggacttcctgaactgacgaacgaaaatgcccagtactgtccattctcgtgtgaaacccaagcatggagcattgcaactattctggagactctctacgacttg

SEQ ID NO: 6095 - DNA, 4596 bp, synthetic construct
  misc_feature 1..4596: note = source = /note="Description of Artificial Sequence: Synthetic coding sequence"
  source 1..4596: mol_type = other DNA
atggggcatagcaaacagatccgtatattgcttcttaatgaaatggagaagctggaaaaaaccctgtttagactcgaacagggatatgaacttcagtttcgtctgggtccaaccctgcaagggaaggccgtgaccgtctacaccaactacccatttcccggtgagacttttaacagagagaaattcaggtcattggattgggagaacccaaccgagagggaagatgacagcgacaagtactgcaaacttaaccttcaacaatccggatcgttccaatactattttctgcaaggtaacgaaaagtccggaggggggtatattgtggtcgatccaatactgcgggtgggtgccgataaccatgtgcttcccctggactgcgttactcttcaaacctttcttgcaaaatgccttggacctttcgatgagtgggaatcccgacttagagtggcaaaggagagcggatacaatatgatacatttcacccctctccagacgctgggcctcagcaggtcatgttactcacttgcaaatcaactcgagcttaaccccgattttagccgtcctaatcgcaagtacacgtggaatgatgtgggccaactcgtggagaagctcaagaaggagtggaacgtgatctgtattaccgacgtggtttacaaccacaccgccgctaactcaaaatggatacaagagcaccccgagtgtgcatacaaccttgtgaacagcccccaccttaagccggcatgggtgctcgatcgcgcactttggaggttcagctgtgatgtcgcggaaggaaagtataaagaaaaaggaattccagcactgatcgagaatgaccatcacatgaacagcattcggaagatcatatgggaggacatttttcccaagctgaaactctgggaattcttccaagtggacgtcaataaggcagtcgagcaattcaggagactgctcactcaggagaacaggcgagtgactaagtctgacccaaatcaacacctgactatcattcaggatccagagtaccgccgtttcgggtgcactgtggatatgaacattgcccttactacctttataccccacgacaaggggcccgcagcaatcgaagagtgctgtaattggtttcataagaggatggaagagctgaacagcgagaaacaccgcctgataaactaccatcaggaacaagctgtgaactgcctgctcggaaacgtgttttacgaaagactggcagggcatggaccaaagctgggtcctgtcaccaggaaacatcctcttgtgactagatacttcacctttccgtttgaggagattgacttttcaatggaagagagcatgattcatctccccaacaaagcgtgttttcttatggcacacaatggatgggtgatgggtgatgatcccctgcgtaacttcgcagaaccaggcagcgaagtgtatctgcgcagggaactgatctgctggggggactcggtcaagctgcgctatgggaacaagccagaagattgtccatacctctgggcccatatgaagaagtacaccgagataactgccacttacttccagggagttaggctggataactgccattccaccccacttcatgtggcggaatacatgcttgatgccgcaagaaatctgcaacccaatttgtacgtcgttgccgaactgtttacgggttccgaagatcttgataacgtgttcgtgacgagacttggtatctcatcactgattagagaagcgatgtcggcatataactcgcatgaagaaggaaggcttgtctacaggtacggaggagagcccgtgggttccttcgtgcagccatgcctgcgtcccttgatgccggcaatagcacacgcacttttcatggacatcactcacgacaacgaatgtcctatagtgcaccgctcggcctacgacgcactcccaagcactaccatcgtgtcaatggcatgctgcgcttccggttcaactagggggtacgatgaactggttccacaccaaatctccgtggtttccgaggaaagattctatacgaagtggaaccctgaggcactgccctcaaacaccggcgaagtgaactttcagagcggaatcatcgcggcccgatgtgcaattagcaagctgcaccaggaactcggagctaagggattcattcaagtgtacgtggatcaggtggacgaagatattgtggcggtgactcgtcattcaccaagcatacatcagagcgtcgtggccgtctcgagaaccgcatttcgtaatcccaagacgagcttttacagcaaggaggtgccccagatgtgcatcccaggaaaaatcgaagaagttgtgcttgaagccagaaccatcgaaaggaacactaagccttaccggaaagacgagaattcgattaacggtactccggatatcactgtcgaaataagagaacatattcagctcaacgaatccaaaatcgtgaagcaagcaggtgtggcaactaaaggcccaaacgagtacattcaagaaattgagttcgaaaacctcagccctggctcagtcattatctttagagtctccctcgacccgcatgctcaggtggccgtgggcattctgcgcaaccatctgacccaattttcacctcactttaagtccggatcgctggcagtggataatgcagaccctattcttaagatacccttcgcatcactcgcatcgcgactgactttggcagagcttaaccaaattctgtaccggtgtgaatccgaagaaaaggaggacggtggagggtgttacgacattcctaactggtcggcgctgaaatacgcaggcctccagggactgatgagcgtgttggccgaaattcggcctaaaaacgatcttggccatccattctgcaacaacctgcggtcaggggactggatgattgattacgtgtccaatagactgatttctaggtctggcaccattgcagaagtcggcaaatggctgcaagccatgtttttctacctgaagcagattcctagatacctcatcccatgttacttcgatgcgattctgattggagcgtataccactctgttggatacggcatggaagcagatgtcctcgtttgtgcaaaacggctccacctttgtgaagcatctgtccttgggcagcgtgcagctttgtggagtgggcaaatttccatcacttccaattctttcgcctgcattgatggatgtcccctataggctgaacgaaatcaccaaggaaaaggaacaatgttgtgtgagcctcgcagccggactcccgcatttttcatcaggcattttccgctgttggggccgtgacacctttattgcacttagaggaattctgttgattaccgggaggtacgtggaagcgagaaacatcatcctggcttttgcaggaaccctgagacatggacttattcctaaccttcttggtgaaggaatttacgcccgctataactgtagggacgcagtctggtggtggcttcaatgcatccaagattactgtaaaatggtgccaaacggtttggatattctgaaatgtcccgtgtcgaggatgtatcctacggacgactctgcccctcttcccgctggaaccctcgatcagccactttttgaagtgatacaagaagccatgcagaagcatatgcagggaattcagttcagagaaagaaatgctggccctcagattgatcgaaatatgaaagatgaaggctttaacatcaccgccggagtcgatgaagaaactggttttgtgtacggaggtaaccgcttcaactgcggcacctggatggataagatgggcgaatcggatcgggcaagaaaccggggtatccctgcaactcctcgcgatggttccgcagtggaaattgtgggattgagtaagtccgccgtgcggtggctgcttgaacttagcaaaaagaatatctttccttaccacgaagtcaccgtgaagcgacatggaaaggcaatcaaggtgtcatacgatgagtggaatcggaagatccaagataacttcgaaaaactgtttcatgtctccgaagatccgtcggatctgaatgaaaagcatcctaaccttgtccacaagagggggatttacaaggattcctacggagcatcttcaccttggtgcgattaccagcttagacctaactttactatcgccatggtcgtcgcacctgaacttttcactaccgaaaaggcatggaaggcgctcgaaattgcagagaagaagctgctcggccccctcggaatgaaaactcttgatccagatgatatggtgtactgtggaatttacgacaacgccctcgacaacgataactataaccttgcaaagggatttaactaccaccaagggcccgagtggctctggcccattggttacttccttcgggcaaagttgtacttttcccgcctgatgggacctgaaaccaccgcaaagactatcgtgctggtaaagaacgtgctttccaggcattacgtacatcttgaacgatcaccctggaaaggcctccctgaacttaccaatgagaatgcccagtactgtcccttttcatgcgagactcaagcatggtcgattgcgaccatactggagactctctacgacctg

SEQ ID NO: 6096 - DNA, 4596 bp, synthetic construct
  misc_feature 1..4596: note = source = /note="Description of Artificial Sequence: Synthetic coding sequence"
  source 1..4596: mol_type = other DNA
atggggcatagcaaacagattaggatacttctgctcaatgagatggagaagctcgagaagactctgtttcgattggaacagggctacgagttgcagttcagattgggcccaactctgcagggaaaagctgtgacagtgtacacaaactaccccttccccggcgaaacattcaatcgggaaaaatttcggtccctggactgggaaaacccgaccgagagagaagatgacagcgacaaatattgcaaacttaacctgcagcaaagcgggagcttccagtattatttcctgcagggcaatgagaagagcggcggcggatatattgttgtggatcccatccttcgcgtcggcgccgacaaccacgttcttcccttggattgtgtgactcttcaaaccttcctcgccaagtgtctcggacctttcgatgagtgggagtcccgactccgcgtggccaaggagagcgggtataatatgatccactttacccctctccagaccctgggcctgtcacggtcctgttacagcctcgccaaccagctggagctcaaccccgacttcagcagacctaatagaaagtatacttggaatgacgttggacagttggtcgagaagctgaagaaagaatggaacgttatatgtattaccgatgttgtctataaccacacggcggccaactcaaaatggatccaggagcacccggagtgcgcctacaacctcgtcaatagcccacatctgaaaccagcctgggtattggacagagctctgtggcgcttcagctgcgacgtcgccgagggcaagtacaaagagaaaggtattcccgccctgattgagaatgaccaccacatgaacagtattagaaagattatatgggaggatatttttccaaagctgaagctgtgggagttttttcaggtggatgtgaacaaggcagtggaacagttcagaaggctgctcacacaggaaaataggcgggttaccaaaagtgacccgaatcagcatttgaccattatacaggacccagaatacaggcgattcggatgcactgtcgatatgaacattgcacttactacatttataccccacgataagggcccagctgccattgaggagtgctgtaattggttccataaaagaatggaggaactgaacagtgaaaaacaccgactgatcaactaccatcaggaacaagccgtaaattgtctgcttggcaatgttttttacgagagactggctggacacggaccgaagctgggtcctgtgacgagaaagcatccactggtcacgaggtacttcaccttccccttcgaggagatcgacttctccatggaggaatcaatgattcacctgcctaataaggcttgtttcctgatggctcataatggatgggttatgggcgacgatccactgcgcaactttgcagagccaggttctgaggtgtacctgagacgggaactcatctgctggggagattctgtaaaacttaggtatggaaataagcccgaggactgcccgtacctgtgggcccacatgaaaaaatacactgaaataaccgccacctatttccagggggttaggctggataattgccacagcacgccgctccacgtggctgaatatatgctggatgccgcccggaacctgcagcccaacctgtacgtagtcgctgagctcttcactggctctgaggatctcgataatgtgtttgtcacgaggcttggaataagctctcttatccgggaggctatgtcagcttacaacagtcatgaagagggtcgcctggtgtataggtacggtggtgaaccagtgggtagttttgttcagccttgcttgaggccccttatgcctgcaatcgcacacgcactcttcatggacattactcatgataatgaatgcccaatcgtgcacaggagcgcatacgatgccctcccatccaccaccatcgtgtccatggcgtgctgcgcctctggctctacccgcgggtacgatgagctggtcccccaccagatctccgtggtttcagaggagaggttttacaccaaatggaatccagaagctttgccgtctaacacaggggaggtgaactttcaatccgggattatcgctgcacggtgtgctatcagtaagctgcaccaggagttgggagccaagggcttcatccaggtgtatgttgaccaagtggatgaggatattgtggctgtcacgcggcattcaccctccattcatcagtccgtggtggccgtgtctcggacagcctttagaaatccaaaaacaagtttttactccaaagaagtccctcagatgtgtattcccgggaagatcgaggaggtagtgctggaggcacggactatagaaaggaacaccaagccctataggaaagacgaaaatagtattaatggaacgccagatatcactgtggagatccgagagcacattcagctgaatgaatccaagatcgtgaagcaggctggagtggcaactaaaggacccaacgagtatattcaggaaattgaattcgaaaatctgtcaccaggaagtgtgattatcttccgcgtatccctcgatccccacgcacaagtggccgtgggcatcctcagaaaccacttgacgcaattttcaccccactttaagtccggttcattggctgtagacaatgcagatccgatccttaagatcccttttgccagcctcgcaagtaggctgaccctggctgagcttaatcaaatcctgtataggtgtgagagcgaagagaaggaagatggcggaggttgctatgatatccctaattggagcgccctgaaatacgccgggctccagggtctcatgtccgttctcgcggagatcaggcccaaaaacgatctgggacaccctttttgcaacaacctgcgatccggagactggatgatcgactacgtttctaatcggctgataagccggagtgggaccattgcagaggttgggaagtggctccaggccatgttcttttacctgaaacagattccgagatacctgatcccctgctactttgatgccattctgataggcgcgtacacaactctcctcgacacagcgtggaagcaaatgtcatcttttgtgcagaacggtagtaccttcgtgaaacacctctcattgggcagcgttcaactgtgtggggtgggtaagttcccctctttgcccattctgtcaccagccctcatggacgtgccatatcgactgaatgaaataaccaaagagaaagaacagtgttgcgtttctctggcggctggactgccccacttcagctctgggatcttccgctgctgggggcgggacacgttcattgccctgaggggaatcttgctcatcacaggcagatacgtcgaagcacgcaacatcatcctggcttttgcagggaccttgaggcatgggctgattccaaatcttttgggcgaggggatttatgccagatacaactgtagagacgcagtgtggtggtggcttcagtgtatccaggactattgtaagatggtaccaaatggtttggacatcctgaagtgccctgtgagccgaatgtacccaacagacgactctgcccccctgcctgcaggaaccctggatcagcctctgtttgaagtcattcaagaggctatgcagaaacacatgcagggtatacagttccgagaaaggaacgcgggccctcagattgaccggaatatgaaagatgaagggtttaacattaccgcaggagtcgatgaagagaccggctttgtttacggaggaaatcggtttaactgtggaacttggatggacaagatgggggaatccgatagggctcgcaatagaggaatccctgccacccctcgggacgggtctgctgtggagatcgttggccttagtaaatccgccgtcagatggctccttgagctgagcaagaagaacatttttccataccacgaggtgacagtgaaaagacatgggaaggctattaaggtgagttacgatgaatggaaccgaaagattcaggacaacttcgaaaagctgtttcatgtcagtgaagatccgtccgacttgaacgagaagcacccaaatctggtgcataagaggggtatatataaagacagttatggggcgtcttctccgtggtgcgactaccagttgcgacctaatttcactattgccatggtcgtggcaccggaactgtttacaactgaaaaggcgtggaaggcgctggagatcgccgagaagaagctcctggggccactgggcatgaaaacattggacccagatgatatggtgtactgcggaatctacgacaatgcacttgataacgacaattacaaccttgcaaaagggttcaattaccaccaggggccagagtggctgtggcctatcggttacttcctcagagcaaagctctactttagtaggttgatgggccccgaaacaaccgccaaaacaattgtcctggtgaaaaacgtgctttcaaggcactatgtccatctggagaggagcccttggaagggacttcccgagctcactaacgagaatgctcagtattgtccattcagctgcgaaactcaggcctggtctatagcaacgatcctcgagacattgtacgacctg

SEQ ID NO: 6097 - DNA, 4596 bp, synthetic construct
  misc_feature 1..4596: note = source = /note="Description of Artificial Sequence: Synthetic coding sequence"
  source 1..4596: mol_type = other DNA
atgggtcattccaagcaaatccgcattctgctgcttaatgagatggagaagcttgaaaaaacactgttccggttggaacaaggatacgagctacagttccggctgggtcctacactgcaaggcaaagctgtcacggtgtataccaattaccccttccctggcgaaacttttaaccgggaaaagtttagaagtctggattgggaaaaccccaccgaaagagaagatgactctgacaaatactgtaaactgaacctgcaacagtccggttcatttcagtattatttccttcaggggaacgaaaagtccggcgggggttacatagtagtggaccctattctgcgggtcggcgctgacaatcacgtcttgcctctggattgtgttaccctgcagacattcttggcaaagtgtctcgggccattcgacgagtgggagtcgagactgcgggtagcgaaagagagtggctataatatgatccatttcacccctctgcaaaccttgggtttatcaaggtcctgttactctttggccaaccagttggaattgaatcccgacttttcccgtccaaacaggaagtacacgtggaacgatgtaggccagctggtggagaagctgaaaaaggagtggaatgtaatttgcatcacagacgtggtgtataaccataccgcagcaaattctaaatggatacaagagcacccagagtgcgcatataacctggtaaactctccacacctgaagcctgcctgggtactcgaccgcgccttgtggaggttttcctgtgacgtggcagaaggtaaatacaaggagaagggcatccccgccctcatagaaaacgatcatcacatgaatagcatccgcaaaatcatctgggaagatatcttccccaaacttaagttgtgggaatttttccaggttgatgtgaacaaagctgtggaacagttccgcaggttgttaacccaggaaaaccggcgggtgacaaaaagcgatcctaatcagcacctaacgatcatacaggatccggagtataggcgcttcggttgtacagtggacatgaatatagctctgacgacgttcataccacacgacaaaggccctgcagctattgaggaatgttgcaattggttccataagcgcatggaggagttaaactcagaaaaacaccggctgatcaattaccaccaagaacaggcggtgaactgcctcctggggaacgtgttttatgaacgactggccggccatgggcccaaactgggtccagtaacacggaaacatcccttggtgacgcgctactttaccttccctttcgaggagattgattttagcatggaagagtcaatgatccacctaccgaataaggcctgcttcctcatggctcacaatggctgggtaatgggcgacgacccccttcggaacttcgcggagccagggagtgaggtatatttgagacgcgagctcatttgttggggcgattcagtcaagttgcgctacggcaataagcccgaggactgtccatacctgtgggcacacatgaaaaagtatactgaaatcacagccacttattttcagggggtccgcctggataattgtcactctacgcctctgcacgtggctgagtacatgctggacgccgctcgaaacctgcagcctaacctgtatgtcgtggccgagttgtttaccggctctgaagacctcgataacgtgttcgttacgaggttaggaatctcttcactcatcagggaggccatgagtgcctacaattcccacgaggaaggccggctcgtttataggtatggcggagagcctgtgggcagttttgtccagccctgcctgcgaccactgatgcccgccatagctcatgctctgttcatggacatcacacacgataatgaatgcccaatcgttcaccgctccgcttatgatgccttgccctcgactaccatcgtgtctatggcatgctgcgctagcgggtctactcggggttatgatgagttagtgccccatcagatctctgtcgtctccgaagaacggttttatacgaagtggaaccctgaagccctgccatctaataccggcgaagttaatttccagtcaggaattattgcggcccggtgcgcgattagtaagctgcaccaagaacttggagctaaagggttcatacaggtttacgtggatcaggtggacgaggatatcgtggcagtcacccggcacagtccttcaattcaccagagtgttgttgctgtgagccgcaccgcctttcgaaatccgaaaacaagcttttacagcaaggaagtcccgcagatgtgtattccgggcaagatcgaagaggtggtcctggaagccagaacaatagagcggaatactaaaccttatcgtaaagatgagaattctattaacggcaccccggacatcaccgttgagattcgcgaacatattcagcttaatgagagcaaaattgtgaagcaggccggagtggctacaaagggccctaacgagtacattcaagaaattgagttcgagaatctgagtcccgggagcgtgatcatattccgggtgagcctggatccacacgcacaggtggcagtcggcatattgagaaaccatctgactcagttttctccccacttcaagagcgggtcccttgcggtcgataatgccgacccgatcctgaaaataccgttcgctagcctcgcttccagactcactctggccgaactgaatcagattctttaccggtgcgaatccgaggagaaggaggacggcggtgggtgctacgatattcccaattggagcgcactgaagtacgccggactgcaggggctgatgagcgtgctcgccgagattagaccaaagaatgacctcgggcatcctttctgtaacaacctgcggtcaggagactggatgattgactacgtgtccaatcgcctgatttcaaggtccgggacaatagccgaggttgggaaatggcttcaggccatgttcttttatctgaaacagatccctagatatctaatcccatgttactttgatgccatcctgatcggagcctacactactctcctagataccgcatggaagcagatgagcagctttgtgcagaatggatcgaccttcgtgaagcacctgtcactgggctctgtccagctatgtggtgtcgggaagttccctagcttacctatactgtctcctgcgctcatggacgtaccttaccgactgaatgagatcactaaagaaaaggaacagtgttgcgttagtctggcggccggtctgcctcatttttccagtgggatcttccggtgttggggccgggacaccttcattgccctgcggggcattttacttatcacgggccgatacgtggaggcccgaaatatcatccttgccttcgctggtacactgcgccacggcctaatacctaatttgctgggcgaaggaatctacgctcggtacaactgtagagacgcagtctggtggtggcttcaatgcatacaggactactgtaagatggtacccaatggactcgacatcctgaagtgccctgttagccggatgtatccaactgatgattccgcgccccttcccgccgggaccctggatcagccactgttcgaagttatccaggaagccatgcagaaacacatgcagggcatacaattccgtgaacggaatgccggaccccagatagacagaaacatgaaagacgagggatttaatatcacggcaggggtcgacgaggagaccggctttgtgtacggcggcaaccggttcaattgcggtacctggatggacaagatgggcgagtcggatagggcaaggaatcgcgggattccggccaccccgcgagatggctctgccgtggagatcgtgggcctgtccaaatctgcggttaggtggcttctcgagttgtccaaaaaaaatatttttccatatcacgaagttaccgtgaaacgccacggaaaggctattaaggtgtcctatgatgagtggaatagaaagatccaggacaacttcgagaagctattccacgtctctgaggacccaagcgaccttaacgagaaacatccaaaccttgtgcataagcgcggcatctacaaagatagttatggagcatctagtccttggtgtgattatcagttgcggcccaatttcacaattgctatggtcgtcgcacccgagctcttcacgaccgaaaaagcttggaaggcgcttgaaatagcggaaaagaaactgctgggcccgctggggatgaaaacattagaccctgatgatatggtgtattgtggaatttatgataacgcgctggacaatgacaactataacctggctaaaggattcaattaccatcagggcccggaatggctctggcctattggctacttcctgagagccaaactctatttctcccggcttatggggccagaaaccaccgccaagaccatcgtcctcgtgaaaaatgtcctgtcaaggcattatgtgcatttagaacgtagcccctggaaggggttaccagagttgaccaacgagaatgctcagtactgtccattttcatgtgagactcaggcctggagcattgctaccatcctggaaacactgtatgaccta

SEQ ID NO: 6098 - DNA, 4596 bp, synthetic construct; identical to SEQ ID NO: 6097
  misc_feature 1..4596: note = source = /note="Description of Artificial Sequence: Synthetic coding sequence"
  source 1..4596: mol_type = other DNA

SEQ ID NO: 6099 - DNA, 4596 bp, synthetic construct
  misc_feature 1..4596: note = source = /note="Description of Artificial Sequence: Synthetic coding sequence"
  source 1..4596: mol_type = other DNA
atgggacactcgaaacagatcagaattcttctgctcaacgaaatggagaagctggaaaagactctgttcagactcgaacaaggctacgaattgcaatttcgcctggggccaacgttgcaaggaaaagccgtgactgtgtacactaactacccatttcccggggagactttcaaccgcgaaaagttccgctcactggactgggagaacccaaccgaaagggaggacgacagcgacaagtactgcaagttgaacctccagcagtcgggatccttccaatactactttctgcaaggcaacgaaaaaagcggtggcggatacatcgtggtcgacccaatcctcagagtcggagcggacaatcacgtcctcccgttggattgcgtgactctgcagaccttcctggccaaatgccttggcccgttcgatgagtgggagtcgcggctcagggtcgcgaaggagtcaggatacaatatgatccacttcactcctttgcaaactctgggactgtcgcgctcctgctactccctggctaaccagctggaactgaatccggacttctcccgtccgaatcgcaagtatacctggaatgacgtgggtcagctggtcgaaaagctgaagaaggaatggaacgtgatctgcatcactgatgtggtgtacaatcacaccgccgcaaactcaaagtggatccaggaacacccggagtgtgcttacaacctggtgaactccccacacctgaaaccggcatgggtgcttgaccgtgcactgtggcgcttttcgtgcgacgtggccgaaggcaagtataaggagaaggggatcccagccctgatcgaaaacgatcatcatatgaattccattcggaagatcatctgggaggacatcttccccaagctgaagctctgggagtttttccaagtggacgtgaacaaagccgtggagcagttccgacggcttctgactcaagaaaacagaagggtgactaagtccgaccccaatcagcacctcacgatcatccaggacccggagtaccgcaggttcggctgtaccgtggatatgaacatcgccctgaccaccttcatcccccacgataagggacccgccgcaatcgaagaatgctgcaactggtttcataagcgcatggaggagctcaacagcgagaagcaccgcctgatcaactaccatcaggaacaggccgtgaattgcctgctgggaaacgttttctacgagcgcctggccggacacggacccaagctcggtcctgtcactcggaaacacccgcttgtcacccgctacttcacctttccgtttgaggagatcgatttttcaatggaagaatccatgatccatctccctaataaggcttgcttcctcatggcacacaatggatgggtgatgggagacgatccactgcggaactttgcggagccaggttcggaggtgtacctgcggcgggaacttatctgttggggtgactcagtcaagctgcgatacggtaacaagccggaggactgcccgtatctctgggcacatatgaagaagtacaccgagatcactgcgacctatttccaaggcgtgcgcctcgataactgccacagcactcccctccatgtggcggagtacatgctggacgctgctcgcaatctgcagccaaatctgtacgtggtggcagaactttttacgggaagcgaagatctggacaacgtgttcgtcaccagactgggcatctcctccttgatccgcgaggccatgtccgcctacaactcgcatgaggaagggagactggtgtacagatacggtggagaaccggtcgggagcttcgtgcagccgtgcttgaggccgttgatgccggccatcgcccacgctctcttcatggacatcactcatgacaacgagtgccccatcgtccaccgctcggcatacgatgccctgccgtcgaccaccatagtctcaatggcctgttgcgcttcaggatccactcgggggtacgacgaacttgtgccgcaccagatctcagtggtgtccgaagaaagattctacacgaagtggaaccctgaagcacttccgtcaaacactggcgaagtgaacttccaaagcggcatcatcgccgctagatgcgcgatcagcaaactccatcaagaactcggagccaagggcttcatacaggtttacgtcgaccaggtcgacgaggacattgtggccgtcactcgccattccccaagcatccaccaaagcgtggtcgcggtgagccggaccgcgttccggaatcctaaaacttcgttttactctaaagaagtgccacagatgtgcatcccgggtaagattgaagaggtggtgctggaggcgagaaccatcgaacgaaacaccaagccctaccgcaaggatgagaattcgatcaatgggacgccagatatcacggtggaaatccgggagcacatccagcttaacgaatcgaagatcgtcaagcaagcaggagtggccaccaagggacctaacgaatacattcaggagattgagttcgagaacctgtcaccggggtcggtgatcatctttcgggtgtcgcttgacccccatgcgcaggttgcagtgggaatactgcggaatcacctcactcagttctctccacatttcaaatcgggctcactcgctgttgataacgcagacccgatactgaaaatcccgttcgcttcactggcctctcgcctcactttggccgaactgaaccagatcctttacagatgcgagtccgaagagaaggaagatggcggagggtgctacgatatcccgaattggagcgctttgaagtacgctgggctgcaggggctgatgtcggtgctcgcagaaatcagacctaagaatgatctgggacatcctttctgcaataacctgcgctccggcgattggatgatcgactacgtgtcgaatcgcctcatctcgaggtccggcaccattgcggaagtcggcaagtggctccaagccatgttcttctatctgaagcaaataccacggtacctcatcccatgttacttcgacgcaatactcatcggagcgtacaccactcttctggacaccgcttggaaacaaatgtcctcctttgtgcagaatggatcaactttcgtgaaacatctgtccctcggaagcgtgcagttgtgcggagttggaaagttcccctcccttccgatcctctccccggctctgatggacgtcccgtaccgcctgaacgagattacgaaagagaaggagcagtgttgtgtgagcctggcggccggactcccgcatttttcgtcagggatttttcggtgctggggacgggacacgtttatcgcactgaggggtatcctccttatcaccggacgctacgtcgaagcgaggaacattattctcgccttcgcgggcacgctccggcacggtttgatccctaacctgctcggcgaagggatttacgccagatacaattgcagagatgcagtgtggtggtggctccagtgtatccaggactactgtaagatggtgccaaatgggctcgatatcctgaagtgcccggtgagcaggatgtatccaaccgatgactcggccccgttgccggcaggcacgcttgatcaaccgctgttcgaagtgattcaggaagcgatgcagaagcatatgcaaggaatccagttccgcgagcgaaatgcgggtccccagatagatcggaatatgaaggacgaaggatttaacatcactgcgggagtggacgaagaaaccggcttcgtgtacggaggcaaccggttcaactgcggcacgtggatggacaagatgggggaatccgaccgggccaggaatagaggtatcccagcaaccccaagagatggatcggctgtcgaaatcgttggactctcaaagtcagcggtcagatggctgctggaactgagcaagaaaaacatcttcccataccacgaggtcaccgttaaacgacatgggaaagccatcaaggtcagctacgacgagtggaaccggaaaatccaagacaacttcgagaaattgttccacgtgtccgaagatccgtctgatctgaacgagaaacaccctaaccttgtgcataaaagaggaatttacaaggactcctacggagcatcttcaccctggtgtgactaccaactgcgcccgaacttcactatcgctatggtggtggccccggagctgtttactactgaaaaagcgtggaaagcgctggagattgcagaaaagaagctcctcggcccactggggatgaaaaccctcgatcctgacgatatggtgtactgcggcatctacgacaacgccctggataacgataactacaacctggccaagggattcaattatcaccaggggccagaatggctgtggcccatcggatatttccttcgggccaaactgtacttcagccgcctgatgggcccggagactaccgcaaagaccattgtcctggtgaagaatgtgctgtcacggcactatgtccacctcgaacggtccccgtggaaggggcttcctgaattgaccaatgagaacgcccagtactgtcccttctcgtgcgagacgcaggcctggagcattgcgactatcctcgaaaccctttacgacctg

SEQ ID NO: 6100 - DNA, 4596 bp, synthetic construct
  misc_feature 1..4596: note = source = /note="Description of Artificial Sequence: Synthetic coding sequence"
  source 1..4596: mol_type = other DNA
atgggccatagtaagcaaatcagaattcttctgcttaatgagatggagaaactggaaaagacacttttcagactggagcaggggtatgaactgcagttccgtctgggtcctacgttgcaggggaaagcagtcacagtatacaccaactacccgttcccaggtgaaactttcaaccgcgaaaaatttcgatcactcgattgggagaaccccacagagcgtgaggacgactccgataagtattgtaagctgaatcttcaacagtctggctctttccagtattacttcctacaaggaaatgaaaagtccgggggcggctacattgttgtggaccctattcttcgggtaggtgcagataatcacgtcctgcctctggattgtgtgacgttgcagacgttcctagcaaaatgcctaggacctttcgacgagtgggagtcaaggctcagagtggcaaaggagtctgggtacaacatgatccacttcacaccacttcagacactcgggctcagtcgtagctgttactcgctggcaaaccaacttgaactgaaccccgacttctcccgcccgaatcgaaagtacacgtggaatgatgtgggtcagctggtggaaaaactgaagaaggaatggaatgttatctgtatcaccgatgtcgtctataatcacacggcggcgaattcgaaatggatacaagagcatcctgagtgcgcctacaacctcgtcaactccccccacctgaagccagcatgggtgcttgaccgcgcattgtggagattctcatgcgacgtggcagagggaaagtacaaggaaaaagggatcccagcccttattgaaaacgatcaccacatgaattccatcagaaagattatctgggaagatatctttcccaaattaaagctgtgggaattctttcaggtcgacgtcaacaaagcagttgagcagttccgccgccttcttacccaagaaaaccgacgcgtcacaaagtctgatcccaaccagcatttaacaatcattcaggaccccgagtatcggcgttttggatgcacagtcgacatgaatatcgcacttacaaccttcattcctcacgataaaggtcctgccgccatcgaggaatgctgcaactggttccacaagcgaatggaggagttgaatagtgaaaagcatcgcttgataaattaccaccaggagcaggcagtcaactgccttttgggcaatgtgttttacgagcgtctcgcaggccatgggccgaaactaggaccagtgactaggaaacatcctctagtgacccggtacttcacgtttccattcgaagaaattgacttcagcatggaggagagcatgatccacctccctaataaagcatgttttctcatggctcacaatgggtgggtaatgggagatgatccgttgcgtaactttgccgagccgggcagcgaagtgtacttgcgccgtgaacttatttgctggggtgattcagtcaaactacgctatggtaataagcccgaggactgtccgtatttatgggctcacatgaaaaagtacacggagattactgctacttatttccaaggggtcagacttgataattgccattctacgccgctccacgttgcggaatacatgcttgatgccgctcgtaatctgcagccgaacctgtacgttgttgcggagttgttcacgggctctgaagatcttgataatgtttttgtcacacgactcggcatatctagccttatacgagaggctatgtcagcttacaatagtcatgaggagggacggctggtgtatcggtacggtggggaaccagtcggaagctttgtgcagccttgcttgcgtcctctgatgccggcgatcgcccatgcgcttttcatggatatcacccacgacaacgagtgcccgatagtccatcgtagtgcttacgacgctctcccttctaccaccatcgtatccatggcatgctgcgcaagcggatccactcgcggttacgatgagcttgtcccgcaccagatcagcgtcgtgagcgaagagaggttttacacaaagtggaacccagaggcattgcccagcaacaccggtgaggtcaattttcaatcaggtattatcgccgctcgatgtgccatcagcaaactacatcaggaactgggcgcgaagggctttatccaggtctacgttgatcaggtcgatgaggacatcgtggccgttacacgtcatagtccttccattcatcagtctgtggtggcggtgagccggaccgcttttaggaatcctaagacatctttctattcgaaggaagtcccccagatgtgcatcccaggcaaaattgaagaagtcgttctcgaagcaaggacaatcgaacggaacacgaagccctaccgcaaggatgagaactcgatcaacggaacgcctgacattacagtggaaatcagagaacatattcagcttaatgaatcaaagatcgttaagcaagcaggagttgccactaaaggtccaaacgagtatattcaggaaattgaattcgagaatctgagccccggatctgtaattatcttcagggtcagccttgacccgcatgcacaggtcgccgtgggaatactccggaatcatttgacccaattctctccacatttcaagtcgggttctcttgccgtagataacgcggacccgatcctgaagattccattcgcaagcttggcctctcgcctcactctcgccgagttaaatcaaatcctgtaccgctgcgaaagcgaggagaaagaagacggtggcggatgctacgatatacctaactggtctgcgcttaaatacgcagggctgcagggtttgatgtccgtcttggcggaaatccggccaaaaaacgatctcggtcatccattctgtaacaacctgcgttccggagactggatgatcgactatgtgtctaaccgactaatcagccgatccgggactatcgctgaggttggaaaatggctgcaagccatgtttttctatttgaaacaaatccccaggtatcttattccttgctattttgatgccatacttatcggggcgtatactacattgctggatacagcttggaagcagatgtcgtccttcgtgcagaacggttccaccttcgtgaaacatctgagcttgggctcagtacagctgtgtggggtcggaaagttcccaagtttgcctatactatcacccgcactgatggatgtgccgtatcgcttaaacgagatcacgaaggaaaaggaacagtgctgcgtgtcgctggccgccggtttgcctcattttagttcagggattttcagatgttgggggcgtgatacctttatcgcacttcgaggtatcctactgataactggacgatacgtcgaggcacgcaatattatccttgccttcgcaggaaccctacgacacggactgatacccaatcttctgggcgaaggtatctacgcacgttacaattgtcgagatgcggtgtggtggtggcttcaatgtatccaggactactgcaagatggttcctaacggactcgatattcttaagtgtccagttagccggatgtatccgacggacgacagcgcaccccttcctgcgggaacgctggaccagcccctcttcgaggtgatccaggaggccatgcaaaagcacatgcaggggatacagttccgggagcgaaatgctggcccacaaatcgaccgcaatatgaaggatgaaggattcaatataaccgcgggggtggacgaggaaaccggtttcgtttatggagggaatcgcttcaattgcggaacctggatggataaaatgggcgaatctgatcgagcccgtaaccgagggattccagcgacgcccagagatggcagtgcggtcgagattgtcggactcagtaagtccgcagtacgatggctgttggaacttagtaagaagaatatcttcccatatcatgaggtcacagtaaaacggcacggaaaggccattaaagtcagctacgacgaatggaatcgcaaaattcaagacaacttcgaaaagctgttccacgtctccgaggacccttccgacctaaacgaaaagcaccctaatttggttcataagcgtggaatctataaggattcttacggggcctccagcccatggtgcgactaccaactgcgacccaatttcaccattgcaatggtagtcgcccctgaattgtttacaaccgaaaaggcttggaaagctctcgagatcgctgaaaagaaactgttaggacccctcggtatgaagaccctggatcctgacgacatggtttactgtggcatttacgataacgcgctggataacgataattataacttggccaaaggttttaactatcatcaaggacccgaatggttatggcctattggatattttctcagggcgaagctctacttttcacgccttatgggtccggagaccaccgcaaagaccattgtgctggtgaaaaacgtcctgtcacgccattacgtacacctcgaaaggtctccctggaaaggactccctgagttgaccaacgaaaacgctcagtactgtcccttctcatgcgagacccaggcgtggtctattgctacaatcctcgagaccttgtatgatcta

SEQ ID NO: 6101 - DNA, 4596 bp, synthetic construct
  misc_feature 1..4596: note = source = /note="Description of Artificial Sequence: Synthetic coding sequence"
  source 1..4596: mol_type = other DNA
atgggacattcgaagcagatacggatccttctcctgaatgaaatggagaagcttgaaaagactttattccgactggaacaaggatatgagttgcagtttcggcttggacctaccctccaaggcaaggccgtgacggtttataccaattatcctttcccaggggagacatttaatcgggaaaagttccggtctctggactgggagaaccccacagaaagggaggacgattcagataagtactgtaagctgaacctccagcagtccgggtctttccaatattactttctacaaggaaatgagaagtcagggggcggttatatcgttgtggatccaatcctcagagtgggcgcggataaccacgtgctgcctctggattgtgtgaccctgcaaacattcctagccaaatgcttaggcccctttgacgagtgggagagtcgcctgcgtgtcgccaaggagtcaggctacaacatgatccactttactccccttcagacactcggattgtctcgcagctgctactcgcttgccaaccagctggagctgaacccagacttctcccgaccaaatcgcaaatatacatggaacgatgttgggcagctcgttgaaaaactgaaaaaggagtggaatgtcatatgtatcactgatgtggtttataatcacaccgcagccaattccaagtggatccaggagcaccccgagtgcgcctataatctcgtgaatagccctcacctgaagcccgcatgggtacttgaccgcgccctgtggcggtttagctgcgatgttgctgaggggaagtacaaagaaaaggggatccccgccctgatcgaaaatgaccatcacatgaattctataagaaagatcatctgggaagatatctttcccaagcttaaactgtgggaattttttcaagtggatgtgaataaagccgtggagcagtttaggcgtctcctgactcaggaaaatcgccgcgtgacaaagtccgaccccaaccagcacttgacgattatccaagacccagagtaccggcggtttgggtgcacagtcgacatgaacatagctcttaccacattcatacctcatgacaaaggccccgcagccattgaggagtgctgtaactggttccataagaggatggaagaactgaactcagaaaaacatcggcttattaattaccaccaagagcaggccgttaattgcctcctgggcaacgtattttacgagaggctggctggccacggtccgaaactggggccggttactcggaaacacccccttgtaacgcgctatttcacctttcccttcgaagagatcgattttagtatggaggaaagtatgatccacctgccaaacaaggcgtgctttctgatggcgcacaatggatgggtcatgggtgatgatccactacgcaacttcgctgagccaggaagtgaagtgtacctgcggagagaactcatctgttggggtgacagcgtcaagctgcggtacggcaacaaacccgaggattgcccctacctgtgggcccacatgaaaaagtacactgagattaccgccacatacttccagggcgtgagattggataattgccactccaccccattgcacgtcgccgagtatatgctcgatgctgctcggaatctgcagcctaacctgtatgtggtcgcggagctgtttactgggtcagaggatctcgataatgtatttgtgactaggctgggaataagcagtctgatcagggaagccatgtcagcatataactcccatgaggaaggcagactcgtttatcgatatggaggggaaccagttggatcctttgtacaaccgtgtctacggcctctcatgcctgccattgcacacgctctgtttatggatatcacacacgacaacgaatgtcccatcgtgcatcgttcagcctacgatgcgctccctagcaccaccattgtgagtatggcgtgctgtgcttcaggctctacacgaggttacgacgagcttgtgccgcaccagataagcgtcgtgagcgaggaaagattttatactaaatggaacccggaagctctgccttctaacaccggagaggtgaactttcagtctggaatcatcgcagcacgctgtgccatatccaagctgcaccaagagctaggcgccaaggggttcattcaggtctatgtggaccaggtggacgaggacatcgtggccgtgactagacactctccatcaatccaccaatccgtggtggccgtgagccggacggcatttagaaatcccaaaacttctttttacagtaaggaagtgccgcagatgtgtatccccgggaagattgaggaggtagtgctggaggcccgcactatcgagcgaaatactaagccttacaggaaggacgaaaactctattaatggcaccccggacatcacagtggaaatacgagaacacatccaactgaacgagtccaagatcgtgaaacaggctggggtggccacaaaaggcccaaatgagtatattcaggagatcgagttcgagaatctgtcacccggctccgttattatcttcagggtgtccctggatccccacgctcaggtggccgtcggcattttaaggaatcacctgacccagtttagtccacatttcaaatcgggctctcttgcagttgacaatgccgacccaattcttaaaattccttttgcttctttggcgtcgcggctgacactcgcagaattgaatcagatactgtaccggtgcgagagcgaagaaaaggaagacggaggtggatgttacgacattcctaattggtcggccttgaagtatgctggccttcagggcctgatgagcgtactcgccgagataagacctaagaatgatctcgggcatcccttttgcaacaatttgaggtctggtgattggatgatcgattacgttagcaacaggctgatcagcagatccggtaccattgcagaagtcggaaaatggttgcaggccatgttcttctacctaaagcagattcctagatatctgatcccttgttatttcgatgctattctcataggagcctatactaccctgctggataccgcctggaaacagatgagctcctttgtccagaacggaagtacatttgtgaagcatctgtcactgggcagcgtccagctgtgtggcgtgggcaagttcccgtccctgcccatcctgagccctgctctgatggatgtgccctatcggctgaacgagatcacgaaggaaaaagagcaatgctgcgtctccctggcggcgggcctgccccacttctccagcggaatcttccgctgttggggtcgggacacctttattgcgttgaggggaattctgctgataaccggaagatatgtggaggcgcgcaatatcattctggcttttgcaggcacactgaggcacggcctgatccccaatttactgggcgagggaatctatgcccgctataattgccgggatgcggtatggtggtggctccagtgcatccaagactactgcaagatggttcccaacggcttagatatcttgaaatgcccagtgtcacggatgtatcctaccgacgattctgccccattgcctgcagggacattagatcagcccctgtttgaggttatccaagaagccatgcagaagcacatgcaaggaatccagtttcgtgaaagaaacgcgggaccccagatcgaccgaaacatgaaggatgagggcttcaacatcactgccggcgttgacgaagaaacaggcttcgtgtacggaggcaacaggtttaactgcgggacttggatggataagatgggggaatcagaccgggcacggaatcgcggcattcccgcaacgccgcgcgacgggtctgcggttgagattgtaggactgtccaagtctgcagtgcgttggcttttggagctgtccaagaagaatatattcccttatcacgaggtgactgtgaagagacacgggaaggccatcaaagtgtcctatgacgagtggaaccgcaaaattcaagacaatttcgaaaagctgttccatgtcagcgaagatcccagcgacctgaatgaaaaacatcccaacctagtccataaaagggggatctacaaggattcctacggggcatcttctccctggtgcgactaccagctgcgacccaatttcaccatagccatggtcgtagctcccgagctcttcacaactgagaaggcctggaaggctttggagatcgccgagaagaaacttttgggcccactcggcatgaaaacactggatcccgatgacatggtttactgtgggatctacgataatgctctggacaatgacaattacaatctggcaaaggggtttaattaccaccagggaccagagtggttgtggccaattggatatttcttgagagccaaactttacttctctagactcatggggccagagacgaccgcaaagaccattgtcctcgtcaagaacgtcttatctaggcactacgttcacctggagcgtagcccctggaagggactgccagagctcactaacgaaaacgctcagtattgcccgttctcttgcgagactcaggcctggtcgattgcaacgattctggaaactctctatgatttg

SEQ ID NO: 6102 - DNA, 4596 bp, synthetic construct
  misc_feature 1..4596: note = source = /note="Description of Artificial Sequence: Synthetic coding sequence"
  source 1..4596: mol_type = other DNA
atgggacattccaaacagatccgtatcttgttgctcaatgaaatggagaagctggaaaagaccctgttccgcctcgaacagggctacgagttgcaattccgcctgggtccaaccctgcaaggcaaagcggtgactgtctacactaattacccgtttcctggagagactttcaaccgggaaaagtttaggagcctcgactgggaaaaccctactgagcgagaagatgacagcgacaaatactgtaagctcaatctccagcaatcgggctcatttcagtactactttctccagggcaacgaaaagtcgggcggaggatacatcgtagtcgatcctatcctccgggtgggagccgacaaccacgtgctgccgctcgattgcgtgacgctccagacgttcctggcgaaatgcctgggacctttcgacgaatgggaatcccggctgagggtcgctaaagaatccggatacaatatgattcatttcaccccgctgcagacgctgggactcagccggtcctgttactcactggccaatcagctggaactgaacccggattttagccggccgaatcggaagtacacttggaacgacgtcggacaactggtcgagaaactcaagaaggaatggaacgtcatctgtatcactgatgtggtgtataatcacactgctgccaacagcaagtggatccaagagcatcccgaatgcgcctacaaccttgtgaacagcccgcacctgaaaccggcctgggtgctcgaccgcgcactgtggcgattctcctgcgacgtggcagaaggaaaatacaaggaaaagggaatcccagccctgatcgaaaacgaccatcatatgaactcgatcagaaagatcatctgggaagatatctttccaaagctgaagttgtgggagttcttccaagtggatgtgaacaaggccgtcgaacagttccggcgcctgcttacccaggagaaccgaagagtgaccaaatccgacccgaatcaacacctcactatcatacaagatcctgaatatagacgcttcggatgcactgtggacatgaacatcgccctgaccaccttcatacctcacgataagggaccagccgcgatcgaagaatgctgtaactggttccacaaacggatggaggaactcaactccgagaagcaccggctcataaactaccatcaagaacaggcggtcaactgcctcctgggcaatgtgttttacgaacgcttggccggccatgggccaaaactgggaccagtgacccggaagcacccgctggtcacccgctacttcaccttccctttcgaagagatagatttcagcatggaagaaagcatgatccatttgccgaacaaggcctgcttcctgatggcgcacaacggatgggtgatgggcgacgacccgctgaggaacttcgcggagccaggtagcgaagtgtaccttagacgcgaattgatctgttggggagactcggtcaagctgcggtacgggaataaaccggaggattgcccgtacctgtgggcccatatgaagaagtacactgagatcaccgcgacgtacttccaaggagtgaggctcgacaattgccattcgacgcccctccacgtcgctgaatacatgcttgatgccgccagaaacctgcaaccgaatctgtacgtggtggccgagctgttcaccggatccgaggacctggacaatgtgttcgttactaggctgggcatctcatcacttatccgcgaagcgatgtcggcctacaattcacatgaggagggtcggctcgtctaccggtacggaggcgaacctgtgggctcatttgtccagccatgcttgcgcccactgatgccagccatcgcgcatgcccttttcatggatattacccacgacaacgagtgcccgatcgtgcaccgcagcgcgtacgatgcattgccttcaacgaccatcgtgagcatggcatgctgcgcctcgggatccactcgcggatacgacgaactggtgcctcatcagatctcggtggtgtcagaagaaaggttctacactaagtggaatcccgaagcactgccttcgaatactggagaagtgaatttccagtccggcattattgctgcgagatgtgccatctccaaattgcaccaggagttgggggctaagggcttcatccaggtgtacgtagaccaggttgacgaagatatcgtagcggtgacccgccattcgccatcgatccaccagtctgtggtggctgtgtcgagaaccgcctttcgcaatccgaaaacctcgttctacagcaaggaagtgcctcaaatgtgcattcccggaaaaatcgaggaggtggtgctcgaagcacgcaccatcgagcggaacaccaaaccataccgcaaagatgagaacagcatcaacggaaccccggacatcactgtggagatccgggagcacattcagctcaatgagtcaaagatcgtcaagcaggcgggagtcgcaaccaagggcccgaacgaatacatccaagaaatcgagtttgagaacctcagccccggatcagtgatcatctttcgggtgtcgttggacccacatgctcaagtggccgtggggatcctgcggaaccacctgacccagttctcgccgcactttaagtcgggatcgctggcggtggacaacgccgatcccattttgaagatcccgtttgcctcactcgcgtcgcggctcactctcgccgagctcaaccaaatcctctatcgatgcgagtcggaagaaaaagaggacggaggcggatgctacgatatccctaattggtcggcactcaagtacgccggactccagggactcatgtcggtgctggctgagatcaggcctaagaacgaccttgggcatccattctgcaataatctccggtctggagattggatgatcgactacgtgtccaatcggctgatttcccggtcgggcactatcgcggaagttggaaaatggctgcaggctatgtttttctacctgaaacagatcccgagatacctcatcccgtgctactttgacgcaattctcatcggagcttacactactctcctggatactgcctggaaacaaatgtcatccttcgttcagaatggcagcactttcgtgaaacacttgtcactgggtagtgtccagctgtgtggggtcggaaagtttccatcactgccgatcttgtcgcccgcgctcatggatgtgccatatcgcttgaatgagatcacgaaggagaaggaacagtgctgcgtatccctggccgccggactcccacacttcagctcgggaatctttcgctgctggggtagggacacgtttattgcacttcgcggaatccttctgatcaccggaaggtacgtggaagctcgtaacatcattttggccttcgccggcaccctgagacacggcctgatcccaaacttgctcggagaaggcatctacgcccgctacaattgccgcgacgcggtgtggtggtggctccaatgtatacaggactactgcaagatggtgccgaatggcctggacatcctgaagtgcccagtgagccggatgtatccaaccgacgattccgcccccctcccagccgggactttggaccagccgctgttcgaggtgatccaagaagccatgcagaagcacatgcagggtattcagttccgggagcgcaatgccggtccgcagatcgacagaaacatgaaggacgaaggatttaacatcactgcaggcgtggatgaagagactggcttcgtgtacggaggaaaccgattcaattgtggaacctggatggataagatgggcgaatccgaccgggcaagaaaccgcggaatcccggcaaccccgcgcgatggatccgcagtggaaatcgtggggctgtcaaagtcagctgtgaggtggctcctggagctgtcgaagaaaaacatattcccataccacgaagttaccgtgaaacgtcatggaaaggccattaaggtgtcctacgatgagtggaacagaaagattcaagacaatttcgaaaaactcttccacgtctcggaagatccgtctgatctcaacgaaaaacacccgaacctggtgcataaaagaggaatctataaagactcctacggcgcttcatcaccgtggtgcgattaccagcttagaccgaacttcacgatcgctatggtggtggccccagaactgttcaccactgaaaaggcatggaaggcgctcgagatcgctgagaagaagctgcttggcccactgggaatgaaaactctggacccggatgacatggtgtactgcggaatctacgacaacgcactggacaacgataactacaacctggccaaggggttcaattaccaccaagggccggagtggctgtggccgatcggctacttcctgcgcgcaaagctgtacttctcccgcctgatgggacccgaaaccaccgcgaaaaccatcgtgctcgtgaagaacgtgctctcgagacactatgtgcacctggagcggtccccgtggaaagggcttccagaactgaccaatgagaacgctcagtattgccccttctcctgcgagactcaggcgtggtcaatcgcaaccattctcgaaaccctgtacgacctc

SEQ ID NO: 6103 - DNA, 4596 bp, synthetic construct
  misc_feature 1..4596: note = source = /note="Description of Artificial Sequence: Synthetic coding sequence"
  source 1..4596: mol_type = other DNA
atgggacactctaagcagatcaggattttgctgctgaacgagatggagaagctggagaagaccctatttcgtcttgaacagggctatgaactccaattccgcttaggacccacgctgcaggggaaagcagtgaccgtctataccaattatccttttcctggggagactttcaatagggaaaagtttaggtccctcgattgggagaatccaacagagagggaagacgactcggacaaatattgtaagctgaatctgcagcagtccggctccttccagtactatttcttgcaggggaatgagaagtctggtggcggatatattgtcgtggacccaatccttcgcgtgggggcggacaaccatgtactgcctcttgactgtgtgaccctccagacctttctggccaagtgtctgggaccattcgacgagtgggaatcgcgcttgcgggtggccaaagagagcggttataatatgatccacttcacaccccttcaaaccctggggctctctagatcttgctatagcctagctaatcagctggagttaaatcccgatttcagtcggcctaatcgaaagtatacctggaatgacgttggccagttggttgagaaactcaagaaagagtggaatgttatctgcattactgatgtcgtatacaaccacactgccgccaacagcaaatggatccaggaacaccccgagtgtgcctacaatctggtcaactccccacatctcaaaccagcttgggtcctcgaccgcgctttgtggcggttttcctgtgacgtggctgaaggtaagtacaaggagaagggtatccccgcactcatagaaaatgaccaccatatgaacagtattcggaagatcatttgggaggatatttttcccaagctgaagctctgggagttcttccaggtggacgtaaacaaagcagtcgagcaatttaggaggttgctgactcaggagaacagacgggtgaccaagtctgatcccaaccagcacctgaccataattcaggaccccgagtatcgtaggttcggatgtaccgttgatatgaacatcgcgctgaccacatttatcccacacgataaaggcccagctgccatagaggagtgctgtaactggtttcacaagagaatggaggagttgaactctgagaagcataggctgataaactaccatcaggagcaagctgtgaattgcttgctggggaacgtgttctatgaacgactggcagggcatgggcccaaactgggacctgtaactcgcaaacaccctttggtaactcggtatttcacatttcctttcgaggaaatagacttttctatggaagaatcaatgattcatttacctaataaagcctgtttcttgatggcccacaatggatgggtgatgggtgacgatccactccggaactttgccgagcccggtagtgaggtatacctgcgcagggaattaatatgttggggtgacagtgtaaaacttcgctacggcaataagcccgaagattgcccctacctgtgggcacacatgaagaagtataccgaaatcaccgccacctacttccagggggtccggttggataattgtcattctaccccactgcatgttgctgaatatatgctggacgccgccagaaacctgcagcctaatctgtatgtcgtggctgagctcttcactggctccgaagacttggacaacgtgtttgtgactcggctaggcatatcaagcctcatcagggaggccatgagcgcttataatagccatgaggagggccgtctcgtttatcgctacggcggggagcccgtgggctccttcgtgcagccctgtctgcgaccattaatgccggccatagctcacgccctcttcatggacatcacacatgataacgaatgtcctatcgtccaccggagtgcatacgacgcgctgccttcaacaacaattgtaagtatggcatgttgtgcgtccggcagcactcggggatacgacgagcttgtgcctcatcaaattagcgtcgtgtctgaagagaggttctatactaagtggaaccccgaggccttgcccagtaacacgggcgaagtgaactttcagtctggaattatcgccgctagatgcgccatcagtaagctgcaccaggagctgggagctaagggattcatacaggtgtatgtggaccaggtggatgaggacatcgttgccgtgacccggcactctccatcaatacatcaatccgtggtggccgtcagtaggacagcgttccgtaacccaaagacttcattttatagtaaggaagtgcctcagatgtgcatccccggaaaaattgaggaagtggtgttagaagcccggactatagaacgtaacactaaaccctacagaaaggatgagaatagcataaacggcactcccgatataacggtcgaaattagggagcacattcaactaaatgaaagtaaaatcgtgaagcaggcaggtgtggcaacaaaaggaccaaacgaatatatccaggaaatcgaatttgaaaacctttcaccaggatcagtaatcatctttagagtgtccttggacccacatgctcaagtggcggtggggatactgcggaatcatcttactcagttctccccccactttaagtccggcagcctggccgtagacaatgcagatcccatccttaaaatccctttcgcttcgctggccagtcgacttacactggccgagctgaaccaaatcctgtacaggtgcgaatccgaagagaaggaggacggcggtgggtgttacgatatccccaattggagcgccctgaagtatgcaggtctacaaggcctgatgagtgtccttgccgagataaggccaaagaatgacttggggcatcccttttgcaacaatctgcgttcgggggactggatgatcgactacgtttccaatcgcctgatctccaggtctggtacaattgccgaggtgggcaagtggctccaggccatgtttttttacctcaagcagattcccagatacctgattccctgctattttgacgccatacttatcggggcctacactacactgttggatactgcctggaagcagatgagctcctttgttcagaatggctctaccttcgttaaacatttatccctgggatcggtccagctatgcggggtgggtaagttcccgtccttacctatcctgtccccagctctcatggacgtaccttatcgactgaatgaaatcactaaggaaaaagaacagtgttgcgtgagtctagcggcggggttgccccacttttcatcagggattttcagatgctggggccgggacaccttcatagccctgcgggggatacttctgattactggaaggtacgtcgaggccaggaatattattttagcatttgccggaactttgcggcacggattaatccccaacttgctcggcgagggcatctacgccagatacaattgcagagacgctgtttggtggtggctccaatgtatccaagactactgtaagatggtccctaatggcttggacatcctcaaatgccctgttagtcgtatgtaccctacagacgactccgctccccttcctgcggggaccctggatcagccgttattcgaagtcattcaagaggctatgcagaaacatatgcaaggcattcaatttcgggaaagaaacgccgggccgcaaattgatagaaatatgaaggacgagggctttaacatcaccgccggcgttgatgaggagactggcttcgtgtacggaggcaaccggtttaattgcggaacttggatggataagatgggggagtcagacagggcacgtaacagaggcatccccgcgacacctagagacggctccgctgttgaaattgttggcctttccaagtctgccgtaagatggctccttgagctgagtaagaaaaatatatttccgtaccacgaagtcactgtgaagcggcacggcaaggctattaaagtttcatatgatgagtggaacaggaagattcaggacaacttcgaaaagctgttccacgtgagtgaggacccctcggacctcaacgagaaacacccgaaccttgtgcacaagaggggaatctataaagactcctacggcgcgagttccccatggtgtgattaccagcttagacctaacttcactattgccatggttgtcgcgccagaactgtttactacagagaaggcgtggaaagcactggagattgccgaaaaaaagcttttgggaccccttggcatgaaaaccctcgatccagacgacatggtatactgtggaatctacgacaatgccctggataatgacaactataacttagccaaagggtttaactaccaccaggggcctgagtggctatggccaatcgggtatttcctgagagcgaagctgtacttctcaagactgatggggcccgagacgaccgcaaaaactatcgtgctcgtgaagaacgtcctttcccggcactacgtgcatcttgaacgctccccctggaagggattaccagagctgaccaacgagaacgcccaatattgcccctttagctgcgagacgcaggcttggtctatcgccactatcctcgagaccctgtacgacctc

SEQ ID NO: 6104 - DNA, 4596 bp, synthetic construct
  misc_feature 1..4596: note = source = /note="Description of Artificial Sequence: Synthetic coding sequence"
  source 1..4596: mol_type = other DNA
atgggccactctaagcagattagaatcctccttctgaacgagatggagaagctggagaaaactctgtttagactggagcagggctacgaacttcagttccgcctcggtcctacgctgcagggaaaggcggtgacggtctacactaactacccattccccggtgagacgttcaaccgcgagaagttcaggtcgcttgactgggaaaaccctactgaaagggaagatgatagcgacaagtactgtaaactcaacctgcagcagtcgggttcatttcagtattactttttgcagggcaatgagaagtccggaggaggttacatcgtggtggaccccatcctcagagtcggagcggataatcacgtattgccgctggactgcgtgaccctccagacttttttggcaaagtgcctgggaccgttcgacgaatgggaatcccgcttgcgggtcgctaaggaatcgggatacaacatgatacactttaccccgttgcagaccctggggctgtcgagatcgtgctactcgctcgctaatcaactggaactgaatccggacttcagccgcccgaatcggaagtacacctggaacgatgttggacagctcgtggaaaaacttaagaaggagtggaatgtgatctgcatcaccgacgtggtgtacaatcacaccgctgcgaactcgaagtggattcaggaacacccagaatgtgcctacaatctggtgaacagcccgcacctgaaaccggcctgggtgctcgatcgggccttgtggcggttctcgtgcgatgtggctgagggcaagtacaaggaaaaaggcatccctgccctcatcgaaaacgatcatcacatgaacagcatccgcaaaatcatttgggaggacatttttccaaaactgaagctgtgggagtttttccaggtggacgtgaacaaggccgtggaacagtttagacgcctgctcactcaggaaaatcgccgcgtgaccaagtcggatccgaaccagcatctgaccatcatccaggacccggaataccggaggtttgggtgcactgtggacatgaacatcgctctgactacgttcattccacacgacaaggggccagctgcaatcgaggaatgctgcaactggttccacaagcggatggaagaactgaactcagaaaagcacagacttatcaactaccatcaagagcaagccgtgaattgcctgctgggaaatgtgttctacgagagactcgcaggacatggaccgaaacttggacccgtgacgcggaagcacccgctggtgacccgctactttactttcccgttcgaagagattgacttctcaatggaagaatcgatgatccacttgccaaataaggcttgcttccttatggctcacaacggttgggtgatgggcgacgaccctctgaggaacttcgctgaaccaggatcagaggtttacctccgtcgggaactgatctgttggggagactcggtgaagctgagatacggaaacaaaccggaggattgtccgtacctgtgggcccatatgaagaagtacactgagatcaccgccacctatttccaaggagtccggctggacaactgccactcaacccctctgcacgtggccgagtacatgctggacgcagcgagaaaccttcagcccaacctgtacgtcgtcgccgaactctttaccggctctgaggacctggacaatgtgttcgtgactagactcggaatcagctccctgatccgcgaagcgatgtcagcctacaacagccatgaggaaggtagactggtgtacagatacggaggcgagcccgtcggatcgttcgtgcagccgtgcctgcgcccgttgatgccggccattgcgcatgccctgtttatggacatcactcacgacaacgaatgtcccattgtgcatcgctccgcttacgatgccctcccatcgaccactatagtcagcatggcctgctgcgcgtcgggatcgaccaggggctacgatgaactggtgccgcatcaaatcagcgtcgtcagcgaggagaggttctacaccaagtggaacccagaagccctgccgtccaacaccggagaagtgaacttccagtcgggcatcattgcggcacggtgtgcaatctcgaaactgcaccaggaactgggagcaaagggctttatccaggtctacgtggatcaggtggatgaggacatcgtcgcggtgacccgccactcgccgtcaatccatcaatcggtggtggctgtctcgaggactgcattccgcaacccaaagacttctttctatagcaaagaggtgccgcaaatgtgcatcccaggaaagatcgaggaggtggtcctcgaagccagaacgatcgagcgcaacactaaaccgtaccggaaggacgagaactcaattaacgggactccagacatcaccgtcgagatcagagagcatatccaactcaacgagagcaagatagttaagcaggcgggagtcgcaactaagggaccaaatgaatacatccaagagatagaattcgagaatctgtccccggggagcgtgattatcttccgcgtgtcgcttgacccccacgcgcaggtcgcagtcggaatcctccggaaccaccttacccagttctccccgcacttcaagagcgggagtctggccgtcgataacgctgacccaatcttgaagatcccgttcgcctcgctggcctcgcggttgactttggccgaattgaatcaaatcctctacaggtgtgagagcgaggagaaggaagatggtggtggatgctatgatatccctaactggagcgctctcaaatacgccggattgcaaggactgatgtcggtgctggctgagatccggccgaaaaacgatctgggtcacccgttctgcaacaatctgagatcgggggattggatgatcgactacgtgtccaatagactcatctcaagatctggaaccatcgccgaagtgggaaagtggctgcaagccatgttcttttacctgaagcaaatccctcgatacctgataccttgttacttcgacgccattctgataggagcgtacactactctgctggatacggcatggaagcagatgagcagcttcgtgcagaatggctccactttcgtgaagcacctctcgctgggatcggtccaactgtgcggagtgggtaagttccctagcctcccgatcctgtcaccggctcttatggacgtcccctaccggcttaacgagatcactaaggaaaaggagcagtgctgcgtgtcgctcgcggccggattgcctcatttctcgtctggcatcttccgctgctggggacgcgataccttcattgcacttagagggattctccttatcactggccgctacgtggaggccaggaacattatcttggcgttcgcagggaccctgcggcacggcctgatccccaatctgctgggcgagggcatctacgcccgatacaactgtagggacgccgtctggtggtggcttcagtgcatccaggattattgcaagatggttccgaacggactcgacatcctcaagtgccctgtgagccgcatgtacccaaccgacgactcagccccgctcccagcaggaacgctggaccaaccgcttttcgaagtgattcaggaagcgatgcagaaacacatgcaaggaatccagttccgggaacggaacgccgggccgcagattgatagaaacatgaaggatgaaggcttcaacattaccgcgggtgtcgacgaggagacgggattcgtgtacggcggaaatcgctttaactgcggcacgtggatggacaagatgggcgaaagtgatagagcgaggaacaggggaatcccggccactccacgggatggctccgccgtggagatcgtcggcctgtcgaaatcggcagtccggtggctgctcgagctttcgaagaagaacatcttcccgtaccatgaagtcaccgtcaagcgccacggtaaggcaatcaaggtcagctacgacgagtggaacagaaaaatccaggataactttgaaaagctgttccacgtgtcagaggacccatcagatctgaacgaaaaacacccgaacttggttcataaacgtggaatctacaaggacagctatggtgccagctccccatggtgcgattaccagctgcggcccaactttactatcgccatggtggtcgcaccggagctgtttactaccgaaaaagcctggaaagcactggagattgccgaaaagaaactcttgggccccctgggaatgaaaactctcgatccggacgatatggtgtactgcggaatctacgacaacgctcttgacaacgacaattacaatctggccaagggtttcaattaccatcaaggaccggaatggctttggccaatcggctacttcctcagggccaagctgtacttctcaaggctgatgggacctgaaaccaccgcaaaaaccatcgtgctcgtgaagaacgtgctctccagacactacgtccatttggaacgttcaccatggaagggactgcctgagctcaccaacgagaacgcccagtactgcccgttcagctgtgaaacccaggcatggtccatcgcgaccatcctcgaaacgctgtatgatctg

SEQ ID NO: 6105 - DNA, 4596 bp, synthetic construct
  misc_feature 1..4596: note = source = /note="Description of Artificial Sequence: Synthetic coding sequence"
  source 1..4596: mol_type = other DNA
atgggacattctaaacaaattaggatcttactgcttaatgagatggagaaactcgagaagaccttgttcaggttggagcagggatacgaacttcagtttcgtcttggcccaacactgcagggaaaggccgtcacagtgtacacaaactacccgttcccaggggagactttcaacagagagaagttcagatctttagattgggagaaccccacagaaagggaggacgactctgataagtattgcaaactgaacctacagcagtccggttcctttcagtactattttttgcaggggaacgaaaaatccgggggaggttatatcgtcgttgatccaattctccgggtcggggctgacaaccacgtgcttcctctcgattgcgtaacactgcagacatttctagctaagtgtttggggccattcgatgaatgggagagccggctgcgcgtggccaaagagtctgggtataatatgatccactttacccctctgcagaccctggggctgagtcggagctgttactctctggccaatcagctcgaactgaaccccgatttcagtcgcccaaatagaaaatacacgtggaatgacgtcggccagcttgtagaaaagctgaagaaagaatggaatgtgatatgtattaccgacgtggtatacaaccatactgccgcaaactccaaatggatacaggaacaccctgaatgtgcctataacctcgtgaactcgccacatctaaagcccgcttgggtattagatcgcgccctgtggagatttagctgtgacgtggctgaaggcaagtacaaagagaaaggaattcccgccctgattgagaatgatcatcatatgaatagcatacgcaaaataatctgggaagacatctttcctaaactgaaactgtgggaatttttccaagtagatgtgaacaaagcggtggagcagtttcgcaggttgttaactcaggagaatcgcagggtcacaaagtcggacccgaatcagcacttgactatcatacaggatccagaatacagaagatttgggtgcacagtggatatgaacatcgctctgacgactttcataccacacgacaagggaccagcagccatagaggagtgttgcaactggttccacaaaagaatggaggagctgaactctgaaaaacaccggttgataaactatcatcaggaacaggcggtaaattgtctactcggtaacgtattctacgaaaggctcgccggacacggccctaagctcgggccagtaacaagaaagcacccccttgtaacgagatattttaccttcccattcgaggagatcgacttttcgatggaggaatccatgattcacctgccaaataaggcatgtttcttgatggcccacaatggctgggtgatgggggacgacccactcagaaacttcgccgaacccggatcagaagtgtacctgagaagagagctgatttgctggggggatagcgttaaactgcgctatggtaacaaacctgaagactgcccgtacctgtgggctcatatgaagaagtacacagagattacggcgacctactttcaaggtgtgaggctggataattgtcattccactcctctccatgtggccgagtatatgctagatgccgctcgcaatttgcaaccgaatctgtacgttgtggcagagctgtttaccgggagtgaggatctggataacgtgtttgtgacccggctgggcatctcctccctgattagggaggctatgtctgcttataacagccacgaagagggccggctagtctacagatacggcggcgagccagtcggttctttcgtccagccctgtctacggcctctgatgcctgcaatagctcacgctttgtttatggacattacacatgataacgagtgtccaatcgtgcacagatccgcgtacgatgccctgccaagcacaactattgttagcatggcctgttgtgcatcagggagcactaggggttatgatgagctggtcccacaccagatcagcgtagtctccgaagaacggttttataccaagtggaacccagaggcactgccctctaatactggtgaggtgaacttccagagcggcattattgctgcacgttgcgccatcagcaagcttcatcaggaacttggggcaaaaggcttcattcaggtatatgtggaccaggtcgacgaagacatagtggccgtgacgcgacactcaccatctatccaccagtcagtggtagcggtttcaaggacagctttcaggaacccaaaaacctctttttactccaaagaagtgccacagatgtgcatccccggtaagatagaagaggtggttttggaggccaggaccattgagaggaacactaagccgtataggaaagacgaaaactctattaacgggacccctgacatcaccgtggagatccgagagcatattcagctcaacgaaagtaaaattgtcaaacaagccggagtggctaccaaaggccctaatgaatacattcaggagattgaattcgagaacctgtcccctggctctgtaatcatattcagggtgtcgcttgatcctcatgctcaagtagccgtcggtatcctgcgtaaccacctgacacagttctcacctcactttaagtctggcagcctggccgtggacaatgcagaccccattctcaaaatcccgttcgcctccctagcctcccgtctcaccttggcggaactgaatcagatcctgtaccggtgcgaaagcgaggagaaggaggatggaggcgggtgttatgacattccaaattggtctgctctgaagtatgcggggctgcagggtctgatgtcagtgctggccgaaatccgtcccaaaaatgatctaggtcatccattctgcaacaacctgcgctccggtgactggatgatagactacgtgagtaacaggttgatttctcgatcaggaaccattgccgaggtgggaaagtggctccaggccatgttcttctatttaaagcagatcccgaggtatctgataccctgctattttgacgccattctcataggtgcctacaccaccttgttggacactgcctggaaacagatgagttctttcgttcaaaacgggtcaactttcgttaagcacctgtccctcgggtctgtacagctgtgcggggttggaaagtttcccagtctgccaattttgtccccggccctgatggacgtcccatatcgactgaacgagatcactaaggagaaggagcagtgttgtgtctctctggctgcgggtcttcctcatttcagtagtggtatttttcggtgctgggggcgagatactttcatcgcgctcagaggaatcctgctcataaccgggagatatgtagaggcacgaaacatcatcttagcttttgctggcacactcagacacggcctgatacccaatttactgggcgagggcatctatgctcgatacaattgtcgggatgcagtgtggtggtggcttcaatgtatccaagactattgtaagatggtgcctaacggactggacatactgaaatgtccggtgtcaagaatgtatccaacagacgattccgctcccctccccgctggcactctggaccagccactgttcgaggtgattcaggaagctatgcaaaaacacatgcaggggatacagtttcgggagcgcaatgccggcccacagattgaccgaaacatgaaggacgaaggatttaatatcacagctggcgttgatgaggagacagggtttgtgtatggggggaatcggttcaactgcgggacttggatggacaagatgggagaatccgacagggcccgcaaccggggcattccagctacccccagggatgggtcggcagtagagatcgttgggctgagcaaaagcgcggtacggtggctattagagttatctaagaagaacatctttccatatcacgaagttacggtgaagcggcacggcaaggctatcaaggtctcctacgacgaatggaacagaaagatacaggacaattttgaaaaactgttccatgtatctgaagacccctctgatttgaacgaaaaacaccctaaccttgtgcacaagcggggaatttacaaagactcgtacggggcctctagtccctggtgcgactaccagctgagaccgaatttcactatcgctatggtcgtagcacccgaactttttaccacagagaaggcttggaaagccttggagatcgcagaaaaaaagttgcttggacccctggggatgaagaccctggacccggatgatatggtgtactgcgggatttacgacaatgccttggataatgataactataaccttgcgaagggtttcaactaccatcaggggccggagtggctctggcctattggctacttccttagagctaagctgtacttctcgcggctcatgggtcccgaaacaaccgccaagacaatcgtcctggttaaaaatgtactaagtcgccattatgtgcacctagagaggtcaccctggaaaggtctccctgaactgactaatgagaacgcacagtattgtcccttctcttgtgaaacgcaggcctggtccattgccactatcttggaaaccctgtatgacttg

SEQ ID NO: 6106 - DNA, 4596 bp, synthetic construct
  misc_feature 1..4596: note = source = /note="Description of Artificial Sequence: Synthetic coding sequence"
  source 1..4596: mol_type = other DNA
atgggtcattccaaacagatacgaatcctgcttcttaatgaaatggaaaagcttgaaaagacacttttcaggctggagcagggatatgaactccaatttaggcttggaccaaccttacaagggaaagcggtcaccgtgtatacaaactatcctttcccgggggagacattcaatagagaaaaattccgatcattggattgggagaatccgacagaacgagaagatgattctgacaagtattgcaagttaaacttacagcagtcaggatcctttcaatattatttcttacaaggcaatgaaaagagtggaggagggtacatagtggtagacccgatcctgcgagtcggggccgataatcacgttcttccgttagattgtgtgacactccaaacctttcttgcgaaatgtctgggaccgttcgatgaatgggaatcccgcctgcgggttgcaaaagaatcgggctacaacatgatccattttacaccactccaaacactgggccttagcagatcatgctattccctggcaaaccaattagaactgaacccagacttttcccgtccgaatcggaaatatacttggaatgacgtaggccagcttgtagaaaagctgaaaaaagaatggaacgtgatttgcattacagatgttgtttacaatcatacagctgccaactcgaagtggatacaggaacatccggaatgcgcatataatcttgtcaatagcccgcatctcaagccagcatgggtacttgatcgggcgctttggcgcttcagctgcgatgtagcagaaggaaaatataaagagaaaggtattccagcacttatcgaaaatgatcatcatatgaattccataagaaaaatcatctgggaagatatttttccgaagttaaaactctgggaatttttccaggtggatgttaataaagcagtggaacagtttaggagattacttacgcaagaaaatcgcagagtcactaagagcgaccctaatcaacatctcactatcattcaggatcctgaatatagaaggtttggatgcacagttgacatgaatattgcccttacaacattcattcctcatgataagggtcccgcggctattgaagagtgctgcaactggtttcataaacgtatggaagagttaaactcggaaaaacaccgactcattaattatcaccaagagcaggccgtcaactgcctgttaggtaacgtgttttatgagcggttggctggccacggaccgaaattggggcctgttacgagaaagcatccgcttgtgacacgttactttacgttcccgtttgaagaaattgatttttctatggaagaaagtatgatccacttgcctaataaagcatgttttctgatggcgcataacgggtgggtgatgggagacgatccgttacgaaacttcgcggaaccgggcagcgaagtttatctgcgccgggagcttatttgctggggcgatagtgtgaaactgaggtacggcaacaaaccagaagattgcccttacctgtgggcacacatgaagaagtatactgaaataacagctacatatttccagggcgttaggttagataattgccatagcaccccgttgcacgtggcggaatatatgttggatgctgccaggaatttgcagcctaatctctatgtagttgccgaactgtttacaggaagtgaagatctggataatgtatttgtgacgcggttaggcataagctccctgatcagagaagctatgagtgcgtacaattcacatgaggaaggccgccttgtgtatcgctatggtggcgagccggttggttcttttgtgcagccttgcttacgcccgttaatgccagccattgctcatgctctctttatggacattacgcatgataacgaatgcccgattgttcaccgaagcgcgtatgacgcacttccttctacaacaatcgtgtcaatggcttgctgtgctagcggatctacccgtggctatgatgaactggtcccacatcaaatctcagtggtaagcgaagagcgtttctacacaaaatggaaccctgaagcgcttccatctaacactggcgaggtcaattttcaaagtggtattatcgccgcccgttgtgcaatttctaaactgcatcaagaattaggcgctaagggttttattcaggtgtatgtagaccaagtggatgaagacattgtagccgttacgagacatagcccatcaatccaccagagcgtagtcgcggtgagtaggaccgcgtttcgtaacccaaaaacatcattttactctaaagaggttccgcagatgtgtattcctggaaaaattgaagaagtcgtgctggaagctaggacgattgagaggaataccaaaccttaccgcaaagacgagaattctataaatggtactccggacattacagttgagattcgcgaacatatacagttaaacgagtcaaagattgtgaagcaagcaggagtggctacaaaagggccgaatgaatatatccaggagattgagtttgaaaatctgtcaccgggttcagtgatcattttccgagtatctcttgatccgcatgcacaagtagcggttggcatccttcgtaaccatttgacgcaattttcacctcattttaaatcgggttctctggcggtcgataacgcggaccctattctaaaaattccgtttgcatctttggcaagccgactcaccttagctgagttaaatcagatactgtatcgatgcgaatcggaagagaaggaagacggcggcggatgctatgatattcctaattggtccgcgctcaaatacgccggtctgcagggccttatgtctgtgttggcagaaatccggccaaaaaatgaccttggacaccctttttgtaataatttaaggagtggtgattggatgattgactatgtgtctaatcgtttaatttcacgttctggaacaatcgcggaggtcgggaaatggttacaggccatgtttttctatctaaaacagattccaagatatttgatcccgtgctactttgatgcaatcttaataggggcgtatacgaccctgctagatacagcatggaaacaaatgtcctcatttgtccagaacggttcaacattcgtaaaacatttaagtttggggtctgtgcaactttgcggcgttggcaaatttccttctttgccaatattgtcacctgctttgatggatgtaccgtatcgcttaaacgaaattacaaaagagaaagaacagtgttgtgtatcattggctgcggggcttccacatttttctagcggcattttccgttgctggggacgagatacttttatcgcattacgtgggattttactaatcaccggtagatatgtcgaagctagaaatataattcttgcctttgcgggaacgcttcgacatggacttattcctaatttacttggcgagggtatatacgcaaggtacaactgtcgcgatgctgtttggtggtggctccagtgcatccaagattactgcaagatggtgccgaacgggctggacattttgaaatgcccggtctctcgcatgtacccaacagatgattcggctccgctgccagctggtacgttagaccaaccgctatttgaagtcattcaagaagctatgcagaaacatatgcagggcatccagtttagagaacgtaatgctggacctcagatcgacagaaacatgaaggacgaaggcttcaacattactgcaggagttgatgaagaaacgggctttgtctatggaggaaatcgctttaactgcggaacttggatggataaaatgggagaaagtgatagagctcgaaataggggcattccggccactccgcgtgacggttccgcggtggaaattgttggcctgtcgaagtctgccgtccgctggctgctggaactttcgaagaaaaatatttttccatatcacgaagtcaccgtaaaaagacacgggaaggctattaaagtgtcttatgatgagtggaaccgcaaaattcaagacaatttcgaaaaattgtttcatgtgtcagaagatccctcggacttgaatgagaagcatccgaatcttgtacataaacggggcatctataaagactcttacggcgcgtcaagcccgtggtgtgactaccaactgcgccctaactttacgatcgcaatggtcgtggcgcctgaattatttacaactgaaaaagcatggaaagcacttgaaattgccgaaaaaaagctgctgggaccacttgggatgaagacgttagacccggatgatatggtttattgcggaatttatgacaatgcgttggataatgataattacaaccttgcgaagggattcaattaccaccagggcccggaatggctgtggccgattggctactttctgagggcaaagctgtacttttcacgattaatgggaccagaaacgacggccaaaacgattgttttggtgaaaaatgtcttatcacgtcactatgtacatttggaacgtagcccatggaagggactcccggaacttaccaacgaaaatgcccagtattgcccattttcatgtgagacacaggcgtggagcatcgccacaattctggagaccttatacgactta

SEQ ID NO: 6107 - DNA, 4596 bp, synthetic construct
  misc_feature 1..4596: note = source = /note="Description of Artificial Sequence: Synthetic coding sequence"
  source 1..4596: mol_type = other DNA
atgggccactcaaaacagatccgtattttgttgttgaacgagatggaaaagctggagaagaccttattcagattagagcaaggatacgagctgcagttcaggctggggcccaccctgcagggcaaagcagtcactgtgtatacaaactatccattcccaggggagacttttaaccgggagaagttccggtctctagactgggaaaaccccactgagagggaagacgatagcgacaagtactgcaagctaaacctccagcagtccggttctttccagtattacttcctgcaagggaatgagaaaagcggcggggggtatatcgtggttgatccaattcttagagtaggcgcagacaaccacgtgctgcctctggattgcgtgactctgcagacattcctcgcgaaatgcctgggtcctttcgatgagtgggagagccggttacgtgtcgcaaaggaatcaggctacaatatgattcattttactcctctgcagacactgggactcagcaggtcctgttatagtctggccaaccaattggagttaaaccccgacttcagccggcctaacaggaaatacacctggaacgacgtggggcaattggttgaaaagctgaaaaaagagtggaatgtgatctgcattaccgacgtcgtgtacaatcacacagcagcgaattccaagtggatccaagagcacccagagtgtgcctataatctcgtgaatagtccacacctgaaacccgcatgggtactcgaccgggctctgtggaggtttagctgtgatgtcgcggaaggaaagtacaaggagaaggggataccagctctgatcgaaaatgatcaccacatgaatagtatccgaaagatcatatgggaggatattttccctaagctgaaattgtgggaatttttccaggtcgatgtgaacaaggcggtcgaacagtttaggcggctgctcacacaggaaaatcgccgagtcactaagagtgatccaaaccagcatctcactattatacaagatcccgagtatagaaggttcggatgcacggtggacatgaacatagcattgacaacgttcatcccccatgataaaggacccgcagctatcgaggagtgttgcaattggttccataaacgcatggaagaactaaattcagagaagcaccgtctcatcaactatcatcaggagcaggccgtgaactgcctgctgggaaatgtgttctatgagaggctggcaggccacggcccaaagctcggacccgttacccgtaagcaccccttagtcactcgatactttaccttcccctttgaggagatcgatttttccatggaagagtctatgattcacttaccaaacaaagcgtgcttcctgatggcccacaacggatgggtaatgggagacgaccctctaagaaatttcgccgagccagggtccgaggtgtatctcaggcgcgaactaatttgctggggagattcggtaaagctccgatatgggaataaaccagaagactgtccctacctgtgggcgcacatgaagaagtacacggaaataactgcaacttactttcagggcgttcgccttgacaattgtcacagtacaccacttcacgttgctgagtatatgctggacgccgcacggaaccttcaacctaacctgtatgttgtggcggagctgttcaccggttctgaagacctcgataatgtgttcgttactcggttgggaattagcagtctgattagggaagcaatgtcagcatataattcccacgaggaaggtaggctggtctaccgctacggaggtgaacccgtcgggagttttgtacagccttgcttacggcctctaatgcctgccattgcacatgctctgtttatggacataacacatgacaatgagtgtcccattgtgcaccgctcggcatatgatgcactaccctccaccaccatagtatccatggcctgctgtgctagcgggtcaacccgcggctacgacgaattagtcccccaccaaatctcggtagtaagtgaagagaggttttacactaaatggaatccagaggcattgccttctaacactggggaggttaacttccagagcggcatcattgcagctcgttgcgcgatcagcaagctgcaccaggagctgggtgcaaaaggcttcatccaggtctacgtggatcaagttgacgaagacatagtcgcagtgacacggcactccccttccatccaccagtctgtcgttgccgtcagccggaccgccttccggaacccaaagacctccttctatagcaaggaggtcccgcaaatgtgtatacccggtaagatcgaggaagtggttctggaggcgaggactatcgagcggaacaccaagccctatcgtaaagatgagaactctataaatgggacaccagacattaccgtggaaatccgagaacacatccagctcaatgagtctaaaattgtcaaacaggcgggggtggccaccaaaggaccaaatgaatacattcaagagatcgagtttgaaaacctctctccaggctctgtcattatttttagagtctcactggatccgcacgctcaagtagctgtggggatccttaggaatcaccttacccaattctctcctcatttcaagtccgggtcactcgccgtggataatgcggacccaatcctgaagatcccgtttgcgtctcttgctagtaggttaactctggcggagttgaaccagatcctgtatagatgcgaatctgaagagaaggaggatggcgggggctgttacgacattccaaactggtcagcactgaagtacgccgggctacagggcctgatgagcgtacttgccgagatccgcccgaagaatgacctgggccacccattttgtaataacctccgatcaggggattggatgattgattatgtatccaacaggctaatctctcggtcaggaacaatcgcagaagtgggaaagtggttgcaagctatgttcttctacctcaagcagatccctagatacctaatcccgtgctacttcgatgccatcctcataggcgcatatactacccttcttgatacagcttggaagcagatgtcctcattcgtccagaatggcagcacttttgtcaaacatctgtcattaggatccgtccaactctgcggagtggggaaattcccaagtcttcccatcctgtcccccgccctgatggacgtaccctaccgccttaatgaaatcacaaaagaaaaggagcaatgttgtgtctctctggctgctgggttgccacacttttcttcagggattttccggtgctgggggagagacacattcatcgcacttaggggaatcctgctgataaccggaaggtatgttgaggcccggaatatcattcttgcgttcgccggtacgctgcgccatggcttgatccccaatctgctgggggaaggcatctacgcgagatacaattgccgtgacgccgtttggtggtggctgcagtgcattcaggactactgtaaaatggtaccaaatggcctggatattctgaagtgtcccgttagccgtatgtatcctacggacgattcagctccactgcctgccggaacccttgatcagccactgtttgaggtgatacaggaggcgatgcagaaacacatgcaggggatacaattccgggagagaaatgccggaccccaaattgataggaacatgaaagatgagggtttcaacattaccgctggcgtggacgaagagactggcttcgtgtatggagggaaccgtttcaactgtggcacatggatggataaaatgggagaatctgatcgggctcgcaatagaggcatccctgctactccacgggatggatctgcagtggagattgtcggactgagcaagtcggccgtgcgatggttgttagaactctctaaaaaaaacatttttccatatcatgaggtcactgtcaagagacatgggaaggccattaaagtgagctacgatgaatggaatcggaaaatccaggacaacttcgaaaagctttttcatgtttctgaggatcccagcgatctgaacgaaaaacaccctaacttggtacataaacgcgggatatacaaagacagctatggcgcctcatccccttggtgtgattatcaactccgaccgaactttacaatcgccatggtggttgctccggaactgttcacaaccgagaaggcgtggaaagccctggaaattgccgagaaaaaactactgggtccccttgggatgaaaacactcgaccctgacgacatggtttattgtggcatctatgataacgcgctggacaatgataactacaacttggccaagggatttaactatcatcagggacctgagtggctatggcctatcgggtattttctgagggcaaaactgtatttctcccgcctgatgggacctgagaccacggctaaaactattgtgttggtcaaaaacgtactgagtcggcattatgtccacttggaaagaagtccatggaaaggcttacctgagctcacgaacgagaatgcccagtattgtccgttttcctgtgagactcaggcatggtcgatcgcaaccatcttggagaccctctatgacctc

SEQ ID NO: 6108 - DNA, 4596 bp, synthetic construct
  misc_feature 1..4596: note = source = /note="Description of Artificial Sequence: Synthetic coding sequence"
  source 1..4596: mol_type = other DNA
atgggccacagcaagcaaatcaggatccttcttctaaatgaaatggagaaactggaaaaaaccctttttagactcgagcagggatatgagctgcagtttaggctgggccctacgttacagggtaaggcagtgaccgtttatactaattacccctttccaggtgaaactttcaaccgcgaaaaattccgaagcctcgattgggagaacccaacagagagggaggacgactccgataagtactgtaaactgaacctgcagcagtcaggttcctttcagtattattttctgcagggcaacgaaaagtcgggcgggggctatatcgttgtagatccaatcctccgcgtgggagccgacaatcacgtgttgcccctggattgcgtgaccctccagacgttcttggcgaagtgtctgggacctttcgatgagtgggagtcaagactgcgcgtcgctaaagagagcggatacaacatgatccactttaccccactccagactctggggctgtccaggtcatgttactccctggctaaccagctggaactgaatcccgattttagtcggcctaatcgcaagtacacctggaatgatgtcgggcagttggtggaaaagcttaagaaagagtggaacgtaatttgtatcaccgatgtcgtgtacaatcacaccgctgcaaatagtaaatggatccaggagcacccggaatgcgcgtacaacctggtaaactcaccacatcttaaacccgcatgggtgttggatagagctctatggcggttctcctgtgacgttgcggaggggaaatacaaggaaaagggcattccggccctgattgaaaacgaccaccacatgaactccataaggaaaattatctgggaagacatctttccgaaactcaagttgtgggaatttttccaggtggacgtgaacaaggccgtggagcagttcaggcgactgctcacacaggagaaccgaagggtgactaagagcgaccccaatcagcatctgaccatcatacaggatcccgaataccgccgattcggctgcacggtggacatgaacatcgcacttactacttttattccccatgacaagggacccgccgcaatcgaagaatgctgtaattggttccacaagaggatggaggaacttaatagcgagaagcatcgcttgattaattaccaccaggaacaggccgtgaattgtctactgggaaatgtgttttatgaaagattggccggtcatggccctaagctggggcctgtgacacgcaaacatccccttgtaacaagatacttcacgtttcccttcgaggaaattgatttttctatggaggagtctatgatccacctgcccaataaggcctgtttcctcatggctcataatggttgggtgatgggcgacgatccactaaggaacttcgccgaaccgggatccgaggtttacctgcggagggagctgatctgttggggagatagtgtgaagctacgctatggcaacaaacccgaagactgtccctacctttgggctcatatgaagaagtatacagagattactgctacatattttcaaggagtcagattggataattgtcacagcacgccactccacgtagccgagtacatgctggacgcagctcgaaacctgcagcccaacttgtacgttgtggcagagctgtttaccggctccgaggatttggacaatgtctttgtgacccgcttaggaatttcctctctcatcagagaagcgatgtccgcgtataactcccacgaggaggggaggctggtgtaccggtacggtggggagcccgtggggtcctttgtccagccctgcctccggccactgatgccagcaatcgcacacgctctgtttatggacataacccatgacaacgaatgtccaatcgtgcacagatcggcgtacgatgccctgcccagtaccactatcgtgagtatggcctgctgtgcatccgggtctactcgcgggtacgatgaactcgtccctcaccagatcagtgtcgtgtcagaggagagattttatactaaatggaatcctgaggcactcccctcaaataccggcgaagtaaatttccagtcaggcatcatagcagctagatgtgccatcagcaagttgcatcaagaactgggcgcaaaaggcttcatccaggtttacgtggatcaagtagacgaggatattgtcgctgtaacccgacactcaccttctatccatcagagtgtagtggcagtatcacgaacagcttttagaaatcccaaaacctctttctattctaaagaagtgccccaaatgtgtatcccaggaaagatcgaggaagtggtcttggaggcccgaactatcgagaggaacacaaaaccgtaccggaaggacgagaacagtatcaacggtacccccgacataactgtggaaatccgggagcatattcagcttaacgaatctaagatagtgaagcaggcgggggtcgccaccaaggggccaaacgagtatatccaggagatcgagtttgaaaatttatcgccgggctccgtcattatattcagggtgtcattggatcctcatgcgcaggtggccgtaggaatccttaggaaccatctcacgcagttctcaccccatttcaaatccggaagtttggcggtggacaatgccgatcccatcctcaagataccgtttgctagtctggcgtcgaggcttactctcgccgaactgaatcaaatcttgtacaggtgtgaaagcgaggaaaaggaggatgggggcggttgttacgacattccaaactggagcgcgctcaagtacgcaggattgcagggcctcatgtcagtgctcgccgagatccgcccaaaaaatgatcttggtcatccattttgcaacaacctgcgaagtggagattggatgatcgattacgtgtccaaccgccttatcagccggagcgggacgatcgccgaggtaggaaagtggctgcaggccatgttcttctatcttaagcagattccgcgctatctgattccatgttatttcgatgcaatactgatcggagcatacactaccttgctggatactgcgtggaagcagatgagcagtttcgtgcagaacggctcgacctttgtgaaacacctgagcctggggagtgtccaactctgtggcgtcggaaagtttccttccctgccaatcctgtcacctgccctcatggatgtcccttatcggctgaatgaaataacaaaagagaaggagcagtgctgtgtcagcctggccgccgggcttcctcacttttcctccgggatatttcgatgctgggggcgagatactttcattgcactgagggggattctgctcataactggccgttacgttgaagcccgcaatattatcctggcatttgctggaacgctgagacacggccttatacctaatctgctcggtgaaggtatctatgctagatataactgtagggatgcagtatggtggtggctccagtgcattcaagattactgcaagatggttcctaacggcctcgatatcctcaagtgcccagtttctaggatgtaccctacagatgactccgctcccctgcctgcgggcacactagaccagccactcttcgaggtaattcaggaagcgatgcaaaagcatatgcaggggatccagttccgtgagagaaacgccgggcctcagatcgacagaaacatgaaggacgaaggatttaacattacggcaggagttgatgaagagacaggcttcgtttacgggggcaatagatttaactgcggtacatggatggataaaatgggagagtctgatagagctagaaacaggggaatccctgcaactccacgtgatggctccgccgtcgagatagtggggcttagtaagtctgcagtgagatggctcctcgagttgtctaaaaagaatatcttcccataccatgaagtaactgtcaaacgccacggcaaagccatcaaagtctcatatgacgaatggaatagaaagatccaggataatttcgagaaactgtttcacgtaagcgaggatccaagtgacctcaacgaaaaacaccctaacttagtgcacaagcggggcatctacaaggattcttacggggctagcagcccgtggtgtgattaccagttgcggccaaattttaccatagcaatggttgtcgcccctgaactgtttacgaccgagaaagcctggaaggccctcgaaatcgcagaaaagaagttactgggcccactgggtatgaagactctcgatccagacgacatggtgtattgcggaatctacgacaatgcactcgacaatgacaattataatctggctaaggggttcaactatcaccagggaccagaatggttgtggcccattggttactttctccgggctaagctgtacttcagcagattgatgggccctgagacgacggcgaagacaattgtactggtcaagaacgtgctctctcggcactatgtgcatcttgagcgctccccgtggaaagggctgcctgagctgacgaacgagaacgcacagtactgtccctttagttgtgagacacaggcctggtcaattgcgacaattctggagacactgtacgatctc

SEQ ID NO: 6109 - DNA, 4596 bp, synthetic construct
  misc_feature 1..4596: note = source = /note="Description of Artificial Sequence: Synthetic coding sequence"
  source 1..4596: mol_type = other DNA
atgggccactccaaacagattaggattctcctcctgaatgagatggagaaactggagaagacgctctttagactggagcagggctatgaactccagtttcggctgggcccaacgctccagggcaaagccgtcaccgtatatacaaactacccgttcccgggcgagactttcaaccgggagaagttcagaagcctcgattgggagaacccgaccgagagggaagatgattctgataaatactgcaaacttaatctgcagcaatctgggtccttccaatactactttctccagggcaacgaaaagtctgggggcggctacatcgtggtggatcctatactcagagtgggagcagataatcacgtgctgccccttgattgtgtgaccctccagaccttccttgctaagtgcttgggaccgttcgatgaatgggaatcaaggcttagggtggccaaggagtcaggatataatatgattcactttacgccactgcagacactgggacttagcagatcttgctattctttggcaaaccagctggagttgaacccagattttagccggcccaatagaaaatatacctggaacgatgtgggccagctggtggagaagctgaaaaaagagtggaatgttatctgcatcactgacgtggtgtacaaccacaccgcagccaattctaagtggattcaggagcatccagaatgtgcctacaacctggtaaacagccctcacctcaaacctgcctgggtgttggacagggcgttgtggaggttcagctgcgacgtcgctgaaggcaaatacaaggagaaaggcatccctgcattgattgaaaatgaccatcatatgaactcaatcagaaaaatcatctgggaggatatcttcccaaagcttaaactgtgggagttcttccaggtcgatgtgaataaggcagtggagcagttccggagacttctgacccaggaaaatagacgcgtgaccaagagtgacccaaatcagcatctgaccatcattcaagatcctgaataccggcgatttggttgcaccgtggacatgaacatcgcccttacaacctttatcccgcatgataaaggacctgcagctattgaggagtgttgcaactggttccacaaacgcatggaagaactgaattccgagaagcatagacttattaactatcaccaggaacaagccgttaactgtttgctggggaacgtgttctacgagcggctggccggacacgggcccaaattgggaccagtgactaggaagcacccgctggtgacgaggtacttcacttttcctttcgaagagatcgacttttctatggaagaatccatgatccacctgcccaacaaggcctgctttcttatggcacataacggttgggtcatgggagacgatcccttgcgcaacttcgcagaacccggttccgaggtgtacctgagaagagaactgatttgttggggtgactctgtgaaactgcgatacggtaataaacctgaggattgcccctatctgtgggcccacatgaaaaagtacacagagattaccgcaacttacttccagggggtacgcctggacaattgtcacagtaccccgctgcacgtggcggagtatatgttggacgcggcgcgaaatctgcaaccaaatttgtatgttgttgccgagctcttcactgggtccgaagacctggataatgtcttcgtaacaaggttgggaattagctcacttatcagagaggctatgtccgcttataactctcacgaggagggtcggctggtgtatcgatacggcggcgagcctgttggtagcttcgtccaaccttgtcttcgcccacttatgcctgccatcgctcatgccctttttatggacatcacccacgacaacgaatgtcccatcgttcatagaagtgcatatgacgccctgccttccacgaccatagtgtctatggcgtgttgtgctagtgggtccacacggggctatgatgagctggtcccccatcagatttccgtggtgagtgaagagaggttttacacgaaatggaatcccgaagccttgccttcaaatacaggtgaggtgaactttcagtcaggtataattgcggcccgatgtgccattagcaagctccaccaagagctcggagccaaagggttcatccaggtatatgtggaccaagtggatgaggatattgtagccgtgaccaggcattctccatctatccatcagagtgtagtggccgtgagcaggaccgccttccgcaacccgaagacttcattttatagcaaggaagtgccacagatgtgtatcccaggtaaaattgaagaggtggtgttggaagcccgaaccatagagcgaaatactaaaccttacaggaaggatgagaactccatcaacggcactcctgatattactgttgaaatccgcgaacacatacagcttaatgaatccaaaatcgtcaagcaggctggagttgcaacaaaaggaccgaatgagtacattcaggagatcgagtttgaaaatcttagtcctgggtctgtcatcatcttccgcgtgtccctggacccacacgctcaggtggccgtaggaattctgcgcaaccacctgacgcaattcagccctcacttcaagagcggatcactggcagttgataatgctgacccaatcctgaagataccctttgctagcctggcctccagactgaccctggccgagctcaatcagatcttgtaccgctgtgaatcagaagagaaggaagatggtggcggctgttacgacattccgaactggagcgccctgaaatacgcagggctgcaaggactgatgtccgtcctcgcagaaattcgccccaagaacgacctgggccaccctttctgcaataatctccgcagtggcgattggatgatcgactacgtctccaatcggctcatttcccgatcaggcacaattgccgaagtagggaagtggctgcaagcgatgtttttctaccttaaacagataccgagatatctgatcccatgctatttcgatgctatactgatcggcgcctatacaacgctcctggacactgcatggaaacaaatgagttcatttgtgcagaacgggagcaccttcgtcaaacacctttctcttgggtctgtgcagctgtgcggtgtgggcaagttccctagcctcccaattctctcacctgcactcatggatgttccatacagattgaatgagataacaaaggagaaggaacaatgttgtgtatccctggcggctggcctgccacacttttcttctggcatttttcgctgttggggtagggacacatttattgcccttcggggaattctcctgatcaccggacgctacgttgaagcacgcaatataattttggctttcgccggaactctccggcatggactcattccaaacctgctgggagaaggaatttacgctcgatataattgccgcgacgccgtctggtggtggctccagtgcattcaggactattgtaagatggtccccaacggccttgacatcctgaagtgtcccgtgtcccggatgtatccaaccgatgactccgcccctctgcctgctggcacattggatcagcccctgttcgaagtgatacaggaggcgatgcagaagcacatgcagggtattcagtttagggagaggaacgccgggcctcagatcgataggaatatgaaagacgagggatttaacattacagccggggtagacgaggagacaggattcgtgtacgggggcaacaggttcaactgtggcacctggatggataaaatgggagagagtgaccgagctcgcaaccgcggtattccggcaactccaagagatggcagcgccgtcgagattgttggattgagcaagtcagctgtgcggtggctgctcgagctttctaagaagaacatattcccctatcatgaagttacagtgaaaagacacggaaaagctataaaggtctcttacgacgagtggaatagaaaaatccaggataatttcgaaaagctgtttcacgtctctgaggacccatctgacttgaacgaaaaacaccccaatctcgttcacaaacgcggcatctacaaggacagctacggagccagctctccctggtgcgattaccagctgcggcccaattttaccattgcaatggtggttgccccagaattgtttacaacagaaaaggcatggaaggctcttgagattgctgagaaaaaacttctgggcccgcttggtatgaagacgctcgacccagatgatatggtgtattgtggcatctatgataacgctttggataacgataactataatcttgctaagggctttaattatcaccaaggccccgagtggctgtggcccatcgggtatttcctgagggcaaagctctacttcagccgccttatggggcccgaaaccactgcaaagactatcgttctggtgaagaatgtgctgtccagacattatgttcacctcgagagatcaccttggaagggactccccgagcttactaacgagaatgcccagtactgtccattctcctgtgaaactcaggcgtggtctatcgccacaatcttggaaaccctgtacgatctg

SEQ ID NO: 6110 - DNA, 4596 bp, synthetic construct
  misc_feature 1..4596: note = source = /note="Description of Artificial Sequence: Synthetic coding sequence"
  source 1..4596: mol_type = other DNA
atgggccatagcaaacagatccggatattgctgctcaatgagatggaaaagcttgagaagaccctttttcgactggagcaggggtacgagctgcagtttaggctgggtccaaccttgcagggtaaggcagtgactgtgtacaccaactaccctttcccgggtgagactttcaacagagaaaagtttcgctctcttgactgggagaaccctactgagagagaagatgacagcgacaagtactgcaagctgaacctccagcagtcaggctcttttcagtactattttctgcagggtaatgagaagtcaggaggaggctacatagtcgtggaccccatcctccgggttggcgccgataaccacgtactgccactagactgcgtcacacttcagaccttcctggcaaagtgtctgggccctttcgacgaatgggagagccgcctcagggtggctaaggaatctggatacaacatgatacattttacccccctgcagacactaggtctgtcccggagctgctactcattagccaatcagctcgagctgaaccccgacttcagtagaccgaatcgaaagtacacatggaacgacgtcggacagctcgttgagaaactgaagaaggagtggaatgtgatttgtatcactgacgtcgtttataaccacactgctgccaactccaaatggatccaagaacatcccgaatgcgcatataatctggtgaattcgccccacttaaaaccagcgtgggtgctggaccgcgccctttggcggttctcctgcgacgttgccgaggggaaatacaaggaaaaaggaatccctgctctcatagaaaatgaccaccacatgaattccatcaggaagataatctgggaggacatcttccccaaactcaagctatgggagtttttccaggtggatgtgaataaggctgtggaacagttccgccgactcttgactcaagaaaaccgcagagtgaccaagtccgatccaaaccagcatcttaccattattcaagatcctgaatatcgcaggttcgggtgtactgtggatatgaatatagcactcacaactttcattcctcacgacaagggaccggctgcaatcgaagaatgctgcaattggtttcacaaaagaatggaggagctgaatagtgagaagcatcgattaattaactaccatcaagagcaggccgtcaattgtctcctaggcaacgtgttttatgaacgacttgcgggccatggacctaagttaggaccggttacccgcaaacaccctttagtaacaagatactttaccttcccttttgaagagatcgacttttcgatggaagagtccatgatccaccttcccaataaggcatgtttcttaatggctcacaacggctgggtcatgggggacgatcccctgagaaacttcgcagaacccggatctgaagtgtaccttcggagagagttgatttgttggggggattcagtgaaactgaggtatggtaataagcctgaggattgtccttacttgtgggcacacatgaagaaatacactgagatcactgccacctatttccagggtgtcaggctggacaattgtcactcaacaccattacatgttgctgaatacatgctggatgcggctcgaaacctgcaacctaatctctacgttgtggcagagttgtttacagggagtgaagacctagataacgtttttgtgactagactaggtatctcatcactgatccgcgaggctatgtctgcctacaacagccacgaggaaggaaggttggtttaccggtatggtggggagcctgtgggctcctttgtgcagccatgcttacggccactgatgccggcgatagcgcacgccctgttcatggacattacacatgataacgaatgtcccatagtacatagaagtgcttatgacgctcttccctctaccaccatagtttccatggcttgttgtgcaagtgggagtacgagggggtacgatgagctcgtaccacaccagatatcagtcgttagcgaagaacgattttacaccaagtggaacccggaggctttgccaagtaacactggcgaggtgaattttcagtcgggcattatcgccgcacgatgtgccatttctaagctgcatcaggagttgggcgctaagggatttatccaggtgtatgttgatcaggtggacgaggacatcgtggccgtcacacgccacagcccgagcatccatcagagcgtggtggccgtatcccgtaccgccttccgaaacccgaaaacctctttctactctaaggaagtgcctcaaatgtgtatcccgggcaagatcgaagaagtggtcctggaggcccggacaattgaacgcaatacaaagccataccgaaaagacgaaaactcgattaacggcacgccggatatcaccgtggaaatacgagagcacatccagcttaacgagagtaaaattgtgaagcaagccggagtggcgactaaaggtcccaacgaatatatacaggagatagagttcgaaaatctgtccccgggcagtgtgataatctttagagtgtcactcgatccacacgcccaggtggccgtaggcatcctgagaaaccatcttactcagttttcccctcatttcaaaagcgggtcactggcagtggataatgcagaccccatccttaagatcccttttgcttcactggcgagccgcctgaccctcgccgaattgaatcagatcttgtatcgatgtgaatccgaagagaaagaggatggcggaggttgttatgacatccccaactggtctgcgctgaaatatgcagggctccaaggcttgatgtctgtcctggcagagatcagacccaaaaatgatctgggacatcctttctgcaataatttgagatccggagactggatgatagattatgtaagtaatagacttatcagccggtctggaacgatcgctgaggtaggaaagtggctgcaggctatgtttttttacttaaagcaaatcccccgttacttgatcccatgctattttgacgccatcctgataggcgcttataccactctgctggacacagcctggaaacagatgagctcctttgtgcagaatggaagtacctttgtcaagcacttgtcactgggttctgtgcagctttgcggggtgggcaagtttccctctttgcccattctgtccccggcattgatggacgttccctatcgcctcaacgagattacgaaggagaaagagcagtgctgcgtgtctttggcggctgggctgccccacttcagcagcggcatctttcgatgttggggcagagacacattcatcgctctcagggggatcctcctcattactggacgctatgtggaggcacgaaacatcatattggcgtttgcaggcacattgcgtcacggtctgatccctaacctgttgggcgaagggatttatgcccgctacaattgccgggacgcggtgtggtggtggctccagtgcatccaggactactgcaagatggtgccaaacggacttgacatccttaagtgcccagtgtcacgcatgtaccctaccgacgactccgcaccgctgcctgccggcactcttgaccagcctctgttcgaggtgatccaggaggcgatgcagaagcatatgcaggggattcaatttcgggaaaggaatgcaggtccccagatcgaccgcaacatgaaggacgaggggtttaacatcactgccggagtcgatgaggagacaggatttgtttatggggggaaccgctttaactgcggtacctggatggataaaatgggcgaaagtgacagagccagaaatagaggaattccagccacccctcgcgatggctcagccgttgagattgttggactatccaaaagcgccgtcaggtggttattagagctgagcaaaaaaaacatctttccctatcacgaagtgacagtcaaacggcacggtaaggctatcaaagtgtcctatgacgagtggaacagaaagattcaggacaatttcgagaaactgtttcacgtcagtgaggacccaagcgacttaaacgaaaaacatccaaatctggtccacaagcgtggaatctacaaggacagttacggcgctagtagcccctggtgtgactatcagctcagaccgaattttacaatcgccatggtggtggcccccgagctttttacgacagagaaggcttggaaagctctggagatcgcagaaaaaaagctcctgggtccactggggatgaaaacactagaccctgacgacatggtgtactgtggaatctacgacaacgcgcttgataatgataattacaacctggctaaggggtttaattaccaccagggcccggagtggctgtggcccatcggctacttcttgcgggccaagttatatttctctaggttgatgggtccagagactaccgccaaaacaatcgtgctagtcaagaacgttctgtcacgacactacgtccacttagagcggtccccctggaaaggcctccctgagttaaccaatgaaaacgcacagtattgtccattctcctgtgaaacccaggcctggtctattgccaccatcttggagacactgtacgatttg

SEQ ID NO: 6111 - DNA, 4596 bp, synthetic construct
  misc_feature 1..4596: note = source = /note="Description of Artificial Sequence: Synthetic coding sequence"
  source 1..4596: mol_type = other DNA
atgggtcacagcaagcagatcagaatccttctgctgaacgagatggaaaagttggaaaagactctgttccgattggagcagggctacgagctgcaattccggctgggtccgaccctccaaggaaaggcggtcactgtgtacaccaattacccgtttccaggagaaactttcaacagagagaagttccgctccctggactgggaaaacccaactgaacgcgaggacgacagcgacaagtactgtaagctcaacctgcagcagtcaggttcgttccagtactacttcctgcaaggaaacgagaaaagcggcggaggctacatcgtggtggatccgatcctgcgagtgggagcagataaccacgtgctgccgctggactgtgtgacccttcagaccttcttggcgaagtgtttgggaccattcgatgaatgggaaagccgcctcagagtggccaaagaatccgggtacaacatgattcacttcactccgctgcaaaccctgggcctgtcgcgcagctgctactcactcgccaaccagttggaactcaatccggactttagccggccgaaccgcaagtacacctggaacgatgtgggacagttggtggagaagctgaagaaagagtggaatgtgatctgcatcactgacgtcgtgtacaaccatactgccgccaattcaaaatggatccaggaacaccctgaatgcgcatacaacctcgtcaacagcccacatctcaagccagcttgggtgctggatcgcgcgctttggaggttctcatgcgacgtggccgagggcaagtacaaggagaagggcattcctgctctgatcgaaaatgatcatcacatgaacagcattcgtaaaatcatctgggaggacatcttccctaagctgaagctctgggagttctttcaggtggacgtcaataaggctgtggaacaattccggcgcctgctgactcaggaaaaccgccgggtcactaagtccgacccgaaccagcatctgactataatccaggatcccgagtaccgcaggtttggttgcactgttgacatgaacattgcactcaccacttttatccctcacgacaaaggaccggccgcgatcgaagagtgttgcaattggttccataagcgcatggaggagctgaactcggagaagcaccgcctgatcaattaccatcaggagcaggccgtcaactgcctcctggggaacgtgttctacgagcgccttgccggtcatggaccgaagctgggcccggtgactcggaaacacccactggtgaccagatacttcactttccctttcgaggaaatcgacttttcgatggaggaatcgatgattcatctcccaaacaaggcgtgcttcctgatggctcacaacggatgggtgatgggagatgacccgctgagaaatttcgctgagccaggcagcgaagtgtacctgaggcgcgaattgatctgctggggagatagcgttaagctgaggtatggaaacaaaccggaggattgtccatacttgtgggcacacatgaagaagtacactgagatcactgcaacttacttccagggagtgcgcctggataattgccactcaactccgctccacgtcgcggaatacatgttggacgcggcgcgaaacctgcaaccgaacctctacgtggttgccgagctgttcaccggttcagaagatcttgataacgtgttcgtcactcgcctgggaatctcctcactcatcagagaggcaatgtcggcgtacaattcccacgaggaaggtagacttgtgtacagatatggcggagaaccggtgggttcgtttgtccagccgtgcctccggcctcttatgccagccatcgcacacgcacttttcatggatatcacccatgataatgaatgcccgatcgtgcatagatctgcgtatgatgcgctcccgtctaccaccatcgtgagcatggcgtgctgcgcgtcgggatccactagaggatacgacgaacttgtgccacaccaaatctccgtcgtgtccgaggaacgcttttacactaagtggaatcctgaggccctgccatccaataccggagaggtgaacttccaatcgggaatcattgcggcgcgttgcgcaatcagcaagctgcatcaggaactcggagccaagggattcatccaagtctacgtggatcaggttgatgaggacatcgtggcagtgactcgccactcaccatccatccaccagtccgttgtcgcagtcagtcgcaccgcgttccgcaatcctaaaacctcattctacagcaaggaagtgccccagatgtgcatcccaggaaagatcgaagaagtcgtgctcgaagctcgcactatcgaacggaacactaagccttatcgcaaggacgagaacagcatcaatggaacgccagacatcaccgtggaaatccgcgaacacatccaacttaacgagtcaaaaatcgttaagcaggcaggagtcgcgactaagggaccaaacgagtacatccaggagatcgagttcgaaaatctctcgccaggcagcgtcatcatcttccgggtatcgttggatccgcatgcccaagtggcagtcggtatcctgcgcaaccatctgacccaattctcgcctcatttcaaatcgggaagcctggcggtggataatgccgacccaattctgaagatcccgttcgcctccctggcgtcacgcctgactctggcggagttgaatcagatcctgtaccgctgtgagtccgaagaaaaggaggatggaggaggttgctatgacatcccgaactggagcgcactgaagtacgccggactgcagggcctgatgtccgtgctggccgagatccgaccaaagaacgacctggggcaccctttttgtaacaacctcaggtcaggcgattggatgatcgactacgtgtcgaatagactcatatcacgttccggaactatcgccgaggtgggtaaatggctccaggccatgttcttttacctcaaacagatcccgcgctaccttatcccatgttacttcgacgcgatcctcattggagcatacaccacgttgctcgacactgcatggaagcagatgtcctcgtttgtgcagaacggatcaaccttcgtgaagcacttgtcgttgggctcggtccaactctgcggcgtcggcaaattcccttccttgccgatcttgtcgcctgctctgatggatgtgccgtacaggctcaacgaaatcaccaaagagaaggagcagtgctgcgtgtccctcgcggccgggctgccacacttttcgagcgggatcttccgatgctggggaagagatacgtttattgctctgcgagggatcctcttgatcactggcagatacgtcgaggccagaaatatcatcctggccttcgcgggaaccctccgccacgggctgatcccaaatcttctcggcgagggaatctacgccagatacaactgccgcgatgccgtgtggtggtggctgcagtgcattcaggactactgtaagatggtccctaacggactcgacatcctgaagtgccccgtctcaaggatgtacccaactgacgactcggcaccactgcccgccggcaccctggaccaaccccttttcgaagtgatccaggaggctatgcaaaagcatatgcagggcattcagttccgggaacgcaacgcaggcccgcaaatcgatagaaacatgaaggacgagggattcaacatcactgctggagtggacgaagagactggctttgtgtacggaggcaacagattcaactgcggaacttggatggataagatgggcgaatccgatagagcccggaatagaggaattccggccaccccaagagacggaagcgccgtggaaatcgtaggcctctcgaagagcgcggtgcggtggctcctcgagcttagcaagaagaatatctttccgtaccatgaagtcacggtgaagcgccacggaaaggccatcaaggtgtcttacgacgaatggaatcgcaagatccaagataactttgaaaagctcttccatgtgtcggaggacccgtcggacctgaacgagaagcatccgaatcttgtccacaaacggggaatctacaaggacagctacggtgcgtcctcgccgtggtgcgattaccaactcagaccaaatttcacgatcgccatggtcgtggcgccggagctctttacgaccgagaaagcctggaaggccctggaaatcgccgaaaagaaactccttgggccactgggaatgaaaaccctggatccagatgacatggtgtactgcggtatctacgataatgctctcgataacgataactataacctggccaaggggttcaactatcatcagggtccagaatggctgtggccgatcggatatttcctgcgggctaagctgtacttttcgagactgatgggtcctgaaaccacggccaaaaccatcgtgctcgtcaaaaacgtcctgtcgcggcactacgtccacctggaacgctcgccatggaagggactccccgaactgactaacgaaaacgctcagtactgccccttttcctgcgaaacccaggcatggagcatcgccactatcctggaaactctctacgacttg

SEQ ID NO: 6112 - DNA, 4596 bp, synthetic construct
  misc_feature 1..4596: note = source = /note="Description of Artificial Sequence: Synthetic coding sequence"
  source 1..4596: mol_type = other DNA
atgggtcactccaaacagattagaatcctgctgctcaacgaaatggagaagctggaaaaaaccctctttagactggagcagggatacgaactacagttccgcctgggccctaccctgcaaggcaaggccgttacagtgtacacaaactacccctttcccggcgagacatttaaccgcgagaagtttcggtctttggattgggagaaccctaccgagcgggaggacgatagcgacaagtactgtaagctgaacctgcagcagagtggctctttccagtactacttcctgcagggcaatgagaaaagcggcggtggctatatagtcgtggaccctatattgagagtcggcgccgacaatcacgtgctgcccttagactgtgtgactcttcaaacttttctggctaagtgcctggggcctttcgacgaatgggaaagccggctccgcgtcgccaaggaatctgggtataacatgattcacttcacaccattacagaccctcggcctgtctcgctcctgctattctttagctaaccaactggaattaaatcctgacttctcccggccaaaccgcaagtatacatggaacgacgtgggacaactagtggagaagctcaagaaggagtggaatgttatttgtattacagatgtcgtgtacaaccacacagccgccaattctaaatggatacaagagcatcccgagtgcgcttataatctggtgaattctccccacctgaagccagcatgggtcctggatcgcgcactttggaggttctcatgcgacgtggctgagggtaaatacaaagagaaaggcatccctgcactgatagagaatgatcatcacatgaactctatcaggaaaattatctgggaggatatctttccaaagctgaaactgtgggagttttttcaagtggatgtcaataaagccgtcgagcaatttagaagactgcttacccaggagaacaggcgagtcaccaagtccgatccaaaccagcatctgaccatcattcaggatccagagtaccggcgatttggctgtactgtggacatgaatatcgcactgaccacatttattccacacgataaaggcccagcagcaattgaagaatgctgtaactggtttcacaagcggatggaagagctaaacagtgagaaacacaggctgatcaactaccatcaggaacaagccgtgaactgcctcctcggcaacgtattctatgaacggcttgccggtcacggcccaaagttagggcccgtgactcgaaaacaccctttagttacacgctacttcacatttccttttgaagagatagatttctctatggaggagtctatgatccacctgcccaacaaggcttgcttccttatggcacataatgggtgggttatgggggacgaccccctgcgaaatttcgccgagcccgggagcgaagtgtatttgaggagagaactgatctgttggggtgactcagtcaaactacggtatgggaataagcccgaggactgcccttatctctgggcacacatgaagaaatatactgagattactgccacctatttccaaggcgtccggctggataactgccattcaaccccactacatgtagctgaatacatgctagacgccgccaggaatctgcagccaaatctctacgtggtagcagaactgttcactggctccgaagatcttgataatgttttcgttaccaggttaggaatatctagtttaatccgcgaagcaatgtccgcctataactctcacgaggagggaaggctggtttatcggtacggaggggagcctgtggggtccttcgtgcaaccatgtctgcggccgctgatgcctgccatagcccatgctctctttatggatataactcacgataatgagtgcccaatcgtgcacaggtctgcatatgatgctctcccctccaccaccattgtttccatggcctgttgtgcatctggttctacaagaggttacgatgagctcgttcctcatcagatttcagtggttagtgaagagcggttttacaccaaatggaatccagaagcactgccatccaacaccggcgaggttaattttcagagtggcatcatcgcagcacgatgcgccattagcaagctccaccaagagctcggcgcaaagggcttcattcaagtgtacgtggaccaggtcgacgaagacatcgttgcagttactcgccatagcccctccatccatcagagtgtggtggcagtgagccggaccgccttcagaaatcccaagaccagcttctatagtaaggaagtaccacaaatgtgtatccctggaaaaattgaagaggttgtgctggaggccaggactattgaaaggaacaccaagccataccggaaggacgagaattctatcaatgggactccagatattactgtagagattcgcgaacacattcagctgaacgagtcaaagatagtcaaacaggctggggtagccaccaaaggcccaaacgaatacatccaggagatcgagtttgagaacctgtctcctggttccgtcataatattcagagttagcctggacccccacgcccaagttgcagtcggaatcttacgtaatcacctgacacagttctcaccacacttcaagtctggaagtctggccgttgacaacgccgatccaatactgaaaataccctttgcttccctggccagcagactcacccttgcagagttaaatcaaatactgtacagatgcgaatccgaagaaaaagaggacggggggggatgttacgacatccctaactggtcagctctcaagtacgctggtcttcaaggactgatgtccgttctggccgagataaggccaaagaacgatcttggccaccctttttgcaataacctgagatctggcgattggatgatcgattacgtgagcaacagattgatttctcggtctgggaccatagccgaggtggggaagtggctccaggcaatgtttttttacttgaagcagattccaagatacttaataccatgttatttcgatgctattctcataggcgcttataccactctgctcgatacagcatggaagcaaatgagttctttcgtgcagaatggttccacctttgtcaaacacctgagcctgggcagcgttcaattgtgcggtgttggaaagttcccctctctgccaattctgtccccagcactgatggatgtgccttacaggctgaacgagataacaaaagaaaaggagcagtgctgcgttagcctagccgccggattaccacacttttcttcaggcatttttaggtgttggggcagggataccttcattgccctgcggggcattttactgatcacaggacgctatgtcgaagctcggaacattatcctggccttcgccggaacattaaggcacgggctaatacctaatctgctgggtgaggggatttatgcccgctacaattgtcgcgacgccgtctggtggtggttacagtgcatccaggactattgtaaaatggtgcccaacgggttggacatactaaagtgccccgtgagtagaatgtaccctacagacgacagcgcccctctgcctgcaggcactctggaccagccgttattcgaagttatccaagaggctatgcagaagcatatgcagggcattcagtttcgcgaacgcaacgccggacctcagatagatcggaacatgaaagacgagggcttcaacatcaccgctggggttgacgaagagaccgggtttgtgtatggagggaatcggtttaactgtggcacatggatggataagatgggcgagtccgatcgggcaaggaaccgaggcataccagctacccctagggacggaagcgctgtcgaaatagttgggctgtccaaatctgccgtaagatggctccttgagctgtctaagaaaaacatattcccataccacgaggtgacagttaaacgacatggtaaagccattaaggtatcttatgatgagtggaatcgcaagattcaagataacttcgagaaactattccacgttagcgaggaccccagtgatttaaacgagaagcatccaaatcttgtccacaagaggggcatttacaaagattcctacggggcatcttcaccctggtgcgattatcagctgcgccctaactttactattgcaatggtagttgcaccagagctctttacaacagagaaagcttggaaggccctggagatagctgagaagaagttactgggaccactgggaatgaagactctggacccagatgatatggtctattgcggcatctacgacaatgctctagacaatgataactacaacctggccaaaggcttcaactatcaccaaggccctgagtggctgtggcccataggctacttcctgagagccaagctgtactttagcaggctaatgggtccagagacaactgcaaagaccatagtgctcgtgaagaatgttctaagcagacattatgttcacctcgaaagaagtccttggaagggcctgccagagttaaccaacgaaaatgctcagtattgtccattttcttgtgaaactcaggcttggtccatcgccacaattctggaaaccctgtacgacctt

SEQ ID NO: 6113 - DNA, 4596 bp, synthetic construct
  misc_feature 1..4596: note = source = /note="Description of Artificial Sequence: Synthetic coding sequence"
  source 1..4596: mol_type = other DNA
atgggtcacagtaagcaaattcgcattcttctgcttaatgagatggaaaaactggaaaaaaccctttttcggcttgaacaggggtacgagctgcaattcagacttggacccacgttgcagggaaaggcagtgactgtctacaccaattaccccttccctggagaaacgtttaatcgggagaagttccgctcacttgactgggaaaatccaaccgaaagggaagatgacagcgacaaatactgtaagctgaaccttcagcaatcggggtcctttcaatactactttcttcaaggaaacgaaaagtccggaggaggctacatcgtggtagatccgattcttagagtgggagcggataatcatgtcctgccacttgactgtgtgactctccaaaccttcttggcaaagtgtctgggcccctttgacgaatgggagagccgccttagagtggcaaaggaatcgggttacaatatgattcactttacccctttgcagactctcgggctgtcacggtcgtgttactccttggcgaaccaactggagcttaatcccgattttagccgcccaaataggaagtatacctggaacgatgtcgggcagttggtggaaaaacttaagaaagagtggaatgtgatctgcatcaccgacgtggtgtacaaccataccgccgcgaacagcaagtggatccaagaacatcctgaatgcgcatacaacctcgtcaatagccctcacctgaagcctgcatgggtcctcgatcgagcgctctggcgtttttcctgtgatgtcgcggaaggaaagtacaaggaaaagggtattccggcacttattgaaaacgaccatcatatgaattctatccgcaagattatctgggaggacatcttccccaaacttaagctgtgggaattcttccaagttgatgtgaataaggcagtggaacaatttcgccgccttttgacccaagaaaacaggcgcgtcacgaagagcgatcctaatcagcacctcactataatccaagaccccgagtaccgccgtttcggttgtactgtggatatgaacatcgctctgaccacctttattccacatgacaagggacctgcagcaatagaggaatgttgcaattggtttcataagcgcatggaggagcttaactctgaaaagcatcggctgatcaactaccaccaggagcaggccgttaactgccttctcggaaacgtgttttacgaacgcctggctggacacggacctaaattgggacctgtgactcggaagcaccctctcgtgaccagatactttactttcccattcgaggaaattgatttctctatggaagaatccatgatacatctcccaaacaaggcatgctttcttatggcgcacaacggatgggtgatgggcgatgatccactgcggaactttgcggagccaggatccgaagtgtatctgcgtcgtgaactcatttgctggggtgactcagtgaagctccgttacggcaacaagcccgaggactgtccgtacctttgggcccatatgaagaagtacactgagattaccgcaacctacttccaaggggtccggctggataactgtcattcaacccctctccatgtggcggagtatatgctggatgccgcaagaaacctccaacctaacctgtatgtggtcgcagaactttttactggatcggaagatctcgataacgtgttcgtcactagacttggtatttcaagtcttatccgggaagcaatgagcgcctacaacagccacgaggaagggcgactggtgtacagatatgggggtgagcctgtcggatcgtttgtgcaaccatgtctccgaccacttatgcctgcaatcgcccacgccttgtttatggatattacccacgataacgaatgcccaatcgtgcatcggtcagcctacgatgcgctgcctagcactaccattgtgtcgatggcatgctgtgcatcgggcagcactagaggctacgatgaacttgttccgcatcagatcagcgtggtgtccgaagaaagattttacactaaatggaacccagaagcactgccatcgaacacgggggaggtcaactttcaatcaggaatcattgccgctcgatgcgcaatctcgaaactccatcaggagcttggagcaaagggctttattcaagtctacgtggaccaagtggatgaagatattgtcgcggtcaccagacacagcccatccattcatcaatcagtggtggctgtctcgagaactgcatttcgaaaccctaagacttcattctattccaaggaagtccctcagatgtgtattcctggcaagatagaggaagtggtactcgaggcgaggaccattgagcgcaacaccaagccatatagaaaagacgaaaatagcattaacggaactccagatatcaccgtcgagattcgtgagcatatccagctcaacgaatctaagattgtgaagcaggcgggagtggcaactaagggccctaacgagtacattcaggaaatagaatttgaaaatctctcccctggatcggtgatcatatttcgggtgagcctcgatccccatgctcaagtggcagtgggtatcctcaggaatcacctgacccagttttccccccatttcaagtcaggcagcctggctgtggacaatgcagatccaatcctcaagataccatttgcaagtctggcgtcgagactgaccctggcagaactgaaccaaatcttgtataggtgtgaatcagaagaaaaagaagatggtggtggttgctacgatattcctaactggtcggcacttaagtacgcagggcttcagggattgatgtctgtccttgccgagattcggcctaagaatgatctgggccatcctttttgtaataacctgagatcaggggactggatgatagattacgtgtcaaacaggcttatctcacggtcaggaactatagcagaagtcggcaagtggttgcaggctatgtttttctaccttaagcaaatccccagatacctgattccatgttacttcgacgctatcctcattggcgcttacactaccctcctcgataccgcctggaaacagatgagttcgttcgttcagaatggcagcaccttcgtcaaacatctctcgctgggatcggtccagctctgcggagttggtaagttcccatccctgcctatactttcgccggcactcatggacgtgccataccggcttaatgaaatcactaaagaaaaggaacaatgttgtgttagccttgcagcaggtttgccccatttctcatcaggaatctttcgctgttggggtagagatactttcatcgcactcagaggcattctccttattactggacggtacgtggaagcaaggaatatcattttggcctttgccggtacgctccgacatggcctgattcctaacctcttgggtgagggaatctacgcacgctacaattgccgcgatgcagtgtggtggtggctccaatgtatccaggattactgtaaaatggtccctaatggactggatattctcaagtgtcctgtatcacgtatgtacccaaccgatgattccgcaccgcttccggcgggcacccttgatcaaccgcttttcgaagtgatccaagaagccatgcagaaacatatgcagggaatacaatttcgggaacgaaacgccggcccccagatagacagaaacatgaaggacgaaggctttaacattactgcaggtgtggatgaagagacgggttttgtgtacggggggaaccgtttcaattgcgggacctggatggacaaaatgggtgagagcgatagagcccgtaatcgcggaattccggcaacccctagggacggatccgcggtggagattgtgggactgtcaaagagcgcggtccgatggctgcttgagcttagcaagaagaacatttttccttaccacgaagtgacggtgaagaggcatggcaaagcaatcaaagtgtcctacgatgaatggaatcgcaagattcaggacaactttgaaaaactttttcatgtatcggaggatccatccgacctgaatgagaaacatcctaaccttgtgcataagagaggcatatacaaagattcctacggcgcgtcctcgccttggtgtgattaccagcttagacctaactttacgattgccatggtggtggcgccagaactgtttaccaccgaaaaagcatggaaagcactggaaatcgcagagaagaagctcctgggaccgcttggtatgaaaaccctggaccccgacgacatggtgtactgtggtatttacgacaatgcgctcgacaatgacaactacaacctggctaagggatttaactaccatcaaggacctgaatggttgtggccgatcggatactttctgagagctaagctgtactttagcaggcttatgggtcctgagactactgcaaagaccattgtgcttgtgaagaatgtgttgtctcgtcattatgtgcacctggagcgttctccgtggaaaggtctgccagagctcactaacgaaaacgcccaatactgcccattctcctgtgagactcaggcatggtcgattgccactatacttgaaaccctttacgatctt

SEQ ID NO: 6114 - DNA, 4596 bp, synthetic construct
  misc_feature 1..4596: note = source = /note="Description of Artificial Sequence: Synthetic coding sequence"
  source 1..4596: mol_type = other DNA
atgggccacagcaaacaaatcagaatcttgttactaaatgaaatggagaaactggaaaagacgctgttcaggcttgagcaagggtacgaactgcagtttcgactgggacctacgctccagggaaaagcagtgaccgtgtataccaactatcccttcccgggagaaacttttaacagggagaaattccgctcgctggactgggaaaacccgaccgagagagaagatgactcggacaagtattgcaaactgaatctccagcagagcgggagctttcaatactactttctgcagggtaacgaaaagtcaggtggcggttacatcgtcgtcgatcctatcctgagagttggtgcggataaccacgtgctacctctcgattgtgttacactccagacctttttggccaagtgtctcggcccattcgacgagtgggagagtcgtctgcgcgttgctaaggagagcggatataacatgatccattttaccccgctccagacactggggctgtcgcgcagttgttattccctcgctaaccaactggaattaaacccagatttttctcgccctaacagaaaatacacctggaatgatgttggtcaactggtggagaaactcaagaaggagtggaatgtgatctgtattactgacgtcgtgtacaaccacactgctgctaatagcaagtggatccaggagcaccccgaatgcgcttataacctggttaattccccacacctgaagcccgcctgggtcctggatcgcgccctgtggaggttctcctgtgacgtggctgaaggaaagtataaggaaaaagggatcccagccctgattgagaatgatcaccatatgaacagtataagaaagatcatctgggaagatatattcccaaagctcaaactgtgggaatttttccaagtggacgttaacaaagccgtggaacagttccgaaggttacttacccaagagaaccggcgggttacaaagagcgaccccaatcagcacctgacgatcatacaggaccccgagtacaggcgattcggatgtacagttgatatgaatattgccctcactacctttattccccatgataaagggcctgcagccatcgaggaatgttgtaactggttccacaagaggatggaagaactgaacagtgaaaagcacaggctgattaattatcatcaggaacaggctgtcaactgtctcctgggcaatgtgttctatgagcgcttagccggccacgggcctaaattaggacctgtgacacgcaaacaccctctggtgacccgatactttacctttccgttcgaagagatcgacttttcgatggaagagtccatgatccacctgccgaacaaagcctgttttttgatggcgcataacgggtgggtgatgggggacgaccctttacgtaacttcgctgagccaggatccgaagtctacctgagaagggagctgatatgttggggcgactctgtgaagctccgctatgggaacaagcctgaggactgtccatacctgtgggctcatatgaaaaagtacacggaaatcacggccacttattttcagggcgtgaggctggataactgccactcaaccccgctgcacgtagccgaatacatgctcgatgccgctcggaatttgcaaccgaatctctatgtcgtggcagaattgttcaccggttccgaggatctggacaacgtgttcgttacccggctgggcatttcctcgctgatccgggaggcgatgtcagcctataacagtcacgaagaaggccgactggtttaccgatatggaggagaaccagtaggctccttcgttcagccctgtttgcgtccgctgatgcccgctatcgcacatgccctgttcatggatataacccacgacaatgagtgtcctatagtgcaccgttcggcctacgatgcgctgccttcaaccactatagtttctatggcctgctgcgcttccggtagcacccggggctacgatgaacttgttccacatcaaatatctgtggtgagcgaagagagattctatactaaatggaaccctgaagccctgccaagcaacactggggaagtcaattttcagtcaggcatcatcgcagcgaggtgtgctatatctaagctacaccaggagttgggggcaaagggttttattcaggtttacgtggaccaggtggacgaggacatcgtggccgtgacacgccacagcccttcgattcaccaaagcgtggtggctgtctctagaacagcattccgcaacccaaagacctctttttactcgaaagaggtgccgcaaatgtgtattcccgggaaaatcgaggaagtggtgttagaagcccggaccatcgaaaggaacactaaaccttaccgtaaagacgagaacagcattaacggtacccctgacatcacagttgaaattagagaacacatccagctcaatgagtccaagattgtcaaacaggccggggtcgcaacaaagggacccaatgagtatatccaggagatcgaattcgaaaacctgtctccaggctccgtgataatttttagagtgtctcttgacccacacgcccaggtggcggtgggcatcctccgcaatcatctgacacagttcagcccgcactttaaatctggctctttagctgtggataacgcagatccgatcctgaaaattcctttcgccagcttggcgtctcgcctgaccctagcagagctgaatcagatcctgtatagatgtgagtctgaggagaaagaagatggagggggctgctatgacattcccaattggtcagccctgaaatatgctggacttcagggactcatgtccgtgttagctgagatccggcccaagaacgatctgggacatcccttctgtaacaacctgagaagtggcgattggatgatcgattatgtgagcaaccgcctcattagtcggtccggaaccattgccgaagtggggaagtggctccaagcaatgttcttttacttgaagcagatccctcgttatctcataccctgttatttcgatgcaattcttattggagcttacacaacactgctggacactgcctggaagcagatgtcatctttcgtccaaaacggttcgacattcgttaaacacctctcgctggggagcgttcagttgtgcggcgtgggcaaatttccatccttgcccatcttatctcccgcccttatggacgtgccatatcggcttaatgagatcactaaggagaaagaacagtgttgtgtgtctcttgctgctggattgccacatttctcaagtgggatctttcgctgctggggacgggacacattcatagctctcagaggaatactactcatcactggcagatacgtggaagcaaggaatatcatcctggcatttgccgggactctgcgccatggtctaatccccaatctgctgggtgaaggcatttacgcccgctataactgtcgcgatgccgtatggtggtggttacagtgcatccaggactattgtaaaatggtgcctaacggactagacatactaaagtgtccagtgtctcgcatgtaccccaccgatgatagtgctccgctgcctgcaggtactcttgaccaacccctttttgaggtcattcaggaagccatgcagaagcatatgcaggggatacagtttcgggaaagaaatgctggcccccagatcgaccggaatatgaaagatgagggcttcaacatcactgcaggagtcgacgaggagaccgggttcgtctacggaggcaaccggttcaactgtggcacatggatggataaaatgggggaatcagaccgcgcccggaaccggggtatacctgctaccccgcgggacggtagcgcagtggaaattgtgggcttgagcaagtctgctgttaggtggctgcttgaactgtcaaaaaagaacatcttcccttatcacgaagtaacagtgaagagacacggcaaggccataaaagtgtcctatgatgaatggaacagaaagatccaagacaacttcgaaaagctcttccatgtgtccgaagacccaagtgatcttaacgaaaagcatcccaacctggtccataagaggggcatctacaaagatagctacggtgccagcagcccctggtgcgactaccagctgcggcctaatttcacgatagctatggtcgtggctccagagctcttcacgaccgagaaagcttggaaggcactcgaaatcgcggaaaaaaagctgttgggccccctcggcatgaagaccttggatccagacgacatggtgtactgcgggatctacgacaacgcactggacaatgataattacaacctggccaaggggttcaactatcatcagggtccagaatggctctggcccataggctacttccttagagcaaaactctacttctctaggctgatgggccctgaaaccacagctaagaccatcgtcctggttaaaaatgtactctcccgccactacgtgcatctggagcggtccccatggaaaggattacccgagctgacaaatgagaacgcccagtactgccctttctcctgtgagacgcaggcatggtccattgctacaattttggagaccctttatgacctt

SEQ ID NO: 6115 - DNA, 4596 bp, synthetic construct
  misc_feature 1..4596: note = source = /note="Description of Artificial Sequence: Synthetic coding sequence"
  source 1..4596: mol_type = other DNA
atgggccacagcaagcaaattaggattttactgctgaatgagatggaaaagctggaaaaaaccctctttaggctcgagcaggggtacgagcttcaattcagacttggacccaccttgcaaggcaaggcggtgaccgtgtatacaaactatccgttcccaggggagacgttcaacagggagaaatttagatctctggattgggagaaccctaccgagcgtgaggacgattctgacaagtactgtaagctcaatttgcaacagtctgggagtttccagtactacttcctacaaggaaacgagaaatctggcggtggctacatcgtggtcgaccctatcctcagggtgggagccgataaccatgtgttgccgctcgactgcgttacgctgcagacctttctggctaaatgcctgggaccgtttgatgagtgggaaagcaggctgcgggtagccaaggagtctggatacaacatgattcatttcacaccactgcagactttgggcctctcgaggtcctgctactccctagctaaccagctcgaacttaaccccgacttcagccggccaaatcgcaagtacacctggaacgatgtggggcagcttgtcgagaagcttaagaaggaatggaacgttatatgtattacggatgtggtgtataatcatacggccgctaattctaagtggatccaagaacaccctgagtgtgcttataatttggttaactctcctcacctgaaacccgcatgggtccttgaccgggccctctggagatttagctgtgatgtggctgagggcaagtataaggaaaaaggaatcccagctctcatcgagaacgatcaccatatgaatagcatacgaaaaatcatctgggaggatatcttccctaagctgaaactatgggagttctttcaggttgacgtaaataaagcagtggaacaattcaggcggctgcttacccaggagaatcgacgggtgacgaagtccgaccccaaccaacacctgactatcatccaggaccctgagtacaggcggttcggctgcacagttgacatgaatatcgcacttactacgtttatcccacacgacaaggggccggctgctattgaagagtgttgtaattggtttcacaaaagaatggaagaactgaatagtgaaaaacacagactcatcaattatcatcaagaacaggcggtgaattgcctgttgggaaatgtattctatgagagacttgccgggcacggcccgaaactgggtcctgtcacccgcaagcacccacttgttacacgctattttacattcccttttgaagagattgacttctctatggaggagtccatgatacacttgccaaataaggcatgctttctgatggctcataacggttgggtaatgggggatgaccctttaagaaactttgcagagccaggctctgaggtgtatctgcgccgggaacttatctgttggggggattcagtaaaactgcggtatggaaacaagcctgaggactgcccctacttatgggcgcacatgaagaagtataccgaaatcaccgccacatactttcaaggcgtgcgcctggacaactgtcatagcactcccctccatgtcgccgaatacatgctggatgctgcacgtaacttacaacctaacttatacgtggtggctgagctgttcaccggtagtgaggaccttgataacgtctttgttacacgccttggtatctcctccctaatcagagaggcaatgagtgcctataacagtcacgaggaggggcgcctggtgtacaggtatggaggagagcctgtcgggtcctttgtgcagccttgcctccgcccactcatgcccgcaattgctcatgccctctttatggacatcacccatgacaacgaatgtcccatcgtgcaccgatcagcttacgatgcactgccaagtactacaattgtgtccatggcctgctgcgcctccgggtctactcgagggtacgacgaactagtgccacatcagattagcgtggtctccgaagaaagattttacacgaagtggaacccagaggccctgccttcaaatacaggcgaggtcaacttccaatcaggtataatagcagcgagatgtgccatttctaagctccaccaagaactgggcgccaaaggttttatacaggtatatgtagatcaggtcgatgaagacatagtggccgtgactcggcacagtccatctattcatcagtctgtggtggccgtgtcgaggacagctttccgaaaccccaaaaccagtttctactcgaaggaagtgccgcagatgtgtatcccaggcaaaatcgaggaggttgttcttgaagcgcgcaccattgagcgcaacacaaaaccgtaccgaaaagatgaaaacagtattaatggcacgcctgatatcacggtcgaaatccgagaacacattcaacttaatgagagtaaaatcgtgaagcaggcgggggtcgccacaaagggtccgaatgagtacattcaggagatcgaatttgagaacctcagccctgggagtgtcattatattcagagtgtctctcgacccacatgcacaggttgcagtgggcatccttaggaaccatctaacccagttttccccacacttcaaatccggcagcctggctgtggataacgccgatccaatactgaagatcccgttcgccagcctagcctccagactgactctggcagagctgaatcaaattctttaccgctgcgagagtgaagagaaagaggatggcggcggatgctatgatattccgaactggtctgcccttaagtatgcaggtctgcaagggctgatgtccgtgctggctgaaattcgacccaaaaatgacctgggacacccattttgtaacaacctgcggtctggagattggatgatcgactatgtgtctaatcgcctgatctcaaggtctggcacaatagcggaggtgggtaaatggctccaggcgatgttcttctacctgaagcagatcccgcggtacctgataccgtgttattttgacgccatcctaataggtgcctacaccacattgctagacaccgcctggaagcaaatgtcttctttcgtacagaacggcagtactttcgtcaagcacctatccctcggaagtgtccagctgtgcggtgtcggtaagttcccatctctgcccatcctcagtccggcccttatggacgtaccctacagactcaacgagatcactaaagagaaagagcagtgttgcgtgtctctggctgctggcctgccccacttttcgtccggcatatttaggtgctggggtagggatacatttatcgcactgcgtgggatcctgctgatcacgggcagatatgttgaggctcgaaacattattctggctttcgcaggaacccttcggcatggactgataccaaacctgctgggagaggggatctacgccaggtacaactgtagagatgcggtttggtggtggttgcagtgcatccaagactactgtaagatggtcccaaacggcctcgacatacttaagtgccctgtgtcccgaatgtacccaaccgatgactcagcacctctgccagccggtaccctcgatcagccattgttcgaagtgattcaagaggccatgcagaaacatatgcaggggatccagtttcgcgagcgaaatgccggcccacaaatcgaccgcaacatgaaggacgagggcttcaacatcactgccggagttgatgaggaaacaggcttcgtctatggaggaaaccggtttaactgcgggacttggatggacaaaatgggcgaatctgacagagcccggaaccgcggcatcccagccaccccccgagacggaagtgccgtggaaatcgtaggcctgtcgaagagcgcagttcggtggctgctggagttgagcaaaaaaaacatcttcccctatcatgaagtgaccgtgaagcgccatggcaaggccataaaagtgagttacgacgaatggaaccgaaaaattcaggacaatttcgaaaaactgttccacgtgtcggaagacccttccgatttaaacgagaaacatcctaatctggtgcataaaagagggatatataaagactcatacggggcgtcctcgccatggtgtgactaccagctcagaccaaactttacaattgccatggtggttgccccggagctgtttactacagagaaggcatggaaggctttggagatcgctgagaagaaactgctgggcccactgggcatgaagactttggacccagacgatatggtctattgcggtatctatgataatgccctggacaatgacaactacaatttagccaagggtttcaactaccatcaggggccagagtggctgtggccaattggctacttcttgcgcgcaaagctgtatttttctcgcctgatgggacccgaaaccaccgccaaaactatcgtgttggtgaagaatgtgctgagtcggcattacgtccatctggagaggagcccatggaagggcttgccggagttgaccaacgaaaatgctcagtattgtccgttctcctgcgaaacacaggcttggtccatagctaccatcctcgagaccctttatgacctt

SEQ ID NO: 6116 - DNA, 4596 bp, synthetic construct
  misc_feature 1..4596: note = source = /note="Description of Artificial Sequence: Synthetic coding sequence"
  source 1..4596: mol_type = other DNA
atgggacactcaaaacaaattcgtatactgttgctgaacgagatggagaaactggaaaagacactgttcagactggaacagggctacgagctgcaattcaggttgggcccaacactccagggaaaggccgtaaccgtttacactaactatccttttcctggtgagacattcaatcgggaaaagttcaggagtctcgactgggagaaccctactgagagagaggatgatagcgacaaatattgtaagttaaatctacaacagagtggcagctttcaatattatttcctccagggcaatgaaaagtccggcggagggtatatcgttgtcgatcccattctgagggttggagcagataatcacgtacttcccctggattgtgtgaccctgcaaacattcctcgccaaatgcctggggccgtttgacgagtgggagtcgcggctgagggtggctaaagagtctggctacaatatgatacatttcaccccattacagactcttggattgtcccggagctgctatagtctcgccaatcagctcgagttgaatcccgacttttcccgacctaaccgaaagtatacctggaacgacgtgggccagctggtcgagaagcttaaaaaagagtggaacgtgatttgcatcactgatgtggtctataaccacacggccgctaacagtaagtggatacaagagcaccccgaatgcgcttacaatttggtaaattcaccccatctcaaacctgcttgggtactcgatagagcactgtggcgattttcctgcgacgtagccgagggcaagtataaggaaaagggcatcccggcccttatagagaacgaccaccacatgaactcaattagaaaaatcatatgggaggatatttttcctaagcttaagttatgggagttttttcaggtcgacgtgaacaaggcggtggagcaattcagacggctgctcacacaggagaatcgacgggtaacaaagtccgatcctaaccaacatttgacaatcatacaggaccccgagtacagaagatttggctgcacagttgatatgaacatcgctctgaccaccttcattccacacgacaaggggcccgcagctatcgaggaatgttgcaattggttccacaagcgaatggaagagcttaactcggagaagcatcgccttataaattatcatcaagagcaagccgtgaattgcctgctggggaatgtgttctatgaaaggctggcagggcacggccctaaactgggtcctgttaccagaaaacatccattggtaactcgctacttcacctttccctttgaggaaatcgacttttccatggaggagagcatgattcacctgccaaataaagcatgttttttgatggcccacaacgggtgggtgatgggggacgacccactacgcaattttgctgagcctggtagcgaagtttacctcagaagggagctgatctgttggggcgactctgtgaaattaagatacggcaataaaccagaggactgtccctatctgtgggcacacatgaaaaaatacaccgaaatcaccgccacgtacttccagggggtgaggttggataattgccattctacaccactgcacgtggccgaatacatgctggacgctgccagaaacctccagcctaacttatacgtggtagcagagctgttcaccgggagcgaggacctcgataacgtatttgtaacaaggctcggaatcagttccctcattcgggaagctatgtctgcttataacagccatgaggaggggcgtctagtgtacaggtacggcggagagccagtgggctccttcgtgcagccatgcctgcgcccgctcatgcccgccattgcccacgccctgtttatggatataacacatgacaacgaatgtcctattgtgcataggtctgcctacgacgcacttccctcaactaccatcgtgtcaatggcctgctgcgcaagtggttcaacaagaggctacgacgaactggtcccgcaccagatctctgtcgtgtccgaagagaggttctatacaaaatggaacccagaagccctgccctctaacacaggtgaagtcaatttccaatctggaattatcgcagccaggtgtgcaatttctaagcttcatcaggaactcggcgccaaagggttcatccaggtttacgtggatcaggttgacgaggatattgtcgccgtgacccggcactcaccaagtatccaccaatccgttgtggccgtctcgcgcacagccttcagaaatcctaaaacttcattttactcaaaggaggtgcctcagatgtgtattcctgggaaaatagaggaagtcgttctggaagcccgaaccatcgagagaaacaccaagccctatcgtaaagatgaaaactccattaatggcacccccgatatcaccgttgagatcagagaacatatacagctaaacgagtctaagatcgtaaagcaggccggcgttgctactaaaggcccaaacgagtatatccaagaaatagaatttgaaaatctgtcccctgggtcagttattattttcagagtgagtctcgatcctcacgctcaggtcgccgtcggcatcctcagaaatcaccttactcaattttcccctcactttaagagcggtagtctggccgttgacaatgccgatcctattctcaaaattcctttcgcttccctcgcttcccggcttaccctcgccgagctgaatcagattctttaccggtgcgaatctgaggagaaggaagatggaggaggttgctacgacatccccaattggtccgctctgaagtatgccggactgcagggcctgatgagcgtgcttgccgagatacgacctaagaacgatctgggccaccccttttgtaacaatctgagatcaggggactggatgatcgactacgtcagcaacaggttgatctccagatctgggacaatagcggaagtgggaaaatggttgcaggccatgtttttttacttaaaacagatcccacggtacctcattccttgctacttcgacgcaattttgattggagcttacactacacttcttgacaccgcgtggaaacagatgtccagctttgtgcagaatgggagcacttttgtgaagcatctctcacttggttccgttcaactgtgcggggtcggcaaattcccttcccttcccatcctgtcgcctgctttaatggacgttccttaccggctgaatgaaatcacaaaagaaaaggaacagtgctgtgttagtttggccgccggcctcccccatttctcctccggcatctttcgatgttggggaagagacacctttatcgcccttcgcggcattttactgatcactggtaggtatgtagaggcacggaatattattctcgcatttgccggcactctgcggcatggactgatccctaacctgctaggagaaggtatctacgcccggtacaattgtcgcgatgcagtgtggtggtggctgcagtgcatccaggactattgtaagatggtccctaacggactggacatactgaagtgcccagtgtctcggatgtaccccacggacgactccgccccacttccagcgggcacgctggaccagccactgttcgaggtaattcaggaagcaatgcagaagcatatgcaaggcattcagttcagagagcgaaacgctggccctcagatagatagaaatatgaaggacgagggttttaacattaccgcaggcgtggacgaagaaacaggttttgtttatggtggaaatcggttcaactgcggcacttggatggacaaaatgggcgagtcagatcgagctcgtaatcgcggtatcccggccacccctcgagatggctccgctgtggagattgtgggactgagcaagtctgccgtgaggtggttgctggagctgtctaagaaaaatattttcccctaccacgaggtgactgtgaagcgtcatgggaaggccattaaagtctcttatgacgaatggaacagaaagatccaggacaattttgagaagctgtttcacgtgtccgaggatccatctgacctcaatgaaaagcaccctaatttagtgcacaaaaggggcatttacaaggattcttacggagcaagcagcccctggtgtgattatcagttacgaccgaatttcacaatcgcaatggttgtggcccctgagctgtttacaacagagaaagcctggaaggccctggagatagccgaaaagaagctgcttgggccccttgggatgaagactctggatcccgacgatatggtgtattgcggcatatacgacaacgcactcgacaacgacaactataatctggccaaggggttcaactaccaccagggtccagagtggctatggcccataggatacttcctgcgggcaaaattgtacttttctaggctcatgggcccagagaccactgctaagacaattgtattagtcaagaacgtgctatcccgtcattacgtgcatctggagcggagtccctggaaaggactgccagaactgaccaatgaaaatgcccaatactgtcctttctcctgcgaaacacaagcctggtccatcgcaaccattctggaaacactttacgacttg

SEQ ID NO: 6117 - DNA, 4596 bp, synthetic construct
  misc_feature 1..4596: note = source = /note="Description of Artificial Sequence: Synthetic coding sequence"
  source 1..4596: mol_type = other DNA
atgggtcatagtaaacaaattagaattcttcttttaaacgaaatggaaaaattagaaaaaacgttatttagattagaacaaggttatgaacttcaatttaggcttggaccaacattacaaggtaaagcagttacagtttatacaaattatccttttccaggagaaacattcaatagagaaaaattcaggtctcttgattgggaaaatccaactgaaagagaggatgattcagataaatattgtaaacttaatttacaacaaagtggatcttttcaatattattttttacaaggaaatgaaaagagtggaggaggatatattgttgttgatccaattttacgagttggagctgataatcatgttttacctcttgattgtgttactttgcaaacattccttgctaaatgtttaggaccatttgatgaatgggaatcaagacttagagttgcaaaagaatcaggatataatatgatccatttcactccattacaaactttaggactttctagatcatgttattctttggcaaatcagttggaacttaatcctgatttttctagacctaataggaaatatacatggaatgatgtaggacaacttgttgaaaagttgaagaaagaatggaatgttatttgtataactgatgttgtttataatcatacagcagcaaattctaaatggattcaagaacatccagaatgtgcatataatttagttaattcaccacatttaaaaccagcatgggtacttgatagagcattatggagattttcatgtgatgttgcagaaggtaaatataaggaaaaaggaataccagcattaattgaaaatgatcatcacatgaacagtattcgaaaaattatatgggaagatattttcccaaaattaaaattatgggagttttttcaagttgatgtaaataaagctgttgaacaattcagaagacttttaacacaagaaaacagaagagttacaaaatctgatccaaatcaacatttaacaattattcaagatccagaatatagacgatttggatgtacggttgatatgaatattgctcttactacatttattccacatgataaaggacctgctgctattgaagaatgttgtaattggtttcacaaaagaatggaagagcttaatagtgaaaaacatcgtctaattaattatcatcaagagcaagctgttaattgtttgttaggaaatgttttttatgaacgtttagcaggtcacggaccaaaattaggtccagttacacgaaaacatcctttagtaactcgttattttacattcccatttgaagaaattgatttcagtatggaagaatctatgattcatttaccaaataaagcttgttttttaatggctcataatggatgggttatgggagatgatcctcttagaaactttgctgaaccaggatcagaagtttatttaagaagagaattaatttgttggggagattcagttaaattaagatatggaaataagccagaagattgtccttacttatgggcacatatgaaaaaatatacagaaattactgctacatattttcaaggagtaagattagataattgtcattcaacaccattacatgttgctgaatatatgttagacgctgcaagaaatttacaaccaaatctttatgtagttgctgaactttttacaggttctgaagatcttgataatgtatttgttactcgtttaggtatatcttccttaattagagaagcaatgtcagcatataattctcatgaagaaggacgtttagtttatagatatggtggagaaccagttggatctttcgttcaaccatgtttgagaccattaatgccagctattgcacacgctcttttcatggacataactcatgataatgaatgtccaatagttcatagatccgcttatgatgctttaccaagtactactattgtttcaatggcatgttgtgcatcaggtagtactagaggttatgatgaacttgttccacatcaaatatctgtagtatcagaagaacgattttatactaaatggaatccagaagcattaccatcaaatactggtgaagttaattttcaaagtggtattatagcagcaagatgtgctatttcaaaattgcatcaagaattgggagcaaagggatttatacaagtttatgtagatcaagttgatgaagatattgttgctgttactagacattcaccatcaatacatcaatcagttgttgcagtttcacgaacagctttcagaaatccaaaaacatctttttattcaaaagaagttcctcaaatgtgtattccaggaaaaattgaagaggttgttttagaagctagaactattgaacgtaatactaaaccatatagaaaggatgaaaattctattaatggaacaccagatattacagtcgaaataagagaacatattcaacttaatgaaagtaaaattgttaaacaagcaggtgtcgcaacaaagggacctaacgaatatattcaagaaatcgaattcgaaaacttatctccaggatcagtaattatttttagagtttctttagatccacatgcacaagttgcagtgggaattttgagaaaccatttaactcaatttagtccacattttaaatctggatcattagctgttgataacgctgatccaattttaaagatacctttcgctagtttagcaagtcgattaacacttgctgaactcaatcaaattctttatagatgtgaaagtgaagaaaaagaagacggtggaggttgttatgatataccaaattggtctgccttaaaatatgcaggtttgcaaggtcttatgtctgttttagcagaaattagacctaaaaatgatctaggacatccattctgtaataatttaagatctggtgattggatgattgattatgtttctaatagacttatatctagaagtggtactattgcagaagttggaaaatggttacaagctatgtttttttacttaaaacaaattccaagatatcttatcccatgttattttgatgctattttaattggagcatatactacattacttgatactgcatggaaacaaatgagttcatttgtacaaaatggttcaacttttgtgaaacatttaagtttaggaagtgttcaattatgtggagtaggaaaatttccatcacttcctattttatcaccagcacttatggatgttccatacagattaaatgaaattacaaaagaaaaagaacaatgttgtgtctcacttgctgctggacttcctcatttctcttctggaatttttagatgttggggacgagatacatttattgcattaagaggtattcttctaattactggtagatatgtggaagcaaggaatattatattagcttttgctggaactcttagacatggattgataccaaatttattaggtgaaggaatttatgctagatataattgtcgtgatgcagtatggtggtggttacaatgtattcaagattattgtaagatggttcctaatggattagatattttaaagtgtcctgtaagtagaatgtatcctacagacgattctgcaccattaccagcaggaacattagatcaaccactttttgaagttattcaagaagcaatgcaaaaacatatgcaaggaattcaatttagagaaagaaatgctggacctcaaattgatagaaatatgaaggatgaaggatttaatattactgctggtgttgatgaagaaacaggatttgtttatggaggtaatagatttaattgtggtacttggatggacaaaatgggggaatcagatcgtgctcgaaatagaggaatcccagctactccaagagatggatccgcagtcgaaatagtgggtctttcaaaatctgctgtaaggtggcttcttgaattgtctaagaaaaatattttcccatatcatgaagttacagtaaaaagacatggaaaagctataaaagtatcttatgatgaatggaatcgtaaaattcaagataattttgaaaaacttttccatgtatctgaagatccatcagatttaaatgaaaaacatccaaatcttgttcataaaagaggtatttataaagattcttatggagcttccagtccttggtgtgattatcaattacgtccaaatttcacaattgcaatggttgttgctcctgaattatttactacagaaaaagcatggaaagctcttgagattgcagagaagaaattacttggtccattaggaatgaaaacattagacccagatgatatggtttattgtggtatttacgataacgcattagacaacgataattataatcttgctaaaggattcaattatcatcaaggaccagaatggttatggccaattggatattttttacgagctaaattatacttttctagacttatgggacctgaaacaactgctaaaactattgttcttgttaaaaatgtgttatcaagacattatgtacatttagaacgttctccatggaagggacttccagaattgactaacgaaaatgctcaatattgtccattttcttgtgagacacaagcttggtcaattgcaactattcttgaaacattatatgatctt

SEQ ID NO: 6118 - DNA, 4596 bp, synthetic construct
  misc_feature 1..4596: note = source = /note="Description of Artificial Sequence: Synthetic coding sequence"
  source 1..4596: mol_type = other DNA
atgggtcattccaagcagatccgaatcctcctgctgaatgaaatggagaaactcgaaaaaactctttttcggctcgaacaaggatacgaactgcagtttcgccttggcccgaccttgcagggtaaggcagtgaccgtgtacaccaattacccttttcccggagaaacctttaatcgcgaaaagttccgcagcctggattgggaaaatccgactgagagggaggacgactcggataagtactgcaaactgaacctgcagcaatcagggtcctttcagtactactttctgcaaggaaacgaaaagtccggaggaggatacatcgtcgtggacccaatacttcgagtgggagctgataaccatgtgctccctcttgattgtgtcaccctccagacttttctcgctaagtgtcttgggccttttgacgaatgggaatctaggcttagagtggcaaaggagagcgggtataacatgatccatttcactcctctgcagacccttggcctcagccggagctgttactccctcgcaaatcagctggagcttaaccccgacttttcacggcctaacagaaagtacacgtggaacgatgtggggcagctggtcgaaaaactcaaaaaagaatggaatgtcatttgtattaccgatgtcgtctataaccatactgcagccaattctaaatggattcaggaacaccccgagtgcgcatacaatctcgtgaattccccacatcttaagccggcatgggtccttgacagggcactgtggcgcttctcctgtgacgtggcagaaggaaagtacaaggagaagggtattccagcgcttatcgaaaacgatcatcacatgaactcgatcagaaagatcatttgggaggatatctttcctaagctgaagctgtgggaattcttccaagtggacgtcaacaaggcagttgagcagttcagacggctcctgacgcaggaaaatcgacgagtcaccaagtcggaccctaaccaacatcttaccataatccaagacccagaatacagacgattcggatgcactgtggacatgaacatcgcgctgaccactttcattccgcatgataagggccctgctgctatagaagagtgctgtaactggtttcataaacggatggaagagttgaattccgaaaagcatcgactgattaactaccaccaggaacaagccgtcaattgccttctgggaaatgtgttctatgagaggctggcaggacatggtccaaagctgggtcctgtgactcgaaagcatccccttgtgacccgctactttaccttccccttcgaagaaatcgatttttccatggaagaatcaatgattcacttgcctaataaggcctgttttctcatggcacataatggatgggtgatgggtgacgacccgcttcggaacttcgctgagccaggatcagaagtgtaccttcggcgcgagcttatttgttggggtgactcagtgaaacttaggtacggtaacaaacccgaagattgtccctacctgtgggcccatatgaagaaatacacggagattacggcaacctactttcaaggagtcagactggataattgtcatagcactcccctgcatgtggcagagtacatgctcgatgcagcccgaaatctgcaacctaacctttacgtcgtggctgaactgttcaccggatcagaagatctcgataatgttttcgtgactagactgggcatttcctcgctcattagggaagccatgtccgcatataactcgcatgaagaaggacggcttgtgtaccgttacgggggagaacccgtcggatcattcgtccaaccctgcctccgcccactcatgcctgccattgcgcacgcattgtttatggacattacccatgataatgagtgtcccatcgtgcaccgatccgcttacgacgcactgcctagcaccaccatcgtctcgatggcatgttgcgcatcaggttcgactagaggatacgacgagctcgtgcctcatcagatttcggtcgtgtccgaggaacggttttacactaagtggaatcccgaagccctcccttcgaacactggtgaagtgaacttccaatccggtatcatagctgcaaggtgtgcaatctccaagctgcaccaggagcttggagcaaagggattcatccaggtctacgtagatcaggtggatgaagatatcgtggctgtgactcggcatagccccagcatccatcagtccgtcgttgcggtttcacgtactgcattccgcaacccaaagacttctttttacagcaaggaagtgcctcaaatgtgtattccaggaaagatagaggaggtggtgctggaagcccgcactattgaacgcaacacgaagccttaccgcaaggacgagaactccataaacgggactcctgacatcaccgtcgaaattcgcgaacacatccagcttaacgaatctaagattgtgaaacaggcgggagtggcaaccaaagggcctaacgaatacattcaagaaatcgagttcgagaacctttctcctggcagcgtgattatctttagagtgtcgctggaccctcacgcacaggtggcagtcggaatcctgcgaaaccaccttacccagttttcacctcatttcaaaagcgggtcacttgcagtggataacgcggaccccattctcaagatacctttcgcctcactggcttcgagacttacccttgcagaactgaaccaaattctttaccgctgcgagagcgaagagaaggaggacggaggcggttgttacgatatccctaactggtcagcactgaagtacgccggacttcaaggcctgatgtcggtgctcgcagaaattagaccaaagaatgatctgggacatcctttttgtaataacttgcgctccggcgattggatgatagactatgtcagcaatcgacttatttctcgctcgggcaccattgcggaggtgggcaagtggctccaagcaatgttcttctacttgaagcagatcccaagatatctgatcccttgttacttcgatgcgatcctgattggagcatacaccaccctcctggataccgcctggaaacagatgtcctcctttgtgcagaacggaagcactttcgtgaaacatctttcattgggatccgtccagctctgcggcgtgggaaagttccctagcctgccaattctttcgccagctcttatggatgtgccctaccgactgaacgaaatcacgaaagaaaaggagcagtgctgcgtgtcgctcgccgcaggattgccacactttagcagcggtatctttagatgctggggtcgcgatacgttcattgcactccgcgggatcctcctgatcaccggccgctacgtggaggctcggaacattatactggcattcgcaggcactctgagacatgggctcatccctaatcttcttggtgaaggaatctatgcacgatacaactgtagagatgcggtgtggtggtggctgcaatgcattcaagattactgcaaaatggtgccaaacggactggatattcttaagtgtcctgtgtcgcggatgtacccgaccgatgattcggcacctctccctgcggggaccctggatcagcctttgttcgaagtgattcaagaagcaatgcaaaaacacatgcagggcattcaatttagagagagaaacgcaggcccccaaattgatcgaaatatgaaggacgaaggatttaacattactgcaggcgttgacgaagaaactggcttcgtctacggaggaaaccggttcaactgcggtacctggatggataagatgggcgaaagcgatcgggcacgcaatcggggcataccagcaaccccacgggacggctcagccgtcgaaatcgtcgggctgtccaagtctgccgtcaggtggcttcttgaactttccaagaaaaacattttcccctaccacgaggtcactgtgaaaaggcatggaaaagccattaaggtgtcctacgatgaatggaacagaaagattcaagacaattttgaaaaactgtttcacgtgtcagaagatccgtccgatctgaacgaaaagcatcctaatcttgtgcataaacgcggtatttacaaggactcatacggagcatcgtctccatggtgtgattatcaacttcggccaaactttaccatagcaatggtggtggctcctgagctgtttacgaccgagaaagcgtggaaagcactcgaaattgcggaaaagaaacttctgggacctctcggtatgaaaaccctcgaccccgacgatatggtgtactgtgggatttacgacaacgcactggataacgacaattacaaccttgccaagggcttcaattatcatcagggcccagagtggctctggcccatcggttactttttgcgcgccaagttgtacttttccaggctcatgggtccagagacgaccgcaaaaaccatcgtcctcgtcaagaatgtgctgagcagacattacgtgcacctggaaaggtcgccttggaagggtctgccagaactcactaacgagaacgcacagtactgtcctttttcgtgtgagactcaagcctggtcaatcgcaactatccttgaaaccctctacgatctg

SEQ ID NO: 6119 - DNA, 4596 bp, synthetic construct
  misc_feature 1..4596: note = source = /note="Description of Artificial Sequence: Synthetic coding sequence"
  source 1..4596: mol_type = other DNA
atgggtcactcaaagcagattcggatcctgctgctgaacgagatggaaaagctcgaaaagacattgtttaggttggagcaaggatatgagctgcaatttaggttggggcccaccttgcagggtaaagcagtgaccgtgtacacgaactatcccttcccaggagagacttttaacagagagaagttccgtagtctggactgggagaacccgactgaacgggaagatgatagtgataaatactgcaagctgaacttacaacaaagcgggtcatttcaatattatttcctccagggaaacgagaagtcgggaggcggatacattgttgtggatcctatcctgcgagtcggggccgataatcacgtgcttccgctggactgcgtaaccctacagacttttctagccaagtgcttgggcccattcgatgagtgggaaagccggctgagggtagcaaaggagtccgggtataatatgatccacttcacacccttgcaaacacttggactgagcagatcttgctactcactagccaatcagttagagctgaacccggacttcagtaggccaaatcgcaagtatacttggaacgatgtaggccagctggtcgagaagctgaaaaaggagtggaatgtcatttgcatcactgacgtagtctacaaccatacggctgctaacagtaaatggattcaggaacacccagagtgcgcttacaatcttgtgaatagtcctcatctgaaaccggcgtgggtcttggaccgcgcattatggaggttttcgtgcgacgtggccgagggcaagtataaggaaaagggaatcccggcattgatcgaaaacgatcatcacatgaatagtatccgaaagataatctgggaagacatctttccgaaactgaagctgtgggaattcttccaggtggacgtcaataaagctgtcgaacaatttaggaggctactgacccaggagaatcgccgggtcacaaagtcagatccaaatcagcatttgacaatcattcaagaccccgaataccgcagattcggctgtactgtggatatgaacatagccctgacaacgttcattccccacgacaaggggcccgctgcaattgaagaatgttgcaactggtttcataaaagaatggaagagctgaactctgagaagcatagattaatcaactatcaccaggagcaggccgtcaactgcctattgggaaacgtgttctacgaaaggttggctggtcatggccctaaacttggtcccgtcactcgaaagcatccactggtgacccgatacttcaccttcccattcgaagaaattgatttttcgatggaagagtccatgattcatttgcccaataaggcctgcttcctgatggcccacaacggctgggtgatgggcgatgatcccctgcgaaacttcgctgaacctgggtccgaggtgtatttgcggagggaacttatatgctggggtgatagcgtgaaattaaggtacggcaacaaacccgaagattgcccctacctgtgggcgcatatgaagaagtatacggaaataacggctacctattttcagggagtgcgcttggataactgccattcaacacccttgcacgtagctgaatacatgctggatgccgcaaggaatcttcagcctaatctttatgtggttgccgaactgttcactgggtccgaggatctggacaatgtgtttgtgacacggctgggaattagttctctcatcagagaggcgatgtctgcctacaacagccatgaggaaggcagactcgtctataggtatgggggggaacctgtgggtagcttcgtgcaaccctgcctgagaccactgatgcccgccattgcacatgcgctcttcatggacataactcacgacaacgagtgtccaattgttcacagaagcgcttacgacgccctcccctccactactatcgtgtcaatggcctgttgtgcgtccggctccactcgaggatatgatgaactggtgccgcaccagatctccgttgtctctgaggagaggttctacaccaagtggaaccccgaagccctgcctagcaataccggagaggtgaactttcaaagcggtataatcgccgcgcgatgtgccatatcaaagttgcaccaggagctgggcgcaaaaggttttatccaggtctatgtcgatcaggtggacgaggatattgtcgctgtcacgcggcattcaccatccattcaccagtctgtggtggctgtgtcccggacggccttccggaaccctaagacctctttttacagtaaggaggtgccgcaaatgtgtatccccggcaagatagaggaagttgtacttgaggccaggacaatcgaacgaaacaccaaaccataccggaaagacgaaaattccatcaatgggaccccagatattactgtggagattcgggagcatattcagctgaacgaaagcaagattgtgaagcaggcaggcgtagccaccaagggtccgaacgaatacatccaagaaatcgaattcgaaaatctttctccgggatccgttatcatcttccgggtgagtctggacccacacgcacaggtcgctgtgggaattttaagaaatcatttgacccaattctctccccatttcaagagcgggtcactcgccgtcgacaatgcagacccaatcctgaaaatcccattcgctagtctggcttctcgcctgacattggcagagctgaaccagatcctgtacaggtgcgaatccgaagagaaggaggatggtgggggttgttatgacatccccaactggagtgctcttaagtatgcaggactacagggtctgatgtcagtgctggctgagatcaggcctaaaaacgacctgggccaccctttctgcaataatctgcgctccggagattggatgatcgattatgtttctaatcgcctcatttccagaagcggcactattgcagaggtcggcaaatggctccaagccatgtttttctacctgaagcagattccaaggtatcttatcccctgttactttgacgcgattctgatcggagcatacacaaccctcttggacaccgcgtggaaacagatgtcaagctttgttcagaacggctccacattcgtgaaacacctgtctctgggaagcgtgcagctttgcggggttggcaagtttcccagcctgccaattctttcccccgctctcatggatgtgccttaccgcctgaatgaaattactaaagagaaggagcaatgttgcgtgagcctggctgctggcttaccacacttcagctcagggatcttccgctgttggggtagagacaccttcatcgcactgagagggatcctgttgatcaccgggcgatacgtggaggctaggaacattatcctggccttcgcaggtacattaagacatggcttgatcccaaacctcctgggtgaaggcatttatgcgcgttacaactgtcgggatgccgtgtggtggtggctccagtgcatacaggactattgtaaaatggtgcccaatggactagatattctgaaatgcccggtttcgcgaatgtatcctaccgacgattcagcccctctgcccgcgggtactctggaccagccccttttcgaggtgatccaagaagccatgcagaagcatatgcagggcatacaatttcgggagaggaacgctggcccacagattgatagaaacatgaaagacgagggctttaatattaccgcaggagtggatgaggagacaggctttgtgtacggtggaaacagatttaactgtggaacgtggatggataagatgggtgagtctgaccgcgctaggaatagaggcattcccgccacccccagggatggatccgccgtggagatcgttggtctgtctaaatccgcggtacgatggttactcgagctgtccaaaaaaaacatttttccctatcatgaagtgacagttaaacggcatggtaaagctattaaggtaagctacgacgagtggaacagaaagatccaggacaacttcgagaagctatttcacgtatctgaagatccatctgatttaaatgaaaagcatccaaatctagtgcataaaaggggaatttataaggattcatatggcgcttcttctccgtggtgcgattaccaacttcgaccaaattttaccattgcaatggtcgtggcaccagagttgtttaccacagagaaggcctggaaagctctggagatcgcagaaaagaaactgctcggcccgctgggtatgaagacactggacccagacgacatggtctattgcggaatatacgataacgctctcgacaacgataattataatttggccaagggcttcaattatcatcaggggcccgagtggctgtggcccattggctactttctgcgagctaaactgtatttcagcaggcttatgggacccgagacgaccgcgaagacaattgtactagtgaagaatgtcctgtcgcggcactatgtccacctcgaacgctcgccatggaagggactgccagagttaaccaatgagaacgcgcagtactgtccattctcgtgcgagacgcaggcatggtcaattgccacaatcctcgagacactgtatgacctg

SEQ ID NO: 6120 - DNA, 4596 bp, synthetic construct
  misc_feature 1..4596: note = source = /note="Description of Artificial Sequence: Synthetic coding sequence"
  source 1..4596: mol_type = other DNA
atggggcacagcaaacagatccggatcttgctgctgaacgaaatggagaaattggaaaagaccttgttccgcctcgagcagggctacgagctgcagttccgattgggccctaccctacagggtaaggccgttacggtctataccaattacccattcccaggagagacgttcaatcgcgaaaagttccgctcactggactgggaaaaccccacggaacgcgaagacgacagcgataagtattgcaaattaaacctgcagcaaagcggttcatttcagtactactttctgcagggaaacgaaaaatcaggtggcggctacatagtcgttgacccaattctaagggttggtgcagataatcacgtgctgccgttggattgcgtcaccctgcagacctttctcgccaaatgtctgggtccgtttgatgaatgggaaagccgcctgcgcgtggctaaagaaagcggttataacatgatccatttcacccctctgcagactctcggtctgagccgctcctgctatagcctcgcgaatcagttggaactcaacccggacttcagcagaccgaaccggaaatacacctggaacgatgttggccagctggtcgaaaaactgaaaaaagagtggaatgtgatttgcatcacggacgttgtttataatcacaccgctgctaatagcaagtggatccaggaacacccagagtgtgcatacaatttggttaacagcccacacctgaaaccggcttgggttctggatcgcgccctgtggcggttctcctgcgatgttgctgaggggaaatacaaggaaaaaggtatccctgctctgattgagaacgatcaccacatgaactcgattcgcaaaatcatctgggaggatatcttcccgaagctgaaactgtgggaattcttccaagtcgatgtgaataaagctgtggaacaattccgacgattgctgactcaggaaaatcgcagagtcacgaagagtgatcctaatcagcatctgactattatccaggatccggagtacaggaggtttgggtgcactgtcgacatgaatattgcgctgactacttttattcctcacgacaaaggtccagctgccatcgaggagtgctgcaattggttccacaagagaatggaagagctgaattcagagaagcatcgcctgatcaattaccaccaggaacaagcagtcaattgtctattgggcaatgtgttctacgagcgcctcgccggtcacggccccaagctgggtcctgtgacacgcaaacacccgctggtcactcgctactttactttcccttttgaggagatcgatttctcaatggaggaatctatgatccatctgccgaataaggcttgttttttgatggcacataacggctgggtcatgggtgacgacccattgaggaacttcgcggagccaggtagcgaagtgtaccttcgccgcgagctaatctgctggggcgactctgtgaaacttagatatggtaacaagcccgaggactgcccatatctgtgggcgcatatgaaaaaatacacggaaatcaccgccacatattttcagggcgtccgcctggacaactgccactctaccccgctgcacgttgccgagtacatgctggatgccgcaagaaaccttcaaccaaacctttatgtggtcgccgagctctttactggtagcgaggatctggataacgttttcgtcacccgcctgggtatctccagccttatccgcgaagctatgtccgcgtacaattctcacgaagaaggtcgcctggtctatcgctatgggggggagccagtcgggagcttcgtccaaccttgcctaaggccgctgatgcctgctattgcacacgccctatttatggatattactcatgacaacgagtgcccgatcgttcaccgtagcgcctatgatgccctgccgagcaccaccattgtcagcatggcgtgttgtgcatctggttctactcgcggctatgatgagctagttcctcaccagatctctgtcgtgtcagaagagaggttctacacgaaatggaatccagaagcgctgcctagtaataccggcgaggttaattttcagagcggaataatcgcggcccgctgcgcaatttcaaaactgcatcaagaattgggcgctaaagggtttatccaggtgtacgttgatcaggttgatgaagatattgtcgcagtcacccgccacagcccttcaatccatcagagtgtggtggcggtgagccgtaccgcgttcaggaacccaaagaccagcttctatagcaaggaggtgccgcagatgtgcatccctggaaagatcgaagaagttgtcctggaggcacgtactatcgaacgaaacaccaagccttaccgcaaagacgagaatagcatcaacggtacaccagatatcaccgtcgaaatccgcgagcatatccagctgaacgagtccaagattgttaagcaggcaggagttgcgactaaaggacctaacgaatatattcaggaaattgaattcgaaaatctgagccctggtagcgtgattatcttccgcgtgtctttggatccacatgcacaggtggcggttggtattctgcgcaatcacctgacacagttcagccctcactttaagtccggttccctggcagtcgataatgcggacccgatcctaaagattccgttcgccagcctggcatctcgccttacgttagccgaactgaaccagatcctgtatcggtgcgagtcggaagagaaagaggatggtggagggtgctatgatatccctaattggtctgcgttaaaatatgcaggtctgcaaggtctgatgtccgttctggcggagatccgcccgaaaaatgatctcggccaccctttttgcaacaatctgcgctctggcgattggatgatagattacgtctctaaccgcctgatctctaggagcggcactatagccgaggtgggtaaatggctccaagcaatgttcttttatctgaagcagatcccacggtacctgataccatgttatttcgatgcaattctcattggtgcatacactaccctgttggacaccgcctggaaacagatgtccagcttcgtgcagaatggttcgaccttcgttaaacacctgagcctgggcagcgtccagctgtgcggcgttggaaagtttccgagcctccctattctgagcccggcgctgatggacgtcccatatcgcctgaacgaaattaccaaggagaaagaacagtgttgtgtcagcctcgcggctggcctgcctcacttttcttcgggcatctttcgatgctggggcagggacacgttcatagctctgcgcggtattcttctgatcactggcaggtacgtcgaggctcgtaacattattctggcgttcgccggcactctgcgccacggtctcatacctaacctgctgggggaaggaatctacgctcgatacaattgcagggatgctgtctggtggtggctgcagtgtattcaggattactgtaaaatggtgccaaatggtttagacatcctgaaatgcccagtttctaggatgtaccccactgatgattccgcgcctctgccggctggcaccctggaccaacctttattcgaggttattcaagaggctatgcaaaagcatatgcagggcatccaatttcgtgagcgcaatgctggtccacagattgatcgcaatatgaaggatgaagggtttaatatcacagcgggtgtcgatgaggagacgggctttgtgtacggtggcaatcggttcaactgcggcacgtggatggataagatgggcgaatccgatcgggcgcgcaaccgcggcattccagccaccccgcgcgatggtagcgcagtcgaaatcgtcggcctgtcgaaaagcgcggtccggtggcttctggagctttccaagaaaaacatatttccgtatcatgaggtcacggttaagcgccacggcaaggccatcaaagtgagctacgatgagtggaaccgcaaaatccaggataattttgaaaaactcttccatgtttctgaggaccctagtgacctgaacgaaaaacacccgaacctagtccacaaacgcggaatctacaaagacagctacggggcaagtagcccttggtgtgattaccagctgcgccctaattttacgattgctatggtggtggcacctgagctgttcacgactgagaaagcgtggaaggcactagaaatcgccgagaaaaaactgctgggcccgttgggcatgaaaacgttggacccggacgacatggtttactgcggtatctacgataatgcactggataacgacaattacaacctggcaaagggtttcaactatcatcagggccctgaatggctgtggccaatcggctacttcttgcgagcgaagctgtatttttctcgcctgatgggtcccgaaactacagcaaagaccattgttttggtgaaaaacgttctatcccgccactacgtgcaccttgaacggagcccttggaaggggctgccggagttgactaatgagaatgcccagtattgtccgttcagctgcgaaacacaagcatggagcatcgccaccatactagaaaccctgtacgacctg

SEQ ID NO: 6121 - DNA, 4596 bp, synthetic construct
  misc_feature 1..4596: note = source = /note="Description of Artificial Sequence: Synthetic coding sequence"
  source 1..4596: mol_type = other DNA
atgggacacagcaagcagattcgaattctgctcctgaatgagatggaaaagctggagaagaccctgtttcggctcgagcagggttacgagctccaatttcggctcggcccgactctccagggtaaagccgtgactgtctacacaaactaccccttccccggcgagaccttcaaccgcgagaagttccgctccctggattgggaaaatccaactgagagggaagacgattccgataaatactgcaagctcaatctgcagcagtccggaagcttccagtactacttcttgcagggcaatgaaaaaagcggaggcggctacattgttgtcgacccgatactgagagtgggggctgacaatcatgttctacctcttgattgcgtcacattgcagacctttctggccaagtgcctgggcccatttgatgagtgggaatctaggctgcgcgtggccaaagagagcggctacaacatgatccacttcacacccctccaaactctgggcttgtccaggtcatgctatagccttgcgaatcagctagagttgaacccagatttctcccgccctaatcggaagtatacctggaatgacgtggggcagctcgtcgagaaactcaagaaggaatggaacgtcatctgcatcacggatgttgtgtacaaccacaccgccgcaaacagcaaatggatacaagagcaccccgaatgtgcgtacaatctggtaaactccccccatctcaagcctgcctgggtcctggaccgagccctgtggcggtttagctgcgatgtcgcggagggtaagtacaaagaaaaggggattcctgcactgatagaaaatgaccatcacatgaattctataagaaagattatttgggaggatatctttcctaaactgaagctgtgggaattttttcaggtggacgtaaataaggctgtagagcagttcagacggctcctgacacaggaaaaccgaagagtgacgaagagcgatcccaatcaacatttgaccatcatccaagatcccgagtaccgtaggtttggatgcacagtggatatgaacatcgctttaacaaccttcattcctcatgacaagggtcccgccgctatcgaggagtgttgcaactggtttcacaaacgcatggaggagttgaactcggaaaagcatcggctgatcaactaccaccaagagcaggccgttaattgtctgctgggcaacgtgttctatgaacgacttgccggtcatggaccgaaactcggaccggttaccaggaaacacccacttgtgacccggtattttacattcccatttgaagagattgatttttcaatggaagagtcaatgatccatcttcctaacaaggcttgcttcctgatggctcataacggttgggtaatgggagacgacccactgaggaattttgccgagcctggaagtgaggtgtacctacggcgagaactcatctgttggggcgacagtgttaagctccgatatggtaacaaaccagaagattgcccatacctctgggcgcacatgaagaaatacaccgagatcacagcgacctacttccagggggtgcggttggacaattgccactcaacaccattgcacgtggcggagtatatgttggacgcggccaggaacttacaacctaatctgtacgtcgttgctgagctgttcactggcagtgaggacttggacaatgtgttcgttacccggctcggtatctcttcattgatccgggaagctatgtctgcctataactcacacgaagagggacggcttgtgtatcggtatgggggggaacctgttgggtcgtttgtgcagccttgtctgaggcccctgatgcctgctatcgcgcatgctctgttcatggacatcactcatgataatgaatgccccattgtgcatcgatctgcctacgatgcccttccaagtacaaccatcgtgagcatggcctgttgtgcgtctggaagtacgcggggttatgatgaacttgtccctcaccaaatttcagtagtgtctgaagaaagattttacacaaagtggaaccctgaggcactacccagcaatactggcgaagtgaatttccaaagcggaataattgcagcccggtgtgcgatcagtaagcttcaccaggaactcggggcgaagggctttatccaggtctacgtcgaccaggtagacgaggatatcgtggccgtcacccgccattccccttctatccaccagtccgttgtcgccgtatcacggacagctttcaggaaccccaagaccagcttttattctaaggaggtgccccagatgtgtatccctgggaaaattgaggaagtggtcctcgaggccaggaccatagagagaaatactaagccgtacaggaaagatgagaactccataaacggaactccagacatcaccgtggaaattagagaacacatacagttaaatgagtctaaaatcgtcaaacaggctggggtggccaccaaaggcccaaatgagtatatccaggagattgaatttgaaaaccttagtcctggctccgtgattatcttcagggtttcactcgacccccacgctcaggtagccgtcggcattctgaggaaccatctcacgcagttttcccctcattttaaaagtgggagccttgcagtggacaatgctgacccaattctgaagatcccattcgcctcattggccagcaggctgacgttggccgaactaaaccagatactatacagatgtgaaagcgaagagaaagaggacggcggggggtgctatgacatccccaactggtcagctctaaaatacgcaggtctccagggactaatgtccgtcctggcggaaattcgccctaaaaatgatctggggcatcccttttgtaacaacctccgctctggggattggatgatcgattacgtaagtaatcggttgattagccgctcaggaacaattgcagaggtaggaaagtggctgcaggcgatgtttttttatctgaagcagatccccaggtacctgataccctgctatttcgacgccatccttattggtgcgtatacaacccttctggacacggcatggaaacagatgtcctccttcgttcaaaatggttcaacctttgtaaagcacctcagcttgggctctgtacagctctgcggtgtcggtaagttcccgagtctgcccatcctgagtcctgcccttatggacgtcccctaccgactgaacgagataactaaggagaaggaacagtgctgtgtatctctggctgctggattaccacattttagctccggaattttccgatgttgggggcgtgacacatttatagcattaagggggatccttctcatcaccggcaggtatgtcgaggcccggaacatcatcctcgcctttgccggaaccttgaggcacggtttaataccaaatctgctcggagagggaatctatgcacggtataactgtcgcgacgctgtttggtggtggctccagtgcatccaggattactgcaagatggtccccaacggcttggatatactgaaatgtccagtatcacgaatgtatcctaccgacgacagcgcccccctgccagccggcaccctggaccagccgctgttcgaggtcatccaggaagcgatgcagaagcacatgcaggggatccagttcagagagcgaaacgccggccctcagatagaccgcaacatgaaagacgaaggcttcaatatcacagccggagtggacgaggagactgggttcgtctatggcgggaataggttcaactgcggcacatggatggacaaaatgggggagtcagatagggcccgaaacagaggaataccagcgaccccgcgggacggcagcgccgtggagatcgtggggctctcgaagtccgctgtaaggtggctgttggagctcagcaagaagaacatcttcccctaccacgaggttacagttaagcgccatggcaaagctataaaagtctcatacgacgagtggaacagaaaaatccaggacaacttcgagaagctgttccacgtatctgaggatccaagtgatctgaacgagaaacaccccaatctggtgcacaaacgcggaatttacaaagattcatatggtgcttccagcccatggtgcgactatcagttacgtccaaatttcactatagcgatggtggtggcgccggagttatttacgactgagaaggcttggaaggctctggagattgcggaaaaaaaactgttggggccgctcggaatgaaaactctagatcccgatgacatggtgtactgcgggatctacgataatgccctggataacgacaactataatctagccaagggctttaattatcaccaggggcccgagtggctgtggcctatcggatactttctgagggccaagctgtacttctcgcgtctcatggggccggaaaccacagctaaaacaatagtgctcgtcaaaaatgtattgtcccgccactatgtccacctagagcggtctccttggaaggggctgcccgagctaaccaacgaaaatgcccagtattgtccgttttcctgtgagacccaggcttggtccatcgcgaccattttggagacgctttatgactta

SEQ ID NO: 6122 - DNA, 4596 bp, synthetic construct
  misc_feature 1..4596: note = source = /note="Description of Artificial Sequence: Synthetic coding sequence"
  source 1..4596: mol_type = other DNA
atggggcacagcaagcagatcaggattctcctcctgaacgagatggagaagctagagaaaacgttgttccgcttggagcaggggtatgagttgcagttccgtctggggccgacgctccaaggtaaagccgtgaccgtgtatacgaattacccatttccgggcgagacatttaacagggaaaaattccgctccttagattgggagaatccaaccgagcgcgaggacgattcagacaagtactgcaagctgaatctgcaacagagtggctctttccagtattattttctccaggggaatgagaagtccggcggtggatacatcgtggtggacccaattcttcgagtgggtgcagataatcacgtcctccccctggactgcgtgacgctgcagacattcctggccaagtgcctcggcccgtttgatgagtgggagagcaggctgcgcgtagctaaggaatccggctataatatgattcacttcacccccctccagacattgggacttagtagatcgtgctattccctggccaatcagctcgagcttaaccctgatttcagtcggcctaatcggaaatacacgtggaatgacgtgggccaactggtggaaaagttaaaaaaggaatggaacgtgatttgcatcaccgacgtggtgtataaccataccgcggcgaactcaaagtggatacaggaacacccagagtgtgcgtacaatctggtcaacagcccccatttgaaacccgcctgggtactggaccgagccctctggcgcttttcctgtgacgtagcagaaggcaaatacaaggagaagggcattccagcactgatagaaaatgatcaccacatgaacagcattagaaaaatcatctgggaagacatctttcccaaactgaagttgtgggagttcttccaggtggatgtgaacaaagccgtggagcagttccgcaggcttctgactcaggagaacagaagagtgaccaaatcagaccccaatcagcatctcacaattatccaggacccagagtaccgaagatttgggtgcacggtggatatgaacatcgccctgacgaccttcatccctcatgacaaggggcctgccgccatcgaagagtgttgcaattggttccacaagaggatggaggaactgaactctgaaaaacatcggctgattaactatcatcaggagcaagccgtgaattgtctgctgggaaatgtattctatgaacgtctggcaggtcacggacccaaactgggccctgtcacccggaaacacccactggtcacacgctactttacttttccttttgaggagatcgacttttctatggaggagagcatgatacacctcccaaacaaagcctgttttctgatggctcacaacggttgggtgatgggagacgatcccctgagaaactttgccgaacccggaagcgaggtgtacctgcggcgcgagctgatatgctggggtgacagtgtgaaattgaggtacggaaacaagcctgaggattgcccctacctgtgggctcacatgaagaagtacactgagatcactgccacatacttccaaggggttcgtttggataactgtcatagtaccccacttcatgtggccgagtacatgctggacgctgcccgaaaccttcagcctaatctgtacgtggtggccgagctcttcaccgggagtgaggatctggacaacgtgttcgtgaccaggttgggtatcagcagcctgatccgggaagctatgtctgcttataatagccacgaagagggccggttggtataccgctacgggggcgaacccgtgggatcgtttgtgcagccatgcctgcgccctttgatgccggccattgcccatgcactgttcatggatattacccacgacaacgagtgcccgatcgtacacagaagcgcgtacgacgcactgcctagcacaaccatcgtatccatggcatgttgtgcctccgggagtacaaggggctatgatgaactggttcctcaccagatctcagtggtgtcagaggaacgattctacaccaaatggaaccccgaggcgttacccagcaacacgggggaggtcaattttcagtcaggcatcattgctgcccgatgtgccatttctaagttgcatcaggagttaggggcgaaagggtttatccaggtttatgtcgatcaagtcgacgaagatatcgtggccgttactcgccactccccatccattcaccagtccgtagtggctgtatcacgcaccgctttccggaatcccaagacgagtttttactcaaaagaggtgccccagatgtgtatcccaggcaaaatcgaggaagtggtattggaggcgcgaactatcgaaaggaacacaaagccctatagaaaggacgagaatagcattaacggaacccctgacatcacagtggaaatccgcgaacacatccagctgaacgaaagtaagatcgtcaaacaagccggcgtagctacgaagggccccaacgagtacatccaggagatcgagttcgagaacctttcacctggtagtgttatcatcttcagagtttcacttgaccctcacgcgcaggtcgcggtcggaattctaagaaaccacctcacccagttcagcccacactttaagtccgggagcctggcggtggataacgccgatcccatcctgaagatcccttttgcctccctggcttcacgcctaacactggccgaactcaatcagatcctctaccgttgtgagtccgaggagaaggaagacggtggcgggtgttacgatatacccaattggagcgctcttaagtatgccggtttgcaggggctgatgtccgtcctggccgagattcggcccaaaaatgacctcggccaccccttttgtaataacctccggagcggcgattggatgatcgactacgtctccaaccggttgataagccgaagcgggaccatcgctgaggttggaaaatggctgcaggccatgttcttttatctcaagcagattcccagatacctcatcccctgctatttcgatgccattctcattggagcatacaccacgctgctggacactgcgtggaagcagatgtcttctttcgtccaaaatggttcaacgtttgtgaaacatctgtccctcggcagcgtgcagctctgcggagtggggaagtttccgtctctgccgatcctttctcctgcccttatggacgtaccttaccgactgaatgaaataacgaaagaaaaagagcagtgctgcgtttccttagcagccggactgccacacttcagctccggtatttttcggtgttggggccgagataccttcattgccctgcgtggaattttactaattactggaagatacgtggaagcccggaacatcatcttggcattcgccggaaccttgcgacacgggctaatcccgaacctactcggcgaaggaatttacgctaggtacaactgccgggatgccgtgtggtggtggctgcagtgcattcaggattactgtaagatggttcccaacggcctggacatcttgaagtgtcccgtcagccggatgtatcccactgacgattcagcccccctacccgctggcacgctggaccagcccctgttcgaagtcattcaggaagcgatgcagaaacacatgcagggaattcagtttcgggaacgcaatgcagggccacagattgatcgcaatatgaaggacgaaggcttcaacattacagccggtgtggatgaagaaactggcttcgtttacgggggcaaccgttttaactgcgggacatggatggacaagatgggcgaatcagaccgagccagaaaccggggtattcctgcaacccccagggacgggtccgctgtcgaaatcgtaggactgtccaagtccgcagtacgatggcttcttgaattgtctaaaaagaacattttcccctatcacgaagtgaccgttaaacgtcatggcaaggccattaaggtgtcttatgacgagtggaaccggaaaattcaggataactttgagaaactcttccacgtgtctgaagacccgtccgacctgaacgaaaagcatcccaatctggtgcataagaggggtatctataaggacagctatggggcctccagtccatggtgcgattatcagctccgcccaaactttactattgcaatggtcgtagctccagagctgtttactaccgaaaaggcgtggaaggctctagaaattgccgagaaaaaactactcggcccgctgggaatgaagacgctggatcctgatgatatggtttactgtggaatttatgataacgcactcgataacgacaactacaacctcgctaagggctttaattatcatcagggcccagagtggctctggccaataggttattttctgagggcgaagctgtatttttctaggttgatggggcccgagactaccgctaaaacaatagtactggtcaagaatgtgttatcccgacattatgtccatttggaaaggtccccttggaagggcctaccagagttgaccaacgaaaacgcccagtattgccccttctcatgcgagactcaggcttggtctattgcaacaatccttgagacactgtatgacctt

SEQ ID NO: 6123 - DNA, 4596 bp, synthetic construct
  misc_feature 1..4596: note = source = /note="Description of Artificial Sequence: Synthetic coding sequence"
  source 1..4596: mol_type = other DNA
atgggccattctaagcagattcgcatcctgctactgaacgagatggaaaaactggagaagacactgttccgccttgaacagggatatgaactgcagttcaggctgggcccaaccctccagggaaaggcagtgaccgtgtacactaattatccttttcctggagagacatttaatagggagaaatttcgctctctcgactgggagaaccctactgaacgggaggacgattcagacaaatattgcaagttgaatctacagcagtctggcagctttcagtattacttccttcagggcaatgagaagtccggcgggggatacatcgtagtggaccctattcttagagttggcgccgacaatcatgtcctgccactcgattgtgtgactttgcagacattccttgcaaagtgtctgggtcccttcgacgaatgggaatcacgcctgagagttgctaaagaatctgggtacaatatgattcacttcacccccctccagaccctgggtttaagtcgatcttgttacagcttagctaaccagctggaattgaaccctgattttagtaggccaaaccggaagtatacatggaacgacgtggggcaactggttgaaaaacttaagaaagaatggaatgtaatttgcatcacagacgtcgtctacaaccacaccgcagctaacagtaagtggatccaagaacaccctgaatgcgcctataatctcgtgaactccccccacctaaagcccgcctgggtgctggacagagctctgtggcgcttcagctgcgacgtcgctgaaggcaagtacaaagaaaagggtatccctgccctcatcgaaaacgatcaccatatgaactccatccggaaaatcatttgggaagacatatttccaaaactgaagctctgggaattttttcaggtggatgtcaataaagcggtcgagcagttccgccgcctactcacacaggaaaatcgcagggtgacgaaatccgatcctaatcagcacttaacgattattcaggacccagaatatcggcggtttggctgcacagtggacatgaacattgctttgaccaccttcattccgcatgacaagggacccgcagcaattgaagaatgttgcaattggtttcacaaaagaatggaggagctgaatagcgaaaagcatcgactcatcaattaccatcaagagcaggctgtcaattgtctgttgggtaatgtcttctacgagcggctggccgggcatgggccaaaactagggccagtgactagaaaacatccgctggtcacaaggtacttcacttttcccttcgaagaaatcgacttcagcatggaagagtctatgatccacctgccgaacaaggcttgttttcttatggctcacaacggctgggtgatgggtgatgatccccttcggaacttcgcagagcccggaagtgaggtgtatctgaggcgggagcttatctgctggggagactctgttaagttacgatatggaaacaaaccagaggactgtccttacctgtgggcacatatgaagaagtatacggaaattacagccacctacttccagggtgtacgactcgacaattgtcactcaacccccctgcacgtcgccgagtacatgctggatgcagctcgaaacctccagcctaacctttacgtcgtggccgaactttttactggatcagaggaccttgacaacgttttcgttacccgactgggcatcagttccctaatccgggaggcgatgtctgcgtacaactcacacgaggaaggacggctcgtgtacaggtacggcggagaaccagtcgggtcatttgtgcagccctgtctccgtccgctgatgcctgctattgcacacgcgctctttatggatattactcacgacaatgagtgtcctatcgttcatcgaagtgcctatgacgctttgcctagtaccacaatcgtaagcatggcttgctgtgcctctgggtctacccgcggctatgacgagttagtgcctcaccagatctctgtcgtctcagaggagcgcttttacactaagtggaatccggaagcactcccgtccaacaccggagaggtgaattttcaatctgggatcatcgctgccaggtgcgctatctcgaagctgcatcaggaactcggagccaaagggttcattcaggtatacgtggaccaggttgatgaagacatagttgcagtgacaagacatagcccgtcaatacaccagtccgtggtggctgtcagccgaacagcattccgtaatcctaagacctccttttatagcaaggaagtgcctcagatgtgtatcccaggaaaaattgaagaggtcgtgcttgaggctagaacaattgaaagaaacacaaagccttaccggaaggatgagaactctattaatggcactcctgatatcactgtggaaatccgtgagcatatccaattaaatgagagcaagattgtcaagcaggcaggcgtggcaacgaagggccctaatgagtacatccaggagattgaattcgaaaacctgagcccagggagtgttatcattttcagggtttcactcgatccccatgcacaggttgccgttggcatcctgcgaaaccatctgacccaattcagtccccatttcaagagcggctctcttgcagtggataatgctgatcctatcctgaaaataccctttgcctctcttgcgagccgtctgaccctagctgaactgaaccaaatcctctaccgctgcgagtccgaggaaaaggaagacggaggtggttgctatgacatcccgaattggtccgctctaaagtacgctggcctgcagggcctgatgagcgtcctcgccgaaatccgcccaaagaacgaccttgggcacccgttttgcaacaaccttcggtctggagattggatgatagattacgtcagcaatcggctgatctccaggtccggaactattgcagaagtgggcaagtggttacaggctatgtttttctacctcaagcagattcctaggtatctcattccctgctacttcgatgccattcttatcggcgcctatactacgctgctggacactgcctggaagcagatgtctagctttgtccaaaacggaagcactttcgtcaagcacctgagtttagggtcagtgcagctctgtggggtgggtaagtttcccagcctgcccatcctgagtcctgcactcatggatgtgccttaccgcttgaacgagattaccaaagagaaggagcaatgctgtgtgtctttggctgccggtctgccccatttttccagtggtatcttccgatgctggggacgtgatacttttatcgcccttagaggtatcctattgatcacagggcgttacgtcgaggctagaaacattattttagcctttgccgggacactgcggcatggcctgatccctaacttgctgggagagggtatctatgctaggtataattgtagggacgcagtatggtggtggttacagtgcatccaagattattgcaagatggtccccaacggacttgacatcttaaagtgccctgtctcccgcatgtaccctaccgacgactccgcccccctgccagctggaactctcgatcagccgcttttcgaggtgatacaagaggctatgcagaagcatatgcagggtatccagtttcgggagcgcaatgcaggcccacagatcgaccgcaatatgaaggacgaaggctttaacatcactgcaggcgttgatgaggagaccggattcgtgtacgggggtaatcgattcaactgcgggacctggatggataaaatgggggagagtgatcgggcgcggaatcgtggcataccggctaccccccgggacgggtcagctgtagagatagttggactgtctaaatcagctgtgaggtggctcttggaactgagtaaaaaaaatatattcccataccacgaggtcacagtcaaaaggcacggaaaggctatcaaggtgtcatacgatgagtggaatcgcaaaatccaagataatttcgagaaactgttccacgtgtccgaagatccttcagatctgaatgagaaacatccaaacctcgtccacaaacgggggatctataaggattcgtatggagcttcttccccctggtgcgattaccaactccggcccaatttcacaattgcaatggtggtggcccctgagctgtttactactgagaaagcttggaaggcactggagattgccgagaagaaactcttaggtcctctgggtatgaagacccttgatccagatgacatggtatactgcggcatctacgacaacgccctcgataatgataattataacctcgcaaagggttttaattaccatcaggggccagagtggctgtggcccatcggttacttcctccgggcaaagctgtacttcagtcgtctgatgggccccgagactacagccaagactatcgtgctcgtgaagaacgtgctttctcgccactacgtgcatctggagcgaagcccttggaaagggctaccagaattgaccaatgaaaatgcacagtactgtccattttcttgcgagactcaggcgtggtctatcgctaccatcttagagacactgtacgacctg

SEQ ID NO: 6124 - DNA, 4596 bp, synthetic construct
  misc_feature 1..4596: note = source = /note="Description of Artificial Sequence: Synthetic coding sequence"
  source 1..4596: mol_type = other DNA
atgggacacagcaagcaaatacgcatactgttacttaacgaaatggagaagctcgagaaaaccctgttcaggctagagcaaggatacgaattacagtttagactgggccctactctgcaggggaaagccgttaccgtgtacacaaattatccttttccaggagaaacattcaaccgcgagaagtttagatctttggactgggagaatccaaccgaaagagaggatgatagtgacaagtattgcaagctgaacctgcagcagtctggctcgtttcagtactacttcctgcagggaaacgaaaaatcaggtggtgggtatatcgtggtggaccccatcctgcgggtgggcgccgataaccacgttttgcccttggactgcgttacactacagactttcctggcgaaatgtctcggacctttcgacgagtgggagtctcggttacgcgtggctaaggagtctggctataacatgattcattttacccccttgcagaccctaggactcagccgctcttgttattccttagcgaatcagctggagctgaatcctgacttctctaggcctaaccgcaaatatacatggaatgatgtgggccaactggttgagaagttgaagaaagagtggaacgtcatctgcatcaccgacgtcgtttacaaccacactgctgccaattcaaagtggatccaagagcacccagagtgcgcatacaatctggtcaactccccacacctgaagcccgcgtgggtgttggatagagccctatggcgcttcagctgcgatgtggcagagggaaagtacaaagaaaagggcatccccgcactgattgagaatgatcaccacatgaactctatccggaagatcatttgggaagatatattccctaaacttaaactgtgggagttcttccaggtcgacgtgaataaagcagtggaacagttcagacggctccttacacaggaaaatagacgcgtaactaagagcgacccaaatcagcacctcactattatccaggaccccgaataccggcggtttggctgcaccgtggatatgaacatcgcactgactactttcataccccatgataaggggcctgctgcaattgaggaatgctgtaattggttccataaaaggatggaggaactcaatagcgagaaacaccgtttaatcaattatcatcaagagcaggctgtaaattgccttctgggcaacgttttctatgagcggttggctgggcacggacctaaattgggtccagtcacccggaagcatccgcttgtgacaaggtactttacctttccattcgaggagatcgatttctccatggaagagtccatgatccacctaccaaacaaggcctgtttcctgatggcccataatgggtgggtgatgggggatgatccgttaagaaatttcgctgaaccgggctcagaggtgtacttacgccgtgagttgatctgctggggtgactcagtgaaactcaggtacggtaacaagcctgaagactgcccctacctgtgggcccacatgaagaaatacaccgagataaccgcaacatattttcaaggggtccgattagacaactgccatagcactcccttacacgtggcagagtacatgttggacgccgcccgtaacttgcagcctaatctgtacgtcgtggccgagctattcactggatctgaagacctcgacaacgtgttcgtcactagattgggaatcagctccttgattagggaggccatgagtgcctacaactcgcatgaggaggggcgtctggtgtatcggtatggcggggagcccgtgggctccttcgtccagccatgtctgaggcccttgatgcccgctattgcccatgctctgtttatggatattactcacgataatgagtgtcccattgtgcatcggtccgcctatgacgcccttccaagtaccactatcgtgtctatggcgtgctgcgccagcggttctacacggggatacgacgaactggtgccacaccaaatctcagtggtgtcagaagagaggttctacaccaagtggaaccccgaggcgctgccgtctaacactggggaggttaacttccagtccggcatcatagcagcgaggtgcgccatatccaagctccatcaagagctgggggctaaaggttttatacaggtctacgttgaccaggtagacgaagacattgtggcagttaccaggcattcaccaagtatccaccagtctgtggtggccgtgagtcgcactgctttccggaacccaaaaaccagcttttatagtaaggaggtgccacagatgtgtattcctgggaagatagaggaagttgttttagaagctaggactatcgaacgcaacaccaaaccttatagaaaagatgagaactccatcaacggaacacccgatataactgtcgagatcagggagcacattcagctgaatgagagcaaaatagtgaagcaggcgggcgtagccactaagggtccaaacgaatacatacaggaaattgagtttgaaaatttgtcgccaggatccgttataattttcagagtgtccttggatccgcacgcccaggtggcagtgggcattctgcgtaatcatctgacacagttctccccgcactttaagagcgggagcctggctgtcgacaacgccgacccaatcttaaaaattccatttgcttctctggctagcagactcacccttgccgaactcaatcagattctgtataggtgtgaatccgaagaaaaagaggatggagggggttgttacgatatccccaactggtcggcccttaagtacgccggacttcagggtttgatgtctgtgctggctgagatacggccgaaaaacgatttaggacaccccttttgtaataacttgcgtagcggggactggatgatcgactacgtctccaatcgactgatctcaaggtccggtacaattgccgaggtgggaaagtggctgcaagctatgtttttttatcttaagcagattcctaggtatttaattccgtgctattttgacgctatcttgatcggagcgtataccacacttctagacaccgcatggaaacagatgagcagttttgtccagaatggttcaacctttgtgaaacacttatcactgggatcggtgcagctgtgcggcgttgggaagttcccttcattgcctattctgtctccagcactaatggacgtcccgtaccgcctcaacgagatcacgaaggaaaaagaacagtgttgcgtctctctggctgctggcctccctcacttcagttcagggatttttcgctgctgggggcgggatactttcattgccctgcgcggcatccttctgatcactggccgctacgtggaggcccgaaacatcattctggcctttgccggtaccctgcgacatggactgattcccaatctcctgggcgaaggaatttacgcaaggtataactgcagagatgcagtgtggtggtggttgcagtgcatccaggattactgcaagatggttcctaacggcttagacattctcaagtgccccgtgtccaggatgtaccccactgacgattccgcccccctgccagccggaacactcgaccagcctctttttgaagtgattcaggaagccatgcagaagcatatgcagggcatacagttccgcgagcgaaacgccggccctcaaattgatcggaacatgaaagatgaaggattcaacatcactgcgggggtcgatgaggagactggtttcgtgtatggcgggaatagatttaactgtggaacttggatggacaaaatgggggagtctgacagagctcggaaccgagggataccggctacacctcgtgacggctctgctgtggagatcgtcgggctatctaaaagcgccgtgcggtggcttttagagctatctaaaaagaacatcttcccttaccatgaagtgaccgtgaaacgccatggaaaggcaattaaggtgagttacgatgaatggaatagaaagatccaggataattttgaaaaactgtttcacgtttcagaagacccaagtgatctcaatgaaaagcatccaaacttggtccataaaagaggaatttataaggactcatatggcgccagtagcccatggtgcgattaccagttacgccccaacttcacaattgcgatggttgtggcccctgagcttttcacaaccgagaaggcctggaaggcacttgagatcgccgagaaaaaactactcgggccgcttggcatgaagactctcgatccagacgatatggtatattgtggaatctatgacaatgcccttgataatgataactacaacttggccaagggattcaactatcatcagggcccagaatggctgtggcccattggatacttccttcgcgctaagctgtatttttcacgactgatgggtccagagaccacagccaaaaccatcgtactagtaaaaaatgtgctgtcacggcattacgtgcaccttgagcgcagtccttggaaaggcctgccagagctcacgaatgagaacgcacaatactgccccttcagttgtgaaacgcaagcatggtctatcgcgacaattctggaaacactgtacgatctc

SEQ ID NO: 6125 - DNA, 4596 bp, synthetic construct
  misc_feature 1..4596: note = source = /note="Description of Artificial Sequence: Synthetic coding sequence"
  source 1..4596: mol_type = other DNA
atgggacactccaagcagataagaattctcctgttgaacgagatggagaaactcgagaaaaccctgttccggcttgaacagggatatgagcttcaatttcgactggggccaactctgcaggggaaggcagtgacagtttacacaaattatcctttccctggggagaccttcaacagagaaaagttccgatcgctggactgggaaaatccaactgagcgagaggatgattccgacaagtactgtaaattgaatctccagcagtcaggcagtttccagtactattttctacaagggaatgagaaatccggaggcggatatatcgtggtggatcctattcttcgcgtcggcgccgataaccatgtgctgcctttggactgcgttacgctgcagacattcctcgccaagtgtctgggtccttttgacgagtgggagtctcggctcagagtcgcaaaggaaagcgggtacaacatgatccatttcacaccacttcagaccttggggctttcaagaagctgctattcactggccaatcagctggagctgaaccccgacttctctaggccgaatcggaagtatacttggaatgatgttggacagctcgtcgagaagttgaagaaggagtggaacgtaatctgtatcaccgacgtggtttacaaccacactgccgctaattctaagtggatccaagagcacccggagtgcgcttataacctggtaaattctcctcacctgaagcctgcctgggttctggacagagctttatggaggttcagttgtgacgtcgcagagggcaagtacaaagagaagggcatcccagccttaatcgagaatgaccatcacatgaacagcatcagaaaaattatctgggaggatatttttcccaaactgaaactgtgggaattttttcaggtcgatgttaacaaggccgtggaacagtttagacgcttgttgacgcaggagaataggcgagtgacaaaatctgatccaaaccagcatctgaccatcattcaggatccagagtacaggaggtttggctgtactgtcgacatgaacatagccctcaccacttttattccccacgataaggggcctgccgcaattgaggagtgctgcaattggttccacaaaagaatggaagagctcaatagcgagaagcacagactgattaattatcatcaggagcaggctgtcaattgcctgctagggaatgtgttctacgagaggctggccggacacggtcctaaactcggacctgtcacacgtaagcatcctctggtgacccgctattttacctttcctttcgaggaaatagactttagcatggaggagagcatgatacacctaccaaataaagcctgctttttgatggctcataatggctgggtgatgggggatgaccctctgcggaactttgctgaaccagggagcgaggtatacctgaggcgggagcttatctgctggggggactcagttaagctgagatatgggaacaagcccgaggactgcccctacttgtgggcccatatgaaaaagtataccgaaatcacggctacctatttccagggggtgaggctcgacaattgtcacagcacaccactccacgtggcggaatatatgctagacgcagcacggaacttacagcccaacttgtacgtcgtggctgagctgtttaccggaagcgaggatctcgacaacgtgtttgtaactcgcctgggtatctcctcgctcatccgggaggcgatgagtgcgtacaacagccatgaggaggggagacttgtttatcgttatggaggtgagcccgtgggcagtttcgttcagccctgcctgcgcccacttatgccagcgattgctcatgccctgttcatggacattactcatgataatgagtgccccatcgtgcaccggagtgcgtacgatgcactgccgagcaccaccatcgtaagcatggcatgttgtgcatccggcagcacccgcgggtacgacgaacttgtcccgcaccagatcagcgtggtcagcgaagaacggttctacacaaaatggaaccctgaggcgctgccctccaacaccggcgaggtaaactttcaatccggcattattgcagcacggtgcgctatcagcaaactgcaccaggaactgggcgccaagggattcatacaggtttacgtagaccaagtggatgaagatatagtagctgttaccaggcacagcccttccatccaccagtcagtggtggcagtgtctaggactgccttccgaaaccccaagacctcattttatagcaaggaagtgccccagatgtgcatcccaggaaagattgaggaagtggtgctggaggctaggaccatcgaaagaaatacaaaaccgtatcggaaggatgaaaactccatcaacggtactccagatattaccgtggagatcagagagcacatccagctgaacgagtctaaaattgtcaaacaggccggagttgccactaaggggccaaacgagtatatacaagagattgaatttgagaatttatctccaggctccgttattatcttccgcgttagcttggacccccacgcccaggttgctgttggcatccttagaaatcatctgacacagttcagcccccacttcaaatcaggatctcttgccgtggataacgctgatccaattctcaagatccccttcgccagtctcgctagccgtctgactctggcagagttgaatcaaatattatatagatgtgagagcgaggaaaaggaggatggcggtggttgttacgatatccctaattggtcagctcttaaatatgccggattgcaaggtcttatgtcagtgctggccgaaatccgccccaagaacgacctcggtcacccgttttgtaacaatttacggtccggggactggatgatcgattatgtcagcaacaggcttatcagcagaagtggcaccatcgctgaagtcgggaagtggctccaggccatgtttttctatttgaagcagattccgagatacctcatcccctgttactttgatgctatcttaattggagcatacaccactcttctggataccgcttggaagcagatgtcctcctttgtgcagaatgggtctacctttgtgaagcatctatctctgggaagcgtgcaactctgtggggtggggaaattccccagtcttcctatcctcagcccggcactgatggacgtaccctaccggctcaacgagataactaaagaaaaggagcagtgctgcgtttctctggctgcagggctgccgcacttcagctccggcatcttccgatgctggggcagggacacttttatcgccctcaggggtatactgttaattaccgggaggtacgtggaagcccgaaacattatccttgctttcgccgggacactgagacacgggctcatccctaatctgctgggcgaggggatctatgcccggtacaactgccgggatgccgtttggtggtggctgcagtgtattcaggactactgtaaaatggttcccaatggcctcgatattctgaagtgtccagtttcgcggatgtaccctacagatgacagcgcacctctccccgccggtacactggaccagccactgtttgaggtcatccaggaggctatgcagaagcacatgcaggggatccagtttcgtgagcgaaatgctggaccgcaaatcgataggaacatgaaggatgaaggtttcaatatcaccgctggcgtggacgaggaaaccgggttcgtttatggagggaacaggttcaattgcggcacttggatggataaaatgggcgagagcgacagagcgaggaacaggggcattcctgccacccctagggatgggtcagctgtcgaaatcgttggactgtccaaaagcgccgtgaggtggttgctggaactgagtaaaaaaaatattttcccctatcatgaagttactgtgaagagacacgggaaggctatcaaagtgagttatgacgagtggaatcgtaagatccaggacaatttcgagaagctgtttcacgtgtctgaggatccgtccgatctgaacgaaaagcaccccaatctggtgcacaagcggggtatctataaggattcctatggtgccagcagcccttggtgtgattaccagctgcggccaaactttacaatagccatggtcgtggcgcctgaactcttcacgactgagaaagcctggaaggcgctggagatcgccgagaaaaaattgctgggccccctcggcatgaaaaccctggacccagacgatatggtttattgcggaatttacgacaatgcactggacaatgacaactataatcttgccaagggctttaattatcaccaaggacccgaatggctatggcccataggctatttcctgagggccaagctttacttctctcggttgatgggcccagagaccactgccaagaccattgtcctggtgaaaaacgtcctttcacgccattatgtacacctggaaaggtcaccctggaaaggcctccccgaattaaccaatgagaacgcacagtactgtccattcagctgtgagacccaggcttggagtattgcgaccattttggaaacactgtacgatctg

SEQ ID NO: 6126 - DNA, 4596 bp, synthetic construct
  misc_feature 1..4596: note = source = /note="Description of Artificial Sequence: Synthetic coding sequence"
  source 1..4596: mol_type = other DNA
atgggacattcgaagcaaattaggatcttgcttctcaatgaaatggagaaacttgaaaagaccctgttcagacttgaacagggctacgagctccaatttcgcctcggaccaaccttgcaaggcaaggctgtgacggtgtacactaattacccttttccgggcgaaacctttaacagggaaaagttcagatctcttgactgggaaaaccctactgagcgagaggacgattcggacaaatactgtaagctgaatctgcaacaatccggctcgtttcagtactatttcctgcagggaaacgagaagtcgggaggcggctacatagtcgtggacccaattctgcgggtgggagcggacaaccatgtgctgccactcgactgtgttaccctgcaaaccttccttgcaaaatgcctcggacccttcgatgaatgggaatccaggctgagggtggccaaggaatcgggttacaatatgattcatttcacgccactgcagactctcgggctttcccgatcatgttactcactggccaatcaactggaactgaaccctgatttcagccgaccaaacaggaagtacacctggaatgatgtgggtcaacttgtggaaaaactgaagaaagaatggaatgtgatttgcatcactgatgtggtctacaaccatacggctgcaaactccaagtggattcaagaacatcccgagtgtgcatacaatctggtgaattcgccacatctgaaacccgcttgggtgctcgatagggcattgtggagattttcatgtgacgtggctgaggggaagtacaaggaaaagggaatcccggcactgattgagaacgatcaccatatgaacagcattcgcaaaatcatatgggaggatatcttcccaaaacttaaactgtgggaattcttccaagtcgatgtcaataaggcggtggaacaatttagaaggttgcttacgcaagaaaataggagagtcacgaagtcggatcctaatcaacacctcaccatcatccaggatcctgagtaccgccgcttcggatgtaccgtggatatgaatattgccctgactaccttcattcctcatgacaagggacctgctgccatcgaggagtgctgcaattggttccataagcgtatggaagagctgaattccgaaaaacatagacttatcaattatcaccaggaacaagcagtgaattgtctgttgggcaatgtgttttacgagagactcgcaggtcacggtcctaagctgggacccgtcacccgcaagcatccactcgtcacgcgttactttacctttccattcgaagaaatcgattttagcatggaggaatctatgatacatctccctaataaggcatgcttcctgatggcacacaacgggtgggtgatgggggatgaccctctcagaaactttgcagagccaggatccgaggtctacctgcgacgcgagcttatttgttggggtgacagtgtgaaacttagatacggaaacaaaccagaggactgtccatacctgtgggcacacatgaagaaatacaccgaaatcaccgcaacttactttcaaggtgtgagacttgacaattgccatagcactcccctccacgtggcggagtacatgcttgatgcagcccgaaacctgcaaccgaatctgtacgtggtcgcagaactttttaccggatcagaggaccttgataacgttttcgtgaccagacttgggatttcttcgcttattcgagaggcaatgagcgcctataactcccatgaggagggtcgccttgtctacagatacggcggagagccagtgggttcgttcgtgcaaccttgcctccggccccttatgcccgcaatagcacatgcgctctttatggacattactcatgataatgaatgtccaatcgtgcatcgctcagcctacgatgccctcccatcgactactattgtaagcatggcttgctgcgcgagtgggtcaactcgcggttacgacgaactggtcccacaccagatttcggttgtctcagaagaacggttttacaccaagtggaacccagaggcccttccatcaaatactggggaagtgaacttccaaagcggaatcattgcggcacgatgtgcgatctccaagctgcatcaggaacttggagcaaaaggattcatccaggtttacgtggatcaagtggacgaagatatagtggcagtgaccagacactcgccatcgattcatcagtcagtggtcgctgtctcccgcacggcgtttcggaaccctaagacctcattttactccaaggaggtgccacagatgtgcatccctgggaaaatcgaagaggtggtcctggaggcacgaacgattgagcggaacaccaagccttataggaaggatgaaaacagcattaatggaacccctgatatcactgtggaaattagagaacatatccagctcaacgaatccaaaatagtgaaacaggcaggagtcgcaactaaagggcccaacgagtacattcaagagattgaatttgagaacctttcgccgggctcggtcataatctttagagtcagcctggatccacacgcccaggtggcagtggggattcttcgcaaccaccttactcaattttccccccacttcaagtcgggatcgctggcggtcgacaatgcagatcccattttgaagatccctttcgcatcacttgcaagccgattgacgcttgcagaacttaaccagattctgtaccgttgtgaaagcgaagaaaaggaagatggaggagggtgttacgatattccgaattggagcgctttgaaatatgcgggacttcagggtcttatgtcagtcctcgcagagatccggccgaagaatgacttgggacatccattttgtaataacctgagaagcggcgattggatgatcgactacgtgtcaaatcggcttatctccagatctggcaccatcgcggaggtgggtaagtggctgcaggcgatgttcttctacctcaagcagataccgcgttatctgataccttgttacttcgacgcgattcttattggagcttatacgaccctgctggacaccgcatggaaacaaatgagctcgtttgtgcagaatggcagcacctttgtgaaacatctttccctcgggtcggtgcaactgtgcggcgtcggaaagtttccatcactgcctatactgtcgccagcacttatggatgttccttacagactcaacgagattaccaaagagaaggagcagtgctgtgtctcccttgccgcaggattgccacatttctcgagcggcatattcagatgttggggccgggatacctttattgcgctgcgcggaatactgcttatcaccggacgatacgtggaagcgcggaacattattcttgcatttgcaggcactctgagacatggacttattcctaatctgctcggtgaggggatttacgcacgatacaactgtcgcgatgcagtctggtggtggcttcagtgtattcaagactactgtaagatggtccccaacggactggacattctgaaatgcccagtgtcacgtatgtaccccactgatgactccgcaccactgccagccggtacgctggaccagcctctgtttgaagtgatacaagaagccatgcagaagcacatgcaaggaatccaattcagggaaaggaacgctggccctcaaattgatagaaacatgaaggatgaaggcttcaacattaccgccggagtggatgaagaaaccggttttgtctacggaggaaacagattcaactgtggtacgtggatggacaagatgggggaaagcgatagggcccgcaataggggaatacccgctactccccgtgatggctcagccgtcgaaatcgtgggactgtcgaagtcggcagtgcggtggttgcttgaactttcgaagaagaatatcttcccttaccatgaagtgaccgtgaagagacacggaaaggccattaaggtgtcatatgacgaatggaataggaaaatccaggataactttgaaaagctctttcatgtgtcggaggatccttcagacctgaatgaaaagcacccaaacctggtgcataagagagggatctacaaggactcatacggagcatcttccccatggtgtgactaccagctgcggccaaacttcaccatcgcaatggtggtggcaccagagctttttaccactgagaaggcatggaaggcgttggagatcgcggagaagaaactgcttggaccgctggggatgaaaacgctggatcccgatgatatggtgtactgtgggatctacgataacgcactggacaatgataactacaacttggcgaaaggctttaactaccaccaaggcccagaatggctgtggccaatcggttacttccttcgtgccaagctctatttctcccgcctcatgggcccagaaactactgccaaaactatcgtcctcgtcaaaaacgtgctgagtcgccattatgtgcatctcgaaagaagcccttggaaggggctgccagaactgaccaacgagaacgcacagtactgcccctttagctgtgaaactcaagcctggtcaatagcaactattctggaaaccctttacgatctg

SEQ ID NO: 6127 - DNA, 4596 bp, synthetic construct
  misc_feature 1..4596: note = source = /note="Description of Artificial Sequence: Synthetic coding sequence"
  source 1..4596: mol_type = other DNA
atgggacacagcaagcagatcagaatcctgctgctcaacgaaatggagaagctggaaaaaacgctgttcaggcttgagcaaggctacgaactgcaatttcgccttgggccgaccctccaaggcaaggcagtgactgtctacactaattaccctttcccgggagaaaccttcaaccgggaaaagtttagaagcctggactgggagaatccgactgaacgcgaagatgattcagacaagtactgcaagctcaacctgcagcagtccggatcctttcagtactactttttgcagggaaacgaaaagagcggtggcgggtacattgtcgtcgaccctatcctccgggtgggagccgacaaccacgttctgccacttgactgtgtgacgctgcagaccttcctcgccaagtgcctggggcctttcgatgaatgggagtcgcgccttagagtcgctaaagaatcaggctacaacatgatccacttcaccccactgcaaactctcgggctgtcgcggagctgttattcgctggcaaatcagctcgaactcaacccagatttttccaggcccaatagaaaatacacttggaacgacgtcggtcaactggtggaaaaactcaagaaggaatggaacgtgatctgtatcaccgatgtggtgtacaatcataccgcggcgaactcgaagtggattcaggaacacccggaatgcgcgtataatcttgtgaattcgccccacctcaagcccgcttgggtgcttgatcgcgccctgtggagattctcctgtgatgtggcggagggaaagtacaaagaaaagggtatccctgccctgattgaaaatgaccaccacatgaattcaatccggaagatcatctgggaagatatttttccaaagttgaagctgtgggaattcttccaagtcgatgtcaataaagcagtggagcagttccgtcgcctccttactcaggaaaataggagagtgaccaaatccgatcctaaccagcacctcactatcatccaagacccagagtacagacgcttcggatgcactgtagacatgaacattgcactcactactttcatcccgcacgacaagggaccagccgccatcgaagagtgttgtaactggttccacaaacggatggaggaactcaatagcgaaaagcaccgactgatcaattaccaccaggagcaagccgtgaattgcctcctcggcaacgtgttctacgagaggctggctggccacggcccgaagctgggaccggtcactcggaagcaccccctcgtcaccagatacttcacgttcccttttgaagagatagatttcagcatggaagagagcatgatccatctgcctaacaaggcgtgcttcctcatggcccacaacggttgggtgatgggagacgatcctctgagaaatttcgccgaaccgggttcggaggtgtacttgcgccgcgaattgatctgctggggtgactcagtcaaactgagatacggcaataagccggaggactgcccgtacctctgggcccacatgaagaaatacaccgaaattaccgctacctattttcagggagtgagactggataactgccactcaactccgctgcatgtcgcagagtacatgctggacgcagcccgcaacctccaacccaacctctacgtggtcgcggaactgtttacgggctcggaagatctggacaacgtgtttgtgactcggttgggcatttcctcgctgatccgggaggccatgagcgcatataattcacacgaggagggacggttggtttatcgctacggcggagagcctgtcggatctttcgtgcagccatgccttaggccactgatgcctgcgatcgcccatgccctttttatggacatcactcatgacaacgagtgcccgattgtccataggagcgcctacgacgccctgcccagcaccaccatcgtgtcgatggcttgctgcgccagcggatcaaccagggggtacgacgaattggtgccgcatcagatctccgtggtgtcggaggaacggttctacaccaaatggaacccagaagcgctgccctccaacaccggggaggtgaacttccaatcgggtatcatcgcggccagatgtgccatctccaagctgcatcaagagcttggagccaaaggatttatccaggtttacgtcgatcaagtggacgaggatatagtggcagtgacccgccactccccgtccatccaccagagcgtggtggctgtgtcaagaaccgcattccgcaatcccaagactagcttctactcgaaggaggtcccgcagatgtgcatccctggcaaaatcgaagaggtggtcctcgaggcccgcactatcgaacggaacacgaagccataccgcaaggacgagaactcgatcaacggaactccagatattactgtggaaatccgcgaacacatccagctgaatgaatcaaaaatcgtgaagcaggcaggagttgccaccaagggaccgaacgagtacatccaagaaatcgagtttgagaacctgagtccgggaagcgtgatcatctttcgggtgtccctggacccgcacgcgcaggtcgccgtcggtattctccgaaaccatctgacccagttctcgccacatttcaagtcgggatcactggctgtcgacaatgcggacccgatcctgaagatcccgttcgcgtcgctggcctcgcggctcactctggcagagctcaatcagatcctctaccgttgcgagtccgaagaaaaggaagatgggggaggatgctacgacatccctaactggtcggccctgaagtacgcgggactccagggattgatgtccgtgctggccgagattaggccgaagaacgacctgggacatcccttctgcaacaacctccgctcaggcgactggatgatcgattacgtctccaatcggttgatctcgcgcagcggaaccatcgctgaagtgggaaagtggctgcaagctatgttcttctacctcaagcaaatcccacggtaccttatcccgtgttactttgacgcaatcctgatcggagcctacaccactctgcttgacactgcgtggaaacaaatgagctccttcgtgcaaaatggatccacgttcgtcaaacatctttcattgggctcagtccagctgtgcggagtgggcaagttcccgtcgcttcccattttgtcgcctgccctcatggacgtgccgtaccgcctgaacgaaatcaccaaggagaaagaacagtgctgcgtgtctctcgccgctgggctgccacacttctcatcgggaatttttcggtgctggggtcgcgataccttcatcgctctcaggggcattctgctgatcaccggtcgctacgtggaggcacgcaatatcatcctggccttcgcgggaacgctgcgacacgggttgatcccgaacctcctgggggagggaatttacgcacgctacaactgcagggacgcagtctggtggtggttgcagtgcatacaggattactgtaagatggtcccaaacggactggatatcctcaagtgcccagtctcccgcatgtacccgaccgatgacagcgcaccgcttcctgctggaactctcgatcagcctctcttcgaagttatccaagaagccatgcagaagcacatgcaaggaatccagttcagagaacggaacgccgggccgcagatcgaccgcaatatgaaagacgagggcttcaacatcactgctggagttgacgaagaaactggtttcgtgtacggtgggaatcggttcaactgtggaacctggatggacaagatgggtgaatcagaccgggcccgtaacagaggaatcccggctaccccacgcgatggctccgcggttgaaatcgtggggctctcgaaatcggctgtgcggtggctgctggagctgtccaagaaaaacattttcccataccatgaagtgaccgtgaagagacacggcaaggcaattaaggtcagctatgacgaatggaaccggaaaatccaagacaacttcgagaaactcttccacgtgtctgaggacccatccgacctgaatgagaagcatcctaacctggtgcataagcggggcatctacaaagactcatatggcgcgtcctccccctggtgtgattaccagctgcgaccgaacttcactatcgcaatggtggtggccccggaactctttaccaccgagaaggcgtggaaggcgctggagatcgccgaaaagaaactgctcggaccgctgggaatgaaaaccttggatccagacgatatggtgtactgcggcatttacgataatgcactggacaatgataactacaatctggccaaggggttcaactaccatcaaggaccggagtggctctggccgatcggatactttctgcgagcgaagctgtacttctcccgcctgatgggcccggaaacgaccgccaagaccatcgtgctggtgaagaatgtcttgagccggcattacgtgcatctggaacgcagtccctggaaaggcctgcctgagttgactaacgaaaacgcgcagtattgcccatttagctgcgagactcaggcttggtcgatcgcgactatcctcgagactctgtacgacctg

SEQ ID NO: 6128 - DNA, 4596 bp, synthetic construct
  misc_feature 1..4596: note = source = /note="Description of Artificial Sequence: Synthetic coding sequence"
  source 1..4596: mol_type = other DNA
atgggacattctaaacaaatccgcattctgctcctgaatgaaatggaaaagctggaaaaaaccctgttccgcctggagcagggctacgagctgcagttccgtctcggtccgaccctccagggaaaggcagtgacggtctacaccaattaccccttccctggcgagactttcaaccgtgagaaatttcgatcgctcgactgggagaacccgactgaaagggaggatgattccgacaagtactgcaagctcaacctgcagcaatccgggtcttttcaatactacttcctccaaggaaatgaaaaatcggggggcggctacattgtcgtggaccctattctgcgcgtaggagcagacaatcatgtgctcccactcgattgtgtgactctgcaaaccttcctggcgaaatgcctcggaccgtttgatgaatgggaatcgcgcctccgcgtcgccaaggagagcggctacaacatgatccacttcaccccactgcagacgctgggattgtcgcggtcttgctactcgctggccaaccaactcgaactgaacccggacttctcacgccctaaccggaaatacacctggaacgacgttgggcaactcgtcgaaaagctgaagaaggaatggaatgtgatttgtataacggatgttgtgtataaccataccgctgccaactcgaagtggatccaggagcatcctgagtgcgcttacaatctggtgaactcgccacatctcaagccggcctgggtcttggatcgagcactctggcgcttctcgtgcgacgtcgccgaaggtaaatacaaggaaaaaggcatccccgctctgatcgaaaacgaccaccatatgaattccatccggaagataatctgggaggacatcttccctaaacttaagctctgggaattctttcaggtggacgtcaataaggcagtggagcagttccggcggctcctcactcaggagaacagacgggtcactaagtcagatcccaatcagcacttgaccatcattcaggacccggaatataggcggttcggatgcaccgtggacatgaatatcgccctgacgacctttattcctcacgataagggcccggctgcgatcgaagaatgctgtaactggtttcacaagagaatggaagaactgaattctgaaaaacaccgcctgatcaattaccaccaggagcaggccgtgaattgtcttttgggcaacgtcttttacgagagactcgcaggccacggaccgaagttgggaccagtgacccgcaagcacccactggtgacccgctacttcaccttcccttttgaggagatcgacttctcgatggaagagtccatgatccacctgccgaacaaggcctgctttctgatggcacataacgggtgggtgatgggagatgatcctctcaggaacttcgctgagccagggtccgaagtttacctccggcgcgagctcatttgctggggggattcagttaagctccgctacggaaacaaaccggaggattgtccctacctgtgggcgcatatgaagaagtacactgaaattactgccacctactttcagggcgtgagactggacaactgccattccaccccgctccacgttgcggaatacatgctggacgcagcaagaaacctgcagccaaacctttacgtggtggcagaactgttcactggatcagaggatctggataacgtgttcgtgacccgcctggggatctcgtccctgatcagagaagccatgtcagcttacaacagccacgaagagggacggctggtctaccggtatgggggagaaccggtgggcagcttcgtccagccgtgcttgcggccgttgatgccagctatcgcccatgccctgttcatggacattactcacgataatgaatgccccatcgtgcaccggtcggcctatgacgccctgccgagcactaccatcgtgtcaatggcctgctgcgcctccggaagcacccgcggatacgatgaactggtgccacaccagatctccgtggtcagcgaagaacggttctataccaagtggaatccagaagctctcccgtcgaacactggagaagtgaactttcagtcaggcattatcgcggctcgctgtgccatctctaagctgcaccaggaactcggtgccaaaggattcatccaggtctacgtggatcaggtggatgaggacatcgtggccgtgaccagacattccccgtctatccaccaatccgtggtggccgtgtccagaaccgcttttcgcaacccaaaaactagcttctactcaaaggaggtcccacagatgtgtatcccgggcaagatcgaggaagtggtcctcgaagctcggaccatcgagagaaacactaagccatatcgcaaagatgaaaactccatcaacggaactccggatatcaccgtggaaatccgcgagcatatccaattgaatgaatcgaaaatagtgaaacaagccggtgtcgctactaagggtcctaacgagtatatccaagagattgagtttgaaaatctgtcgcctggatccgtgatcatctttagggtttcccttgacccacacgcacaggtggctgtgggaattctccgtaaccacctgactcaattctcaccacatttcaagtcgggttccctggcagtcgacaacgccgatcctatcctgaagatccctttcgcgtcgctggcgtcaagactgaccctggctgagctgaaccaaatcctgtaccgctgcgaaagcgaagaaaaggaggacggaggaggctgctacgacatcccgaactggtcggccctgaagtacgccggactgcaaggactgatgtcggtgctcgcagagatcagaccgaaaaatgacctcggacacccattctgtaacaatttgagatcaggcgattggatgatcgattacgtgtcaaacagattgatctcacggtcgggtaccatcgctgaggtgggaaaatggctgcaggccatgttcttttacctgaaacagatacccaggtacctcatcccctgttacttcgacgccatcttgatcggagcgtacaccactttgctggacaccgcctggaagcagatgtcgtcatttgtccagaacgggagcacttttgtgaaacacctctccctggggagcgtgcagctgtgtggagtggggaaattcccgagcctgcctatcctgtcgccagcactgatggacgtgccgtaccggctcaacgagatcactaaggaaaaggaacaatgctgcgtgtcgctcgccgccggtttgccccacttctcgagcggtatcttccgttgctggggacgcgacaccttcatcgctctgcggggaatcctgctgattactggaaggtacgtggaagcaaggaatatcatactcgccttcgcaggaactctgcgacacggcctgatcccaaatctcctcggagaggggatctacgcccggtacaattgcagagacgccgtgtggtggtggctccaatgcatccaggactactgcaaaatggtgccaaatgggctcgacattctgaaatgtccagtgtccaggatgtacccgactgatgactcagccccgcttccagccgggaccctggaccagccgctcttcgaagtgatccaggaagccatgcagaagcatatgcagggcatccaatttcgcgaacggaatgcgggaccgcagatcgaccgaaatatgaaggatgagggcttcaacatcaccgcaggagtggatgaggagactggtttcgtctacggtggaaatcggttcaattgcggcacgtggatggacaagatgggcgaatccgatcgcgcccggaaccggggcatcccagcaactccgcgcgacggatcagccgtggagatcgttgggctctcaaagtccgccgtccgctggctgttggaattgagtaagaagaacattttcccataccatgaggtgaccgtgaagcgccacggaaaggcaatcaaagtgtcatacgacgaatggaacaggaaaatccaggacaacttcgaaaaacttttccatgtctccgaagatccctcggatctgaacgaaaagcacccgaatcttgtgcataagagaggcatttacaaggactcctatggcgcctcatcgccttggtgcgattaccagctgcgcccaaacttcactatcgccatggtggtcgcgcctgaactctttactacggagaaggcctggaaggccctcgagatcgcagaaaagaagctcttgggaccgctgggaatgaaaactctcgatccagacgacatggtgtactgcggcatctacgacaatgcgctggacaatgataactacaacctcgcgaaggggtttaactaccaccaaggtcctgaatggctctggccaattggatacttcctccgcgccaagctctatttctcccgcctcatggggccagagactacggctaagaccatcgtcctcgtcaaaaatgtgctctcgcggcattacgtgcaccttgaacggtcgccatggaaaggactgccggaactgacgaatgaaaatgcacagtattgcccattctcttgcgaaacccaggcctggtccatcgctaccatcttggagactctctatgacctc

SEQ ID NO: 6129 - DNA, 669 bp, synthetic construct
  misc_feature 1..669: note = source = /note="Description of Artificial Sequence: Synthetic coding sequence"
  source 1..669: mol_type = other DNA
atgaacaagccactcttgtggatctcggtccttacttcgctccttgaggcattcgcacataccgatctctccggaaaggtctttgtgttcccacgagagtccgtgactgaccatgtcaatctgattacgcccctggagaaacccttgcaaaacttcaccctctgtttccgcgcctactcagatctgtcgcgggcctacagcctctttagctacaatactcagggtagagacaatgaactgcttgtgtacaaggaacgcgtgggagaatacagcctttacatcgggcgtcacaaggtaacctcaaaggtcatcgaaaagtttcctgcgccagtgcacatttgcgtttcatgggaaagttcctctgggattgccgagttttggataaatggaactcctcttgtgaagaaggggctgaggcagggctacttcgttgaagcacaacctaagatagtattgggacaggagcaagattcgtacggtggaaagtttgataggtcccaatcgtttgtcggtgaaattggcgatttgtatatgtgggactcagtgctcccgcctgagaacattttgtccgcataccaaggaactccgctgcccgcaaatatccttgactggcaggcccttaactacgaaattagaggctacgtgatcattaaacccctggtgtgggtg

SEQ ID NO: 6130 - DNA, 669 bp, synthetic construct
  misc_feature 1..669: note = source = /note="Description of Artificial Sequence: Synthetic coding sequence"
  source 1..669: mol_type = other DNA
atgaataaaccactgctctggatttcagtgctcactagtctgctagaagcatttgctcatactgacctttcagggaaggtttttgtgttccctagggaaagtgttaccgaccacgtcaacctgattaccccgctcgagaagccgctgcagaacttcaccctgtgttttcgggcatactccgatttatccagagcctattcgctgttctcctataatactcaggggcgagacaatgagctgctcgtgtataaagaaagagtaggggagtactccctatacattggccggcataaagtgacatctaaggttatcgagaagtttcccgcacccgttcacatctgtgtatcatgggaatcgtcgtcaggaatagcagagttctggattaacggaaccccactagtcaaaaagggtttgaggcagggatacttcgtcgaagcccaaccaaagatagtgcttggacaggagcaagactcttatggaggaaagtttgatcggtcacagagcttcgtgggggagattggcgatttgtatatgtgggatagcgtattaccgccggaaaatattttgagcgcttatcagggaactcccctccccgctaacatcctggattggcaagcactcaattacgaaataagagggtacgttatcataaagccattggtctgggtc

SEQ ID NO: 6131 - DNA, 669 bp, synthetic construct
  misc_feature 1..669: note = source = /note="Description of Artificial Sequence: Synthetic coding sequence"
  source 1..669: mol_type = other DNA
atgaacaaacccctgctctggatctccgtcctgacctccctgctggaagcattcgcccacaccgacctgtcgggcaaggtgttcgtgttccccagggaatcagtcaccgaccacgtcaacctcatcactccactggaaaagccgctgcaaaactttacgctttgctttcgggcatactcggatttgtcccgggcatattcactgttttcgtacaacactcagggaagagataatgaactcctggtctacaaggagcgggtcggagagtactcgctttacatcggacgacacaaggtgacgagcaaggtgatcgaaaagttcccggctccggtgcacatctgcgtgtcgtgggagtcgtcatcaggtatcgccgagttctggatcaatgggaccccactggtgaagaaggggctgcggcaaggctacttcgtcgaggcccagccaaagatcgtgctgggccaggaacaggattcgtacggaggaaagttcgaccggtcccaatccttcgtgggtgagatcggggacttgtacatgtgggactcggtgctgccgcctgaaaacattctctccgcttaccagggcaccccgctgccagcgaatatccttgattggcaggcactgaattacgagattcgaggctacgtgatcatcaaaccgctggtgtgggtc

SEQ ID NO: 6132 - DNA, 669 bp, synthetic construct
  misc_feature 1..669: note = source = /note="Description of Artificial Sequence: Synthetic coding sequence"
  source 1..669: mol_type = other DNA
atgaacaaaccactactctggatcagcgtattaactagtttactggaagctttcgcccatacggacctttcaggcaaggtgtttgtattcccccgcgagagtgtcaccgaccatgttaatttgataactccgttagagaagccgctgcagaatttcacactgtgctttagagcctactctgacctcagccgggcttactctcttttttcatataatactcaaggtcgggataacgaattgctggtatacaaagaacgagtaggggagtattccttgtacataggtcgacataaagtgacatccaaggtgattgaaaagttccctgcgccagtgcacatctgtgtaagttgggagagcagctccggcatagctgagttttggatcaacggcacacccttggtgaagaaaggcctgagacaggggtatttcgtggaggcccagccaaagattgtcctgggtcaagagcaggactcatacggcggtaaattcgataggtcccaatcttttgtcggggaaattggagacctgtacatgtgggattctgtcttgccccccgaaaatatcctctccgcatatcagggcacaccccttcctgctaacattctggattggcaggcgttgaactatgagatacggggatatgtgataatcaaacctctggtgtgggtt

SEQ ID NO: 6133 - DNA, 669 bp, synthetic construct
  misc_feature 1..669: note = source = /note="Description of Artificial Sequence: Synthetic coding sequence"
  source 1..669: mol_type = other DNA
atgaataagcctttgctctggattagcgtccttacctcactgctggaagcattcgcacatactgacctgtccggaaaggtgttcgtgtttccgcgggagtccgtcaccgaccatgtgaacctgatcacgccgttggaaaagccgcttcagaactttaccctgtgcttccgcgcgtactcggacctcagcagagcctactccctctttagctacaatactcaggggcgggataatgagcttctggtgtacaaggagcgcgtgggagagtactccctgtacattggacgccacaaggtcacttccaaggtgattgaaaagttccccgcaccggtgcatatctgcgtgtcgtgggagagcagctccggaatcgctgagttttggattaacgggaccccgctggtgaagaaaggactgcggcaaggatacttcgtggaagcccagccgaagatcgttctgggccaggaacaagattcgtacgggggcaagtttgaccgcagccagtctttcgtgggagaaatcggtgacctctacatgtgggacagcgtgttgccaccggagaacatcttgtccgcttatcagggcaccccgctgccggccaatatccttgattggcaggcgttgaactacgaaattagaggttacgtgatcatcaagcctctggtgtgggtc

SEQ ID NO: 6134 - DNA, 669 bp, synthetic construct
  misc_feature 1..669: note = source = /note="Description of Artificial Sequence: Synthetic coding sequence"
  source 1..669: mol_type = other DNA
atgaacaagccgctcttgtggatctccgtcttgacctcgctgctggaggccttcgctcacacggacctctctggaaaggtgtttgtctttccgcgcgaatcggtgacggatcatgtgaatcttattactccgctcgagaagccccttcaaaactttaccctctgcttcagggcatacagcgatctgagtcgcgcgtactcgctcttctcgtacaatactcagggtagagacaatgaactgctggtctacaaagaacgggtgggagaatatagcctgtacattggacgccacaaggtgacctccaaggtgatcgagaagttcccagccccggtacatatatgtgtctcttgggaatcctcatcgggcatcgctgaattctggatcaacggaaccccgcttgtcaaaaagggcctccggcagggttacttcgtggaggcccagcccaaaatcgtgctcggacaagagcaagactcatacgggggcaaatttgatcgatcgcagtcgttcgtgggggaaattggagacttgtacatgtgggactccgtcctccccccggaaaacatactttcagcataccagggcactccactgcctgccaacatcctggattggcaggcgctgaattatgaaatcagaggttacgtgatcatcaaaccactggtgtgggtc

SEQ ID NO: 6135 - DNA, 669 bp, synthetic construct
  misc_feature 1..669: note = source = /note="Description of Artificial Sequence: Synthetic coding sequence"
  source 1..669: mol_type = other DNA
atgaacaaaccgttattatggatcagtgttcttacatcactgttagaagcgtttgcccacactgatctttcggggaaagtgttcgtatttcctcgtgagtccgttacggaccatgtcaacctgattacccctcttgaaaaacctcttcagaatttcactttatgttttcgagcgtacagcgacctgtctagagcgtattccttgttctcttacaatacccaaggtcgcgataacgagctattagtttacaaagaacgcgtaggcgaatactcactttacattggacgacacaaagtcacgagcaaggtgatagaaaagttccctgctccagtgcatatatgcgtttcatgggaatcatctagtggcatagccgaattctggattaatggaacgccgttggtgaaaaaaggacttcgccaaggatattttgttgaagctcaacctaagattgtccttggccaggagcaagatagctatggcggcaaatttgatcgttctcaaagctttgtcggcgaaattggcgatctatatatgtgggactcagtgttgccgccggaaaatatcctctccgcttatcaaggcacccctctgccggctaatatcctagattggcaagctcttaattacgaaattcggggatatgtcattataaaaccgctggtgtgggtc

SEQ ID NO: 6136 - DNA, 669 bp, synthetic construct
  misc_feature 1..669: note = source = /note="Description of Artificial Sequence: Synthetic coding sequence"
  source 1..669: mol_type = other DNA
atgaacaaaccactcctgtggatttctgtgctcacttccttgttggaggcattcgcccacactgacctgtctggtaaggtatttgtcttccctagggagtccgttacagatcacgtgaaccttatcacccctttggaaaagccactgcagaacttcaccctctgctttcgcgcctacagcgatctgtctcgcgcttacagcctgttttcctataatacacagggtcgcgacaacgagttgctggtatacaaggagcgcgtgggagagtattcactgtacattggaagacacaaagtcacttctaaagtaatagagaagtttcccgcccccgtgcacatctgcgtcagctgggagtcttcaagcggcatcgcagagttctggatcaatggaactcctttggtcaaaaagggccttcgccagggctactttgtcgaggcccagcctaagattgtgttgggacaagagcaggactcttacggtggtaagtttgacagaagtcaatcttttgttggtgagatcggagacttgtatatgtgggattcagtcctgccccctgagaatattctgagcgcctaccaaggaactcctttgcccgctaacatccttgactggcaggccctcaactacgagatccgcggctatgttataattaagcctttggtctgggtg

SEQ ID NO: 6137 - DNA, 669 bp, synthetic construct
  misc_feature 1..669: note = source = /note="Description of Artificial Sequence: Synthetic coding sequence"
  source 1..669: mol_type = other DNA
atgaataaaccgctcttgtggatctcagtgctgaccagcctgcttgaagctttcgctcatacagacctgagcgggaaagtctttgtcttcccccgtgaatcagtgaccgaccacgtgaatttaattacacctcttgaaaaaccacttcagaattttacgctttgtttccgagcatacagcgacctttctcgtgcatactccctcttttcttacaatactcagggtcgtgataacgaactattggtttataaggaacgagtaggtgagtattcactttacataggaagacataaggtcacctcgaaagttatcgagaagtttccagcccctgttcatatctgcgtcagctgggagtctagctctggcattgcggaattttggattaatggtaccccgcttgtgaagaaaggcttgcgccagggttacttcgttgaggcgcaacccaaaatcgtgctgggtcaggaacaggactcttacggcggtaaattcgatcggtctcaatccttcgtcggcgagattggcgacctttacatgtgggactcggttctgcctccagagaacattctctcagcgtaccagggcacccctcttcctgcaaacatcttagactggcaagccttgaactatgagatcaggggctacgttattattaagccacttgtatgggtc

SEQ ID NO: 6138 - DNA, 669 bp, synthetic construct
  misc_feature 1..669: note = source = /note="Description of Artificial Sequence: Synthetic coding sequence"
  source 1..669: mol_type = other DNA
atgaacaaaccgctcttgtggatttcggtgctaacgtccctgcttgaggcgtttgctcacacagatctgtcaggcaaagtgtttgtctttccacgagaaagtgtgactgaccatgtgaatttaataacacctctggaaaaacctctacagaacttcacactttgtttccgcgcgtatagcgacttatcacgtgcctatagtctcttttcttataacacacaaggaagggataacgagctcctcgtgtataaagagagggtcggcgagtacagcctgtacatcggcaggcataaggttacgtccaaggttattgaaaagtttccagcacctgtccacatctgcgtcagctgggagtcaagttccggcatcgccgaattctggatcaatggcacccccctcgtgaaaaaaggcctgaggcagggttatttcgtagaagctcagccaaaaattgtgctggggcaggaacaggacagttacggagggaaatttgaccgaagccagagcttcgtcggagaaatcggcgatctctacatgtgggacagtgtgctgcctcctgagaatatcctctcagcatatcaaggcacacctcttcccgctaatatccttgactggcaggctctcaactacgagataagaggatacgttatcattaaaccgctggtctgggtt

SEQ ID NO: 6139 - DNA, 669 bp, synthetic construct
  misc_feature 1..669: note = source = /note="Description of Artificial Sequence: Synthetic coding sequence"
  source 1..669: mol_type = other DNA
atgaataaacccctgctttggatcagcgtgcttacctccctgctggaagcatttgcacacaccgatctgtcaggaaaggtgttcgtgtttccgcgcgagagcgtcacggatcacgtgaacctcatcactcctctcgaaaagcctttgcaaaacttcacgctttgcttccgggcctacagcgacctgtcccgagcatactcgctgttctcatataacacccaggggcgcgataacgagctgcttgtctacaaggaaagggtgggggaatacagtctgtacatagggcggcataaagtcacctccaaggtgatcgagaagttccccgcgccagtgcatatttgcgtgtcttgggaatcatcaagtggaatcgctgaattttggatcaatggaaccccgctggtcaagaagggactgcggcagggttatttcgtggaagcccagccgaaaattgtcctgggacaagaacaggattcttacggaggcaagttcgaccgtagccagtcctttgtgggagaaattggcgacctttacatgtgggactcggtgttgccaccggagaatatcctgtcagcctaccagggaactccgcttccggctaacatccttgactggcaagcgttgaattacgagatcagagggtacgtgattatcaaaccactggtttgggtc

SEQ ID NO: 6140 - DNA, 669 bp, synthetic construct
  misc_feature 1..669: note = source = /note="Description of Artificial Sequence: Synthetic coding sequence"
  source 1..669: mol_type = other DNA
atgaacaaaccattgctttggatctcggtgctgacatctctgcttgaagcattcgctcatactgatctgagcgggaaggtattcgtcttcccgagggagtctgtgacggatcacgtgaacctcataacccctctcgaaaagccgcttcagaactttacactgtgcttcagggcttactccgatctctcaagggcctacagcctgttcagctacaatacacagggtcgggataacgaactgcttgtgtataaggagcgagtgggcgaatattcactgtatattgggaggcacaaggttaccagcaaggtcatcgaaaagttcccagccccagtccacatatgtgtgtcttgggagagctcttctggtattgcagaattttggatcaatggaacacccctcgtcaaaaaagggctgcggcaaggttacttcgtggaagcacaacccaagattgtgctgggccaagagcaggactcatacggaggcaagtttgaccggagccagtcttttgtgggagagatcggcgacctttacatgtgggatagtgtcttgccacctgagaatattctctctgcatatcaaggcacccccctgcccgccaatatcctggactggcaagcactgaactacgagatcaggggatatgtaatcatcaagccccttgtgtgggtg

SEQ ID NO: 6141 - DNA, 669 bp, synthetic construct
  misc_feature 1..669: note = source = /note="Description of Artificial Sequence: Synthetic coding sequence"
  source 1..669: mol_type = other DNA
atgaataagccactgctctggatatcggtcctgacttcattgctcgaggcctttgcacataccgacctgtccgggaaagtctttgtctttcccagggaatcagtgactgatcacgtcaatctgattacccctctggagaagcccctgcaaaacttcacgctttgctttagagcatactccgatctgtcccgggcctattcacttttttcgtacaatactcaaggtagagataacgagctcctcgtgtacaaggaacgggtgggtgaatactcgctttacattggtcgccataaggtgaccagcaaggtgattgaaaagttccccgcacctgtccatatttgtgtcagctgggagtcgtcgtccgggatcgcagaattttggattaacggaaccccgctggtgaagaaaggactgcgccagggatacttcgtggaagcacaacccaaaatagtgcttgggcaagaacaagactcctatggcggtaagttcgacagatcacagtcatttgtgggcgagatcggggacctgtacatgtgggattccgtccttccgcccgaaaacatcctctcggcatatcagggcaccccgctgccggcaaacattctggattggcaggccctcaattacgagattcgtggttacgtgatcatcaaacctctggtctgggtc

SEQ ID NO: 6142 - DNA, 669 bp, synthetic construct
  misc_feature 1..669: note = source = /note="Description of Artificial Sequence: Synthetic coding sequence"
  source 1..669: mol_type = other DNA
atgaacaagcctctgctctggatctcggtgctgaccagccttctggaggcctttgctcataccgatctgtcaggaaaagttttcgtgtttcccagggaatccgttacagaccacgtgaacctcattacccccttagaaaagcccctccagaactttaccttgtgcttcagagcttactcagacctatctagagcctactctctcttcagctacaacacccagggcagagacaatgaacttctcgtatataaagaaagagtcggcgagtactccctctacattggcaggcacaaggttacatccaaggtgatagagaaatttccagccccagtccacatctgcgtgtcatgggagtcaagtagtggcattgcagaattctggatcaatggaacccccctcgttaagaagggacttcgtcaaggttacttcgtcgaggcccagcccaaaatcgtcttagggcaggagcaggattcgtacggaggaaaatttgacagatctcaaagctttgtcggggagattggcgatttgtatatgtgggattctgtgcttccccctgaaaacatcttgtccgcatatcaagggacccctttgccagccaacatcctggactggcaagctctgaactatgaaatcaggggatatgtgattattaaaccactggtgtgggtg

SEQ ID NO: 6143 - DNA, 669 bp, synthetic construct
  misc_feature 1..669: note = source = /note="Description of Artificial Sequence: Synthetic coding sequence"
  source 1..669: mol_type = other DNA
atgaacaaacctctactgtggatttccgttctgacaagtttactggaggcctttgctcatactgacctgtcaggcaaggttttcgtgttcccacgggaatctgttacggatcacgtgaacctcatcactccacttgagaagcccttgcagaactttaccctttgctttagagcctactctgacctcagccgtgcatattccctgttttcctacaatacacagggcagagacaatgagcttctcgtttacaaagagcgcgttggagagtactccctgtatattgggcggcataaggtcacctcgaaggtgattgaaaaatttccagcacccgtgcacatatgtgtgtcttgggaatcatctagcggcatagccgagttttggataaacgggacaccactcgtgaagaaggggttgagacagggctactttgtggaagcccagcccaagatcgtcttgggtcaagaacaggactcatacgggggaaaattcgacagatcacagtcttttgttggggagattggagatttatatatgtgggattccgtgctgcctcctgaaaacatcctgagtgcctaccagggcacccctctccctgccaacatattggattggcaggctctcaattacgaaattagggggtatgtcatcataaaacccctggtttgggtt

SEQ ID NO: 6144 - DNA, 669 bp, synthetic construct
  misc_feature 1..669: note = source = /note="Description of Artificial Sequence: Synthetic coding sequence"
  source 1..669: mol_type = other DNA
atgaataagcccctcctttggatctccgtgttgacaagtctcctagaagcctttgcccatactgacctctcaggaaaggtgtttgtattcccacgcgaatctgtgacagatcacgtgaatctcatcacacccctcgaaaaaccactgcagaacttcacactctgctttcgggcctattcagatctctcacgcgcttactcgctcttttcgtataacacacaggggcgggacaatgaactgctcgtgtataaagaaagggtaggggaatacagtctatatatagggcggcacaaagttacttctaaagttatcgaaaagttccctgcacccgtgcatatctgcgtgtcttgggaatcctccagtggaatagccgaattttggattaatggaactccgctcgtaaagaaaggactccggcagggatattttgtcgaggctcagcctaaaatcgttctgggacaggaacaggattcttatgggggaaagttcgacaggtctcagtccttcgtgggagaaatcggagatctatatatgtgggattctgtgctcccacctgaaaatattctcagtgcctaccaggggacacccctccctgctaacatacttgattggcaggctctgaattatgaaatacgggggtatgtgatcataaaacccctggtttgggtt

SEQ ID NO: 6145 - DNA, 669 bp, synthetic construct
  misc_feature 1..669: note = source = /note="Description of Artificial Sequence: Synthetic coding sequence"
  source 1..669: mol_type = other DNA
atgaacaaacctctgctttggatttctgttctgacatctttgttggaggctttcgctcatactgatttgtctggtaaagtttttgttttcccaagggaaagcgttactgatcatgttaatttaattactcctttagagaagccactacaaaattttacattgtgtttccgagcttactcggatttgtccagagcttacagtttgttcagctacaacactcaaggacgagataatgagcttcttgtatataaggaaagggttggtgagtattcattatacattggtaggcataaagttacatcaaaggtgatagagaaattccctgctcccgtgcatatctgtgtttcttgggaatcgtcttcgggtatcgctgagttctggattaatggaactcctttagtcaaaaaagggttaaggcaaggctattttgtggaggcacagccaaagatagttctaggtcaagagcaagattcgtacggcgggaaattcgatcgctcacagtcattcgtgggggaaataggggatctttacatgtgggattcagtactccctcccgaaaacatactcagcgcttatcagggaactcccttgcctgcaaacattttggattggcaggctctcaactacgagattaggggttatgtaatcataaagccattggtttgggtg

SEQ ID NO: 6146 - DNA, 669 bp, synthetic construct
  misc_feature 1..669: note = source = /note="Description of Artificial Sequence: Synthetic coding sequence"
  source 1..669: mol_type = other DNA
atgaataagcccctcctatggatatctgtcctaacttccctcctcgaagcttttgctcacactgatctgtccgggaaagtgttcgtttttccccgcgaatccgtgacagatcatgtaaatttgataactccactggaaaaaccactccagaacttcacactctgctttagggcttacagtgatctcagtagggcgtattccctcttctcttataacacacaggggagagacaacgagctgcttgtgtataaagaacgtgttggagaatattctctgtatatcgggaggcataaagtgacatcaaaggtgatcgaaaaatttcccgctcccgtgcatatatgtgtatcttgggagagtagttcagggatagcagaattttggattaacggaacaccactggtgaagaaaggactcaggcaggggtacttcgtggaagctcagccaaaaatcgtcctggggcaggaacaggattcttatggagggaaatttgatcgctcacagtcgtttgtcggagaaataggagatctgtacatgtgggactccgtgcttcctcccgaaaacatcctttctgcttatcaaggaactcccctacccgctaacattctggattggcaggctctcaactacgaaataagaggatacgttattattaaacccctggtatgggtt

SEQ ID NO: 6147 - DNA, 669 bp, synthetic construct
  misc_feature 1..669: note = source = /note="Description of Artificial Sequence: Synthetic coding sequence"
  source 1..669: mol_type = other DNA
atgaacaagcctctcttatggatctctgtgctgacgagccttctggaagcattcgcccacactgatctgtcaggcaaggtattcgttttcccccgagagtctgttactgatcacgtcaatctgataacacctctagaaaaaccgctgcagaattttacattgtgtttccgggcatacagcgatctctcacgggcctactccctgttcagctataatacccagggcagggacaatgagctactcgtgtataaggagcgtgtgggcgagtattcactctacatcggcaggcataaggtaacgagcaaggttattgagaagttccccgcacctgtgcatatctgtgtgagctgggaatccagctccggcattgcagagttctggattaatgggactcccctggtgaaaaaaggtctgcggcaggggtatttcgtggaagcacagcccaagattgtgctcggacaagagcaggattcctatggtggcaaatttgaccggtcccagagcttcgtgggagaaatcggcgacctgtatatgtgggatagtgtcctgccaccagagaacatcctgtccgcctaccagggaacccctttgcccgctaacatattggattggcaagctttgaactacgagatcagggggtatgtcattatcaaaccattggtgtgggta

SEQ ID NO: 6148 - DNA, 669 bp, synthetic construct
  misc_feature 1..669: note = source = /note="Description of Artificial Sequence: Synthetic coding sequence"
  source 1..669: mol_type = other DNA
atgaacaagcctttactgtggatcagtgtgctcacttctctgctcgaggcatttgcgcacaccgacctttcggggaaagtgtttgttttccctcgggaatcagtcacggatcacgtgaacctcattacccccttagagaaacctctccagaatttcaccctgtgctttcgggcttactcggacctgtccagggcctacagcctgttctcttataacacccagggcagggacaacgaactcctggtgtataaggagagagtcggagaatattctctgtacattgggaggcataaggtaacatctaaggtgattgagaaattccccgctcctgtccatatctgtgtttcctgggaaagcagcagtggtatcgcagaattctggatcaacggcacccctctggtcaagaaggggcttagacagggttatttcgtggaggctcaacccaaaatcgtcctcggccaggagcaggatagctatggtggtaaatttgacaggagtcagtcctttgtaggggaaattggtgacctgtacatgtgggactcagtactcccacctgaaaacatcttgagcgcttatcaaggaactcctctgccagccaacattctggactggcaggctctaaactatgagatccggggatacgtgatcatcaagccattagtgtgggtc

SEQ ID NO: 6149 - DNA, 669 bp, synthetic construct
  misc_feature 1..669: note = source = /note="Description of Artificial Sequence: Synthetic coding sequence"
  source 1..669: mol_type = other DNA
atgaataagcctctgctttggatttctgtgcttaccagcctcctggaagcctttgcacacacggatctctccgggaaagtttttgtctttccacgggagtcagttactgatcatgtcaacctgatcaccccactcgagaagccattgcaaaacttcactttgtgttttagggcctattccgatttgtccagagcatactcgctcttctcatacaatactcagggacgagataacgaacttctcgtgtacaaagaacgggttggcgagtacagcctgtacatcggtaggcacaaggtcacctctaaggtcattgaaaagtttcctgccccggtgcatatttgcgtgtcttgggaaagtagttccggtattgcagagttttggataaatgggactcccctcgtgaagaaaggccttaggcaaggatacttcgtcgaagctcagcctaagatcgtccttggtcaagaacaggactcgtacggagggaagttcgacagatcgcaatccttcgtcggtgagattggtgatctgtacatgtgggatagcgtgttgcctcctgaaaacatcctgagcgcgtaccaaggaacccctctgcccgcaaacatattggattggcaggcgcttaactacgagatccgaggctatgtgatcatcaaaccgctggtgtgggtg

SEQ ID NO: 6150 - DNA, 669 bp, synthetic construct
  misc_feature 1..669: note = source = /note="Description of Artificial Sequence: Synthetic coding sequence"
  source 1..669: mol_type = other DNA
atgaacaagcctctcctctggattagcgtgctgactagtctgctagaggcctttgctcataccgacttaagcggtaaggtgttcgtatttccacgggagtccgttacagaccatgtgaacttaatcaccccgctcgaaaaaccactccagaattttaccctgtgtttcagagcatactcagatctgagtagggcttactctttgttctcttataatacgcagggtagggataatgaactgctggtgtataaggagcgggtgggggagtactctctgtacatcggcaggcataaggtcacctccaaagtcatcgagaagtttcctgcacccgttcacatttgtgtttcatgggagagctcctcaggaatcgcggaattttggataaatgggacgccactggttaagaagggcttgcggcagggttactttgtggaggctcaacccaaaatcgtcctgggccaggagcaggactcttacggcggaaagttcgatcggagtcagtcgtttgttggagagatcggagatctatatatgtgggatagtgtcttgcccccggagaacatcctatcagcgtaccaagggacgcccctcccggcgaacatcctggattggcaggctctgaactacgaaatccgaggctacgtgatcatcaagcccctcgtatgggtg

SEQ ID NO: 6151 - DNA, 669 bp, synthetic construct
  misc_feature 1..669: note = source = /note="Description of Artificial Sequence: Synthetic coding sequence"
  source 1..669: mol_type = other DNA
atgaataaaccactcctgtggatctccgtgctgacctccttgctggaagcatttgctcacaccgacctcagcgggaaagtgtttgtgtttccccgcgagtccgtgactgaccatgttaacctcataactcctctcgaaaaacctcttcaaaacttcacgctttgttttagagcatactcggacctctcacgcgcatattctcttttctcctacaatacccagggtagagataacgaactgcttgtctacaaggagagggtgggagagtacagcctctacatcggccgccataaagtcactagcaaggtgatagaaaagttccctgcaccagtgcacatttgcgtgtcgtgggagagcagcagcggaatcgcggagttttggatcaacgggacgcctcttgtcaagaagggtctgagacagggatactttgtcgaagcacagccaaaaatcgttctgggacaggagcaagactcctatgggggaaagttcgacaggtcgcaatcgtttgtgggggagattggggatctttacatgtgggattccgtattgccccctgaaaacattctgtccgcataccagggaacccctctgccggcgaacatactggattggcaagcactgaactatgagattcgcggttacgtgattatcaagcctcttgtgtgggtg

SEQ ID NO: 6152 - DNA, 669 bp, synthetic construct
  misc_feature 1..669: note = source = /note="Description of Artificial Sequence: Synthetic coding sequence"
  source 1..669: mol_type = other DNA
atgaacaaaccattactgtggatcagtgtgttgacaagcttgctggaggcattcgcacatacagatttgtcgggtaaggtgtttgttttcccaagagagagcgtgaccgatcatgtgaatctgatcacgcccctagagaagccattacaaaactttaccctctgtttccgagcgtattctgacctgtcgagagcctatagtttgttctcatacaacactcagggtagggataacgagctgctcgtatataaggagagggtcggagaatatagcctgtacataggccgccataaggtcacttccaaggtcatcgagaagttcccagcccccgtgcacatttgcgttagctgggagtcctcgtcgggaatagccgagttctggatcaatggcaccccccttgtgaagaagggactgcgacagggctattttgtggaagcccagcccaaaatcgtgctgggccaggaacaggatagttacggcggaaagtttgatcgcagccaaagttttgttggtgagatcggcgatctctatatgtgggactcggtacttccaccggagaatattttgtccgcttaccagggaactcccctgcctgcaaatatactggactggcaggcactgaactacgagatccgaggttacgtcattatcaagcccctcgtgtgggtg

SEQ ID NO: 6153 - DNA, 669 bp, synthetic construct
  misc_feature 1..669: note = source = /note="Description of Artificial Sequence: Synthetic coding sequence"
  source 1..669: mol_type = other DNA
atgaacaagcctctcctctggatctccgtgctgacgagccttctcgaggctttcgctcacaccgatctatccggaaaggtcttcgtcttcccgcgtgagagtgttactgaccacgtgaatctcatcacgccgctcgaaaaacccctacagaactttaccttgtgttttcgggcctactcggacctctcccgtgcgtatagcctattcagttacaacacgcagggccgcgacaacgagttactggtttataaggagcgtgtcggcgagtactctctctacattggccgtcacaaggtgacctccaaggttattgagaagttcccagcccctgttcacatctgtgtctcctgggagagttcgagcggtatcgctgagttttggatcaacggtacacccttggtcaagaagggacttcgtcagggttattttgtagaggcccagcccaagatagtactaggacaggagcaggactcttatggcggtaagttcgatcgttcccaatccttcgttggtgagatcggcgacctctacatgtgggatagtgtgctccctccggaaaacattctgtccgcatatcagggcacacccctccctgccaacattctagactggcaggcgctgaactatgaaattcgtggctatgtgatcattaagcctctcgtatgggtg

SEQ ID NO: 6154 - DNA, 669 bp, synthetic construct
  misc_feature 1..669: note = source = /note="Description of Artificial Sequence: Synthetic coding sequence"
  source 1..669: mol_type = other DNA
atgaacaaacctctgctgtggatcagcgtgcttactagcctgctggaggccttcgcgcataccgacttgagcggaaaggtatttgtctttccgcgagagtcagtgaccgaccacgtcaatctcatcactccgctcgaaaagccactgcagaatttcaccctgtgctttagggcctactccgatttgagccgggcctactccctgttctcatataacacgcaaggacgcgacaatgagttgcttgtgtacaaagagagagtgggtgaatacagcctctacatcggcagacacaaggtgacttcgaaagtgatagagaaattccccgctccagtgcatatttgtgtgtcctgggagagctcctccggaatcgcggagttctggatcaacggaactccactcgtcaagaagggactcagacagggctatttcgtggaagcccagccgaagatcgtgcttggccaggaacaggactcatacggcgggaagttcgatcgctcgcagtcgttcgtaggtgaaattggagatctgtacatgtgggactctgtcctgcccccagagaatatcctgtccgcctaccaggggactcctctcccggccaacatcctcgactggcaggcattgaattatgaaatcagagggtacgtcattatcaaaccactcgtgtgggtc

SEQ ID NO: 6155 - DNA, 669 bp, synthetic construct
  misc_feature 1..669: note = source = /note="Description of Artificial Sequence: Synthetic coding sequence"
  source 1..669: mol_type = other DNA
atgaataagcccttgctctggatcagtgtattgacaagcctccttgaagccttcgctcataccgacctgtccggtaaagtatttgtcttcccccgagagtccgttaccgatcacgtgaacctcataaccccactggaaaaacccctgcaaaacttcacactctgctttcgcgcctactctgacctgtcccgcgcctattctttgttttcatataatacacagggccgagacaacgagctcctggtttacaaagaaagggtaggagaatattccctgtacatagggcggcacaaagtcacttccaaggttattgagaaattccccgcgccagtccacatctgcgtgagctgggagtcaagttctggaattgcagagttttggattaatggtactccgttggtcaagaagggtctgagacagggttacttcgtggaggctcaacctaagatagtgctcggacaagagcaggactcatatggcggcaagttcgacaggtcccagtcatttgtcggagaaataggagatctctacatgtgggatagcgtactcccccctgagaacattctgagtgcataccagggcaccccactgcccgcgaacatactggactggcaggctctcaattatgagatcagggggtatgtgatcattaagcctctggtgtgggtc

SEQ ID NO: 6156 - DNA, 669 bp, synthetic construct
  misc_feature 1..669: note = source = /note="Description of Artificial Sequence: Synthetic coding sequence"
  source 1..669: mol_type = other DNA
atgaacaagccactgctctggatttccgtgctcacgtctctgttggaggcgttcgcccatactgacttgtctggcaaggtgttcgtcttcccacgagagagcgtcaccgatcacgtgaacctcattacacccctcgaaaaacccctgcagaattttacactctgctttcgagcgtacagtgacttgagcagagcatatagtctgttttcatataacacacagggtcgcgacaacgagctattggtttataaagaacgagtgggcgaatatagcctttacatcgggcgccacaaagttacaagtaaggtcatcgaaaagttcccggctccagtacatatttgtgtctcttgggagagttcctctggaatcgcagagttctggatcaatggtacaccactcgtgaaaaagggactgaggcagggatactttgtcgaggcccaacctaagatcgtgttgggccaggagcaagactcgtacggcgggaagtttgacagaagtcagagttttgtgggcgaaattggcgacctgtatatgtgggacagtgtgttgccccctgagaatatcttatccgcctaccaaggtactccactccctgctaacatcttagattggcaagcacttaactacgaaatcaggggatatgtgatcattaaacctttggtctgggtt

SEQ ID NO: 6157 - DNA, 669 bp, synthetic construct
  misc_feature 1..669: note = source = /note="Description of Artificial Sequence: Synthetic coding sequence"
  source 1..669: mol_type = other DNA
atgaacaagcctctcctgtggatctctgtgctcaccagcctgctggaagccttcgcgcataccgaccttagtggaaaagtgtttgtcttccccagggaatccgtaactgatcacgtcaacttaataacccctctggagaagcctctccagaacttcacactctgtttcagagcctattctgatttgagcagggcatattctctattctcctataacactcaggggcgagataacgagttgctcgtgtataaagagagagtcggagaatacagcctctacatcggacgccacaaggttactagcaaggtgatcgaaaagttccccgcccctgtacatatctgcgtgtcttgggagtcttctagcggaattgcagaattctggatcaatgggacgcctttagtgaagaaggggctcagacagggctacttcgtggaggcccagcccaaaatcgtgttaggacaagagcaggactcatatggcggtaagttcgaccgaagccagtccttcgttggcgaaatcggcgacctctacatgtgggactctgtgttgccgccagagaacattctctcagcataccaggggacacctctgcccgctaacatcctcgattggcaagccctcaactatgagattaggggatatgtaattattaagcctctggtttgggtt

SEQ ID NO: 6158 - DNA, 669 bp, synthetic construct
  misc_feature 1..669: note = source = /note="Description of Artificial Sequence: Synthetic coding sequence"
  source 1..669: mol_type = other DNA
atgaataagcccctgttgtggatttcagttctgacatcgttactcgaggccttcgctcataccgacctttctggaaaggtgttcgtttttccaagagagtccgtcactgatcacgtgaaccttatcacacctctggagaaacctttgcaaaatttcaccttgtgttttcgcgcgtactccgatctatctagagcgtattctctattctcttataacacacagggtagagacaatgaactgcttgtgtataaagagcgtgttggcgagtactctctttacatcggcagacacaaggtgacttcaaaagtcatcgaaaagtttcccgcaccggtccacatttgcgtctcgtgggagagcagctctggtatcgctgagttttggatcaacggaacccctctggtcaagaaaggtctaagacaaggttattttgtggaggctcaacctaagatagtgctgggacaggaacaggattcttatggcgggaagtttgaccggtcccagtctttcgtgggagagatcggagatttgtacatgtgggactcagttttgccacctgagaacatcctgagtgcatatcaaggcacaccactgcccgcaaatatcctggactggcaggccttgaattatgaaataaggggctatgtgattatcaaacctctggtctgggta

SEQ ID NO: 6159 - DNA, 669 bp, synthetic construct
  misc_feature 1..669: note = source = /note="Description of Artificial Sequence: Synthetic coding sequence"
  source 1..669: mol_type = other DNA
atgaataagcccctcctgtggatcagcgtcttgacgtccctcctggaagcgttcgcccataccgacttgtcaggaaaagtgttcgtgtttccgcgggaatcagtgactgatcacgtgaacctcatcaccccgctggagaagccactgcaaaatttcactctttgtttcagggcctattcggacctgtcgcgggcgtacagcctcttttcgtacaacacccaaggacgcgataacgaactcctggtctacaaggagagagtcggagaatactccctttacattggccgccataaggtcaccagtaaggtgatcgaaaagtttccagcacctgtccacatctgcgtgagctgggaatcttcgtcagggatcgctgaattctggatcaacggaactcctctggtgaaaaagggattgagacaaggatacttcgttgaggcccagccaaagatcgtgctcggtcaggaacaggatagctacggcggcaaattcgaccgctcccagtccttcgtcggagagattggtgacctgtacatgtgggattcggtgctgcctccggagaatatcctgtccgcataccaggggactccgctgccggctaacatcctggactggcaggccctcaactacgagatccggggctacgtgatcattaaacccctggtgtgggtg

SEQ ID NO: 6160 - DNA, 669 bp, synthetic construct
  misc_feature 1..669: note = source = /note="Description of Artificial Sequence: Synthetic coding sequence"
  source 1..669: mol_type = other DNA
atgaacaagcccctcttgtggatctcagttcttacctccctgcttgaggccttcgcccacacggacctctcgggaaaggtctttgtctttccaagggagtcggtgactgatcatgtgaatctgatcaccccgctggaaaaacctctgcagaactttactctgtgttttcgcgcatactcagatctgtcccgggcctactcgctgttctcctacaacacgcagggacgcgacaacgaactgttggtctacaaggagagggtgggagaatacagtctgtacatcggccggcataaggtcacctcaaaagtgattgaaaagttccccgctcctgtgcacatttgcgtgtcatgggagagctcatcaggcatcgctgaattctggatcaatggtaccccgttggtgaagaaaggtctgaggcaaggatatttcgtggaagcccagccaaaaatcgtgctcggacaagaacaggactcctacggcgggaaattcgacagatcccagtctttcgtgggcgaaatcggagatctgtacatgtgggactccgtgttgcccccggagaacatcctgtcagcgtaccagggaactccactcccggccaatatccttgattggcaggccctgaactacgaaatcagagggtacgtgattatcaagcccctggtgtgggtc

SEQ ID NO: 6161 - DNA, 669 bp, synthetic construct
  misc_feature 1..669: note = source = /note="Description of Artificial Sequence: Synthetic coding sequence"
  source 1..669: mol_type = other DNA
atgaataaaccactcctgtggatttcagtactgacatcattactcgaggcttttgcacataccgatttgagtggcaaagtctttgtcttcccgcgcgagtccgttactgatcacgtgaatctgatcacacctcttgagaagcctctccaaaactttacactgtgctttcgggcttattccgacctgagtagggcgtattcactgttctcttataatacccagggtcgggacaatgagctactcgtgtacaaagagcgggttggggagtattcgctgtatataggaagacacaaagtgactagtaaggtgatcgagaaatttccagccccagtgcacatctgtgtaagttgggagagctcatccggcatcgcagaattttggatcaatggaacaccgctcgtcaagaagggcctccggcaggggtacttcgtggaggcgcagcccaagatcgtgctgggtcaggaacaggattcctatgggggcaaattcgatcggtcccaaagctttgtgggggaaatcggggatctatatatgtgggattccgttctaccccctgaaaatatcctgtcagcgtaccagggtaccccgctccctgctaacatactggattggcaggcgctgaactatgagattagggggtacgtgattattaaaccactggtgtgggtg

SEQ ID NO: 6162 - DNA, 669 bp, synthetic construct
  misc_feature 1..669: note = source = /note="Description of Artificial Sequence: Synthetic coding sequence"
  source 1..669: mol_type = other DNA
atgaataaacccctgctgtggatctctgtgctgactagcctgctggaggcattcgctcacaccgaccttagtggtaaagtattcgtcttccccagggaaagcgtgacggatcacgtcaatctcatcactcctctggagaaacctttgcaaaacttcaccctttgtttcagggcttattccgacttgagccgcgcatacagcctcttttcctacaacacccagggacgcgacaacgagctcctggtttacaaggagagggtgggcgaatatagcctgtacattggccgccataaagtgacgagtaaggttatcgagaaattccccgcgcccgttcacatttgcgtgtcttgggagtctagctcaggcatcgccgagttttggatcaatggtacccctttggtgaaaaagggtttgagacaaggttacttcgtcgaagcacagccaaagatcgtcctcggccaggagcaagattcttatggaggtaagttcgaccgctctcagagcttcgttggagagataggtgacctgtacatgtgggactcagtgctcccccccgagaacattctgtctgcgtatcagggtaccccattgccagccaatatccttgactggcaggctctgaactacgaaattagaggatacgtaattattaagccactcgtctgggtg

SEQ ID NO: 6163 - DNA, 669 bp, synthetic construct
  misc_feature 1..669: note = source = /note="Description of Artificial Sequence: Synthetic coding sequence"
  source 1..669: mol_type = other DNA
atgaacaaaccattgctgtggatatccgtgttgaccagcctgctggaggcgtttgcccacaccgatttgtcgggcaaggtgttcgtgttcccgagggaatcggtcactgatcacgtgaatcttatcactcctctcgaaaaaccgctccagaatttcaccctgtgtttccgggcctactcggacctgtcgcgcgcatactcactcttctcgtataacacgcagggcagagacaatgagcttcttgtctacaaggaacgcgtgggtgaatattccctctacatcggcagacataaggtgacctcaaaagtgatcgaaaagttcccggcaccagtgcacatttgcgtcagctgggaatcctcgtcagggatcgcggagttttggatcaacggaacccctcttgtgaagaaggggctgagacaaggctacttcgtggaagcccaaccgaagatcgttctcggacaagagcaggactcgtacggaggaaagttcgatcggagccagtcctttgtcggagagatcggagatctgtacatgtgggactccgtgctccccccagagaacattctgtccgcctatcaggggacgcctcttcctgctaacatcctggactggcaagcgctcaactacgagatccggggttacgtgatcataaagccactggtgtgggtg

SEQ ID NO: 6164 - DNA, 669 bp, synthetic construct
  misc_feature 1..669: note = source = /note="Description of Artificial Sequence: Synthetic coding sequence"
  source 1..669: mol_type = other DNA
atgaacaagccgctcctttggatctctgtgctcacctccctcctcgaagcgttcgcgcacaccgatttgtcgggaaaggtgtttgttttcccacgcgaaagcgtgactgaccacgtgaatcttatcacgccgctcgagaagccgctgcagaactttaccctctgttttcgcgcctattccgatctttcccgggcctactcactgttctcgtacaatacccaaggccgtgataacgagctgctggtctataaggagcgggtcggggagtacagtctttacatcggacgccacaaagtgacgtccaaagtgatcgaaaagttccctgctcccgtccatatctgtgtgtcatgggagagctcctccggaatcgcagagttttggatcaacggcactccgctggtgaaaaagggcctgaggcaaggatacttcgtcgaagcccagcctaagatcgtcctggggcaggagcaggactcatatggcggcaagtttgacagatcacaatcattcgttggcgaaattggagatctctacatgtgggacagcgtgcttccgccggagaacatcttgtccgcataccaggggactcccctgcctgcaaatatcctggattggcaagcactgaactacgaaatccggggatacgtgatcattaaacccctggtctgggtg

SEQ ID NO: 6165 - DNA, 669 bp, synthetic construct
  misc_feature 1..669: note = source = /note="Description of Artificial Sequence: Synthetic coding sequence"
  source 1..669: mol_type = other DNA
atgaacaaaccgctcttgtggatctcggtcctgactagccttcttgaggccttcgcgcacactgacctgtctgggaaggttttcgtgttcccgcgcgaatctgtgacggatcacgtgaacctgattacccccctcgagaagcctctccaaaactttaccctttgcttcagagcctacagcgacctgtcccgggcctactccctcttctcgtataacactcagggaagagataacgaactcctggtctacaaggaacgggtcggagaatattcgctctacatcggacggcataaggtaacctcgaaggtaatcgagaagttcccagcaccggtccatatctgtgtgagctgggaatcgagctccggaatcgctgaattttggatcaatggaaccccgctggtcaagaaaggattgcgtcaaggttacttcgtggaggcgcagcctaagattgtgttggggcaggaacaggactcctacggagggaaattcgacaggtcgcagtcgtttgtgggcgagattggcgatctctacatgtgggatagtgtgctgccgcccgagaatatcctctctgcgtaccagggcacgccactgccagccaatatcctggactggcaagcactcaactatgaaattcgcggttacgtgatcatcaaaccacttgtgtgggtg

SEQ ID NO: 6166 - DNA, 669 bp, synthetic construct
  misc_feature 1..669: note = source = /note="Description of Artificial Sequence: Synthetic coding sequence"
  source 1..669: mol_type = other DNA
atgaacaaacctctcctgtggattagcgtgttgacgtctctgctggaggccttcgcacatacagacctcagtgggaaagtattcgtgttccctcgggagagcgtgaccgaccacgtaaatctgataacgccacttgagaagccactgcagaacttcaccctgtgctttcgcgcatactctgacctctcaagagcatattcattgttctcctataacactcagggcagagacaacgagctcctggtgtataaagagcgagtgggagaatacagcctttacatcggcaggcacaaggttacctccaaggtcatcgagaagtttccggccccggtgcacatctgtgtttcctgggaatcgagcagtggaatagcggagttctggataaacggaaccccacttgtgaagaaaggcttgcgtcaaggctatttcgttgaagctcagcctaagattgtcttagggcaggaacaggatagctacggcggcaagtttgacaggagtcaatcctttgtaggtgagatcggtgacctgtatatgtgggactcagtgctcccaccagagaatatcctgagtgcatatcaggggacacctcttcccgccaacattctggattggcaggcgcttaattacgagatacggggatatgtgataatcaagcccttagtctgggtc

SEQ ID NO: 6167 - DNA, 669 bp, synthetic construct
  misc_feature 1..669: note = source = /note="Description of Artificial Sequence: Synthetic coding sequence"
  source 1..669: mol_type = other DNA
atgaacaaaccactcctgtggatttccgttctcacatccctgctagaggctttcgcgcatactgacttgagcggaaaagtgtttgtattcccgcgcgagtccgtcaccgaccatgtcaaccttatcacgccgctggagaagccactgcaaaatttcacactttgttttcgagcatactccgacctcagtcgggcttacagtttgttctcttataatacccaaggacgagacaacgagctgcttgtatacaaggaacgagtgggagaatattccttatacatcggtcgccacaaagtgacgtctaaagtgattgagaaatttcctgcaccagttcatatttgtgtatcgtgggagtcttccagtggtatcgcagagttctggattaacgggactcctctggtgaaaaagggcctgaggcagggatatttcgtggaggctcagccgaaaatcgtactgggacaggaacaggattcatacggaggtaagtttgacaggagccaatcattcgtgggcgaaattggcgacttgtacatgtgggacagcgtgctacctccggaaaatatccttagcgcttaccaggggactcctctgccagctaacatattggactggcaagcgctgaattacgaaatcaggggctatgtcatcatcaagccactagtctgggtg

SEQ ID NO: 6168 - DNA, 669 bp, synthetic construct
  misc_feature 1..669: note = source = /note="Description of Artificial Sequence: Synthetic coding sequence"
  source 1..669: mol_type = other DNA
atgaataagccccttctgtggatcagtgtgctcacctctttgctggaggctttcgctcacaccgatctctccggaaaggtcttcgtcttcccgagagaaagcgtcaccgaccacgtaaatttgatcacccctctcgagaaaccactacagaattttaccctatgcttcagggcctatagcgatctatccagggcctactccctgttcagctacaatactcaaggaagggacaacgagctgctggtgtataaagagcgtgtcggcgagtatagtctgtatatcgggaggcataaagtgacatctaaagtgattgagaaattcccggcaccggtccatatttgcgttagctgggaatcttcctctggaatcgcggagttttggatcaacggcactccgctggtgaagaagggtctgcgtcaaggttacttcgtcgaggcgcagcctaagattgtgctggggcaggaacaggacagttatggcgggaagtttgatcgctcacaaagcttcgtcggcgagatcggcgatctctacatgtgggacagcgtcctgcctcccgagaacatcctgtccgcataccaggggacacccctgcccgctaatattctagactggcaggccctgaattatgaaatccgtggttatgtgattattaaaccacttgtgtgggtt

SEQ ID NO: 6169 - DNA, 669 bp, synthetic construct
  misc_feature 1..669: note = source = /note="Description of Artificial Sequence: Synthetic coding sequence"
  source 1..669: mol_type = other DNA
atgaacaaacccctgctttggatttcggtcctgacctcactgctcgaagccttcgcacacactgatcttagcggaaaggtgtttgtgttcccaagagaaagcgtgactgaccacgtgaacctgatcactccactcgagaagccactgcaaaactttactctgtgtttccgcgcttattcggatctttcccgcgcatactcgctgttttcgtacaacacccaaggacgtgataacgaacttctcgtctacaaggaacgggtgggagagtactcgctgtacattggcagacataaagtcacgtccaaggtgatcgaaaagttcccggcgccagtccatatatgcgtgtcgtgggagtcatcatccggaatcgcagagttctggatcaatggtactccacttgttaagaaggggctccggcaaggatactttgtggaagcacaaccgaagattgtccttggacaggaacaggactcgtacgggggcaaatttgataggtcccagtcctttgtgggcgaaatcggggatctttacatgtgggacagcgtgttgcctccggagaacatcctgtcggcgtaccaaggcacgcctctgcctgccaacattctcgattggcaggcattgaactacgaaatccgaggctatgttatcataaaaccacttgtctgggtg

SEQ ID NO: 6170 - DNA, 669 bp, synthetic construct
  misc_feature 1..669: note = source = /note="Description of Artificial Sequence: Synthetic coding sequence"
  source 1..669: mol_type = other DNA
atgaacaaaccgcttctctggatttcagttcttacatccctcttggaggcatttgcacatactgatttgtcgggaaaagtcttcgtctttccaagagaatctgttaccgaccatgtaaaccttatcacccctcttgagaagccgctgcaaaactttactctgtgtttccgagcttactcggatctgtcacgcgcctacagccttttctcatacaacactcaaggacgcgacaacgagcttttggtgtataaggagcgtgttggggagtattcgttatatattggtcgccataaagttacttcaaaggttattgaaaaatttccagcccctgttcatatatgtgtctcttgggaatcgtcctcaggaatagcagagttttggatcaatggaacaccattggtaaaaaagggtcttagacagggatactttgtagaagcgcagccgaaaattgtcctgggacaggaacaagactcgtacggcggtaagttcgataggtcccaatcattcgtgggagaaattggagatctctatatgtgggacagtgtgctaccgccagaaaatatcttgagcgcttaccaaggaactccattgcctgccaatattcttgattggcaagcactaaactatgagatacggggttacgttataataaagccattggtgtgggtt

SEQ ID NO: 6171 - DNA, 669 bp, synthetic construct
  misc_feature 1..669: note = source = /note="Description of Artificial Sequence: Synthetic coding sequence"
  source 1..669: mol_type = other DNA
atgaataaacccctgttatggatctctgtcttaacttccctgctggaggctttcgctcataccgatctgagcggcaaagtattcgtatttccacgggagagcgtgacagaccacgtgaacctgataacacctctggagaagcccctgcagaactttactctctgctttagggcttattccgacctgtcccgcgcttactcacttttttcttacaatacacagggcagagataatgaactgctggtgtacaaggaaagagtgggggaatattcactatatattggcaggcacaaagtgacatccaaagtaatagagaagttccccgcaccagttcatatctgtgtgtcctgggagagtagctccggaattgcagaattttggattaatggaacacctctagtgaagaaggggttaaggcaaggctacttcgtcgaggcgcagcccaagatcgtattgggacaggaacaagatagttatgggggaaagttcgaccgctcccagtcattcgtgggagagatcggagatctgtacatgtgggattccgtgctgcctccagagaatatcctgagtgcataccagggaactccgctccccgccaacattctggactggcaggctcttaattatgaaatacgggggtatgttattatcaagcccttggtctgggtg

SEQ ID NO: 6172 - DNA, 669 bp, synthetic construct
  misc_feature 1..669: note = source = /note="Description of Artificial Sequence: Synthetic coding sequence"
  source 1..669: mol_type = other DNA
atgaataagccccttttatggatttccgttctgaccagcctcctcgaggccttcgcacacactgacctttccggaaaggtctttgtgttccctcgcgaaagtgtgaccgaccacgtgaatctgatcaccccattggaaaagccccttcaaaatttcactctgtgcttcagagcctacagcgatcttagccgagcatacagcttattctcatataacactcaagggagggacaacgagctcctagtttacaaggagcgggtcggggaatactcactctatatcggcagacataaagtgacctcaaaggtgatcgaaaagttccctgcgcccgtgcacatttgtgtttcgtgggaatcgtccagcgggatagctgagttctggattaacggcaccccgttagtgaagaagggattgcgtcagggctattttgtggaagcgcaaccaaagatcgtgctaggacaagaacaggatagctacgggggtaaatttgacaggagccagagctttgtgggcgaaattggtgatctctatatgtgggattccgtccttcctccagaaaacatcttatccgcctaccaaggcacgccactgcccgcaaatatacttgattggcaggccctgaactatgaaatccgggggtatgtgattatcaagccgctggtgtgggtc

SEQ ID NO: 6173 - DNA, 669 bp, synthetic construct
  misc_feature 1..669: note = source = /note="Description of Artificial Sequence: Synthetic coding sequence"
  source 1..669: mol_type = other DNA
atgaataaaccgctgctgtggatctccgtgctgactagcctcctggaggccttcgctcacactgacctctccggaaaggtgttcgtttttcctagagagtcggtcactgaccatgtgaatcttatcaccccattggaaaagccgctgcagaacttcactctgtgcttccgcgcgtatagcgacctgtcaagagcgtactcgctgttttcgtacaacacccaaggccgcgacaatgaactgttggtgtacaaagagcgcgtcggagaatattcattgtacattggtcggcacaaggtgaccagcaaggtgatcgaaaagttcccagcccccgtgcacatctgcgtgtcgtgggaatcctcatccggtatagctgaattctggatcaacgggaccccactcgtgaagaaggggctccgccagggatactttgtggaggcgcaacctaagatcgtgctgggtcaagaacaggactcctacggcggaaagttcgatcgctctcaatcgttcgtgggagaaataggagatctgtacatgtgggatagcgtcctcccaccggagaacattcttagcgcctaccaggggacgccactgccggcgaatatcctggattggcaggccctcaactacgagattaggggatacgtcatcattaagcccttggtgtgggtc

SEQ ID NO: 6174 - DNA, 669 bp, synthetic construct
  misc_feature 1..669: note = source = /note="Description of Artificial Sequence: Synthetic coding sequence"
  source 1..669: mol_type = other DNA
atgaacaaaccgctcttgtggatctccgtgctcacgtctctgttggaagcttttgctcacaccgatctgagcgggaaagtctttgtcttccctagagaatccgtcacggaccatgtaaatctaatcactccgctcgagaaaccattacagaatttcaccctttgtttccgggcttatagcgacctgagccgcgcgtacagtctgtttagctataatactcagggacgcgataacgagcttctggtctataaggaacgggtgggggagtattctctgtacattggaagacacaaagttactagcaaggttatcgagaagtttccagctcctgttcatatctgtgtgagttgggagtcctcttccgggattgcagaattctggataaatggcactcctcttgtgaaaaagggattgagacagggctacttcgtagaagctcaaccgaaaatcgtgctgggtcaagagcaggactcctatggaggaaaattcgaccgctcccagtccttcgtcggcgagattggagacctatatatgtgggactccgttcttccccctgaaaacatcctgtctgcatatcaggggacgccactgccagccaacatccttgattggcaagcactgaactatgagataaggggatacgtgatcataaaaccgttggtgtgggtg

SEQ ID NO: 6175 - DNA, 669 bp, synthetic construct
  misc_feature 1..669: note = source = /note="Description of Artificial Sequence: Synthetic coding sequence"
  source 1..669: mol_type = other DNA
atgaataagccactgctgtggatcagcgtactgacctccctgcttgaagccttcgctcacaccgacctgtcaggaaaggtgttcgtgtttccgcgagagagcgtgacggatcatgtcaatctgatcacccctctggaaaagcccctgcagaacttcactctctgcttccgggcctactcggacctgtcccgagcttattcactgttctcgtacaacacccagggcagagataacgaactcctcgtgtacaaggagcgcgtgggtgagtatagcctttacattgggcggcacaaggtcacttcgaaagtcatcgagaagtttcccgctccagtgcacatctgcgtctcgtgggagtcgtcctccggaatcgccgaattctggatcaacggtaccccgctggtgaagaagggactcaggcagggatatttcgtggaagcgcaaccgaagatcgtgctgggtcaggaacaagactcgtacgggggaaagtttgaccgctcacagtcgttcgtgggcgagatcggagatctgtacatgtgggattccgttctgccgcctgagaacatcctgagcgcctaccaggggaccccactcccggcgaacatcctggattggcaggctcttaactacgagatccgcggatacgtgatcattaagccactcgtgtgggtc

SEQ ID NO: 6176 - DNA, 669 bp, synthetic construct
  misc_feature 1..669: note = source = /note="Description of Artificial Sequence: Synthetic coding sequence"
  source 1..669: mol_type = other DNA
atgaataaacccttgctgtggatcagtgtcctgacttctttgttagaggcctttgcgcacaccgatttgtctggcaaagttttcgtttttcctcgcgagtccgttacggatcatgtgaaccttatcaccccattggaaaaaccattgcagaacttcaccttgtgctttagagcatactcggatctgtcacgcgcgtacagcctctttagctacaatacccagggacgcgataacgagttgcttgtatacaaggaacgggtgggtgagtatagcttgtacattggccggcacaaggttacctctaaggtgatcgagaagtttccagctcccgtgcacatctgtgtcagctgggaaagctcatctggaatcgcagagttttggatcaacggcacaccactcgtcaaaaagggcctacggcagggctattttgtcgaggcccagccaaagatagtgctgggacaggagcaagattcttatggcggtaaatttgacagaagccagagctttgtgggcgagatcggtgatttgtacatgtgggactcagtcctgcctccagaaaacatcttatcggcataccagggcactcctcttccagccaacattctggactggcaggccctcaattacgagatcaggggctacgtgatcataaaacctctggtgtgggtc

SEQ ID NO: 6177 - DNA, 669 bp, synthetic construct
  misc_feature 1..669: note = source = /note="Description of Artificial Sequence: Synthetic coding sequence"
  source 1..669: mol_type = other DNA
atgaataagccgctgctctggatctcggtgctgacgtcgctcctggaggcctttgcccatactgacctgtctggcaaagtgttcgtgttcccgcgcgagtccgtgaccgaccacgttaatctgatcaccccgctcgaaaaaccactgcagaatttcactctctgttttcgcgcctattcggacctgtcgcgggcatacagcctgttctcctacaacactcaggggcgggacaacgaactgcttgtgtacaaggaacgcgtgggtgaatacagcctctacatcggtcgccataaggttacttccaaggtgattgagaaattccctgcgcccgtccacatctgcgtgtcctgggagtcatcctcaggaatcgccgagttctggattaacggcaccccgctggtcaagaaaggactgcggcagggatactttgtggaggcgcagcctaagatcgtgctgggccaggagcaggattcctacgggggcaagtttgaccgcagccagtcctttgtgggagagatcggagacttgtacatgtgggattccgtcctccctccggagaacatcctctcagcgtaccaaggaacgccgctgccggccaatatcctggactggcaggccctcaactacgagatcagggggtacgtcatcatcaagccgttggtgtgggtg

SEQ ID NO: 6178 - DNA, 669 bp, synthetic construct
  misc_feature 1..669: note = source = /note="Description of Artificial Sequence: Synthetic coding sequence"
  source 1..669: mol_type = other DNA
atgaacaaaccgctgctctggatttcggtgcttacctccctcctggaggcatttgcacatactgacctgtcgggcaaggtattcgtctttcctcgggagtcggtgactgaccacgttaatctgatcacccccttggaaaaacccctccagaatttcacgctgtgttttcgcgcttactccgacctgagccgggcctatagtctcttcagctacaatacccagggacgggacaacgaactcctcgtgtacaaagaaagagtgggagaatactccctgtacatcggtcgccacaaggttacttccaaggtcatagagaagttcccagcgcctgtgcacatatgcgtctcgtgggagagctcctcaggaatcgctgagttttggatcaacggtaccccgttggtcaaaaaggggcttagacaaggctatttcgtcgaagcccaaccgaagattgtgctggggcaggagcaagactcgtacggtggaaaattcgatcggagccagtcgttcgtgggggagatcggagatctctacatgtgggactccgtgctccctcctgagaatatcctgtcagcgtaccagggcaccccactgcctgccaacatcctggattggcaagctctcaactacgaaatccgtggatacgtcatcattaagccattggtttgggtg

SEQ ID NO: 6179 - DNA, 669 bp, synthetic construct
  misc_feature 1..669: note = source = /note="Description of Artificial Sequence: Synthetic coding sequence"
  source 1..669: mol_type = other DNA
atgaataaacctctgctttggattagcgtgttaacaagtctgctcgaggccttcgcacataccgacctgtcaggaaaggtgtttgtgttcccgcgggaatcagtgactgaccacgtaaacctgattactccgttagaaaagcccttgcagaatttcacattgtgttttcgcgcgtactcagacctttctagagcctatagtctgttctcctataacactcagggtcgggacaacgagcttctcgtatataaagaaagggtgggtgagtattcgctctacataggtcgacacaaagtgactagtaaggtgatcgagaaattcccagcaccagtgcatatctgtgtgagttgggaaagcagcagtggcattgcagagttctggatcaacggcacccccctggtcaaaaagggactcagacaggggtacttcgtggaggctcagcccaaaatcgtgctgggacaggagcaggattcttatggcgggaaattcgatagaagtcaatcctttgttggggaaattggagatctttacatgtgggacagcgttttgccccccgaaaacatcctctcggcctatcaagggacgccgttaccagcaaatatcctggactggcaggccttgaattacgagattcgtgggtacgttattataaaaccgctcgtctgggtc

SEQ ID NO: 6180 - DNA, 669 bp, synthetic construct
  misc_feature 1..669: note = source = /note="Description of Artificial Sequence: Synthetic coding sequence"
  source 1..669: mol_type = other DNA
atgaataaaccattgttgtggatatcagttttaacttctttacttgaagcatttgctcatactgatttatctggaaaggtttttgtttttccacgtgaatcagtaactgaccatgttaatttaattactccacttgaaaaaccattacaaaattttactttatgttttagagcatattctgatttaagtagagcctattcattatttagttataatacacaaggaagagataatgaacttcttgtatataaagaaagagttggagaatattcattatatattgggaggcataaagtaacaagtaaagttatagagaaatttccagcaccagttcatatttgtgtttcatgggaatcatcatcaggtattgcagaattttggattaatggaacacctttagtaaaaaaaggtttgcgtcaaggatattttgttgaagctcaaccaaaaattgttcttggacaagaacaagatagttatggtggtaaatttgatagatcacaatcatttgttggagaaattggagatctttatatgtgggattccgtacttccaccagaaaatatcctttctgcttatcaaggaactcctttgccagctaatattcttgattggcaagctttaaactatgaaatacgtggatatgttattattaaaccattagtttgggtt

SEQ ID NO: 6181 - DNA, 669 bp, synthetic construct
  misc_feature 1..669: note = source = /note="Description of Artificial Sequence: Synthetic coding sequence"
  source 1..669: mol_type = other DNA
atgaacaagcccctcctttggatttccgtcctgaccagtctgcttgaggcatttgcacacaccgacctttccgggaaggtctttgtgtttccccgggagtccgtgactgatcacgtgaacctgatcactccgctggagaagccccttcagaatttcacgctgtgcttccgcgcctacagcgacctctcaagagcatacagcttgttcagctacaatacccaaggacgagacaatgaacttcttgtctacaaggagagggtcggagaatactcgctgtatattggacgccataaagtcacttcaaaggttatcgaaaagtttccagctccagtacatatatgtgtctcatgggagtcgtcgtcgggtattgccgaattttggataaacggaacccctttggttaagaaaggactgaggcagggatacttcgtggaagcacaacccaaaattgtgctgggtcaggaacaagattcctacgggggaaaattcgatagatcgcaatcgttcgttggcgagataggcgacctttacatgtgggacagtgttctgccacctgaaaacatcctctccgcataccaggggacccccctcccagcaaacattcttgattggcaagctctcaattatgaaatccgtggctacgtgatcattaagccactggtgtgggtg

SEQ ID NO: 6182 - DNA, 669 bp, synthetic construct
  misc_feature 1..669: note = source = /note="Description of Artificial Sequence: Synthetic coding sequence"
  source 1..669: mol_type = other DNA
atgaacaagcctttgctctggatcagcgtactgacttcattgctcgaagctttcgcgcacacggatctgagtggaaaggtctttgtgtttcctagagaatccgtgacagaccatgtgaatctcatcacgccgctggagaagcctttgcagaactttaccctctgcttcagagcttacagcgatctcagccgagcctacagcctcttctcttacaacacccagggacgagataacgaacttctagtctataaggagagggtgggggagtactctttatacatcgggcgccacaaggttacatccaaagtgattgagaagttcccagccccggtacatatttgtgtatcttgggagagttcttccggaattgctgaattctggattaacggcacccctctggtgaagaaagggttgcggcaggggtacttcgtcgaggcacaacctaaaatcgtgctaggtcaggaacaggattcatatggagggaagttcgacagaagtcagagctttgtcggagagatcggcgacctatatatgtgggactccgtcctccctcctgagaacattctgagtgcgtatcagggaacccccctaccggccaacattctggactggcaggctctgaactatgagatacggggatacgtcataattaagccgcttgtgtgggtc

SEQ ID NO: 6183 - DNA, 669 bp, synthetic construct
  misc_feature 1..669: note = source = /note="Description of Artificial Sequence: Synthetic coding sequence"
  source 1..669: mol_type = other DNA
atgaataaaccgctactatggatatcggtattaacgtcgttattagaagcgtttgcgcatacggatttatcgggtaaagtatttgtatttccgcgtgaatcggttacggatcatgtaaatttaataacgccgttagaaaaaccgttacaaaattttacgttatgttttcgtgcgtattcggatttatcgcgtgcgtattcgttattttcgtataatacgcaaggtcgagataatgaattattagtatataaagaacgagtaggtgaatattcgctatatataggtcgacataaagttacgtcgaaagtaatagaaaaatttccggcgccggtacatatatgtgtttcgtgggaatcgtcgtcgggtatagcggaattttggataaatggtacgccgttagtaaaaaaaggtttacgtcaaggttattttgtagaagcgcaaccgaaaatagttctaggtcaagaacaagattcgtatggtggtaaatttgatcgatcgcaatcgtttgtaggtgaaataggtgatctatatatgtgggattcggtactaccgccggaaaatatattatcggcgtatcaaggtacgccgttaccggcgaatatattagattggcaagcgctaaattatgaaatacgtggttatgtaataataaaaccgctagtatgggta

SEQ ID NO: 6184 - DNA, 669 bp, synthetic construct
  misc_feature 1..669: note = source = /note="Description of Artificial Sequence: Synthetic coding sequence"
  source 1..669: mol_type = other DNA
atgaacaagccgctgctttggatctctgtgttgactagcttgctggaggcgttcgcccatacggatctgtcaggcaaggtgttcgtgttcccccgcgaatcagtgactgaccacgtgaatctgatcaccccactggaaaagcctctgcaaaacttcactctttgttttcgcgcctactcggatctgtcaagagcttactccctgttttcctacaacacccagggacgcgacaacgaactgctcgtgtacaaggaaagagttggggaatactcactgtacattggtcgccacaaggtcacttcaaaagtgatcgaaaagtttccggccccggtgcacatctgcgtcagctgggagtcatcatccggtatcgcagaattctggatcaacggaacccccctcgtcaagaaggggctgcggcagggatacttcgttgaagcccagccaaaaatcgtgctgggacaggagcaagattcgtacggcggcaagttcgacagaagccagtcctttgtcggagagattggagacttgtacatgtgggactcggtgctgccaccggagaatatccttagcgcataccaaggtaccccgctgccggccaacatcctggactggcaggccctgaactacgagatccgcggttacgtgatcattaaaccgcttgtgtgggtt

SEQ ID NO: 6185 - DNA, 669 bp, synthetic construct
  misc_feature 1..669: note = source = /note="Description of Artificial Sequence: Synthetic coding sequence"
  source 1..669: mol_type = other DNA
atgaacaagcccctcctttggatcagcgtactgacatccctgctggaggccttcgcccacaccgacttatcaggaaaggttttcgtttttcctcgggagtctgtgacggatcacgtgaacctgatcacccctcttgagaagccgctgcagaactttaccctgtgtttccgcgcctattccgacctcagtcgcgcatacagcctgttttcctacaacacccaggggagggataatgaacttctggtgtataaggaacgcgtcggggagtactctctgtatatcggccgccataaggtcacatcaaaggtcatcgagaagttccctgctcccgtgcacatctgcgtttcgtgggagtctagctcaggaatcgccgaattttggataaacggcacccccctagtgaaaaagggactaagacaagggtactttgtcgaggctcagccaaaaatagtgcttggacaggagcaggatagctatggaggcaaattcgatcgatcccagagctttgtgggagaaatcggcgacctgtacatgtgggactccgttttgccgccagagaacattctgagcgcctaccaggggacccccctccccgccaatatcctggattggcaagcacttaactacgagataagaggatacgttattatcaagcctttggtctgggtg

SEQ ID NO: 6186 - DNA, 669 bp, synthetic construct
  misc_feature 1..669: note = source = /note="Description of Artificial Sequence: Synthetic coding sequence"
  source 1..669: mol_type = other DNA
atgaacaagccactcctctggatttcagtgctgacctctcttttggaggcattcgctcatacagacctgtccggtaaggtctttgtcttcccgcgggaaagcgtgaccgaccacgttaatctgattactccccttgaaaaacccttgcaaaatttcaccctctgcttccgtgcgtattctgatctcagcagggcatactctctgttctcatataatactcagggccgcgataacgaactcctggtttataaagagcgggtaggcgaatatagtctttatatagggaggcataaagtcacgtcgaaagtaatcgagaaatttcccgcacctgtgcacatctgcgtttcttgggagagtagttctgggatcgcggagttttggataaacggcacacccttggttaagaaaggcctgaggcaggggtattttgtggaagctcagcccaagatcgttctcggccaggagcaggatagctatggagggaagttcgatcgatcccagtcttttgttggggagatcggtgacctatatatgtgggactcagtgcttccacccgaaaatattctgagcgcataccagggaacacctttgcctgccaatatcctggactggcaggcgcttaactacgagatccgtggatacgttattatcaagccccttgtctgggta

SEQ ID NO: 6187 - DNA, 669 bp, synthetic construct
  misc_feature 1..669: note = source = /note="Description of Artificial Sequence: Synthetic coding sequence"
  source 1..669: mol_type = other DNA
atgaataagcccctgctgtggatcagcgtgctgacttccttgctcgaggcgttcgcccacaccgacctctctggcaaagtgttcgtgttcccgcgtgaatcagtgaccgatcacgtgaacctcatcaccccgctggaaaagcctctgcagaacttcacgctttgcttcagggcatactctgatctgtcgcgcgcatacagcctgttcagctataacacccagggcagggacaacgagctgctcgtgtacaaggagcgagtgggagaatactcgctgtacatcggccgccataaagtcacttcgaaggtgatcgaaaagttccctgccccggtgcatatctgcgtgtcctgggaatcatcctcagggatcgcggaattctggatcaatggtaccccgctcgtgaaaaagggcctccggcagggttactttgtggaagcgcagccgaagatcgtcctgggccaggaacaagatagctacggtggaaaattcgaccggagtcaatccttcgtgggcgagatcggagatctttacatgtgggattccgttctccctccggaaaacatcttgtcagcttaccagggcacccccctgccagcaaatatcctcgactggcaagcccttaactacgagatccggggatacgtcatcatcaagccgctggtgtgggtt

SEQ ID NO: 6188 - DNA, 669 bp, synthetic construct
  misc_feature 1..669: note = source = /note="Description of Artificial Sequence: Synthetic coding sequence"
  source 1..669: mol_type = other DNA
atgaataagcccttgctttggatctccgtgctgacgtcacttcttgaggcgttcgcacataccgacctctccggaaaggtctttgtgtttccgcgggaatcagtcaccgaccatgtcaacctgatcacgccgctggagaagccactccaaaacttcaccctgtgctttcgcgcatactctgatctgtcacgggcgtactcacttttttcgtacaacactcagggacgtgataatgaactgctggtgtacaaagaacgggtaggagaatattcgctgtacattggcagacacaaggtgaccagcaaagtgatagaaaagtttcccgctcctgtgcacatttgtgtgagctgggagtccagcagcggtatcgcagaattctggattaacggcacccctctcgtcaagaagggcctgcgccaaggttactttgtcgaggcacaaccaaaaatcgtgcttgggcaagagcaggatagctacggaggaaagtttgacagatcccagtcattcgtgggcgaaattggtgatctttacatgtgggattcggtcctgccccccgaaaacattctgtcagcataccagggtacgcccctgccagccaatatcctcgattggcaagcacttaactatgagattcggggatacgtgatcattaagccccttgtgtgggtg

SEQ ID NO: 6189 - DNA, 669 bp, synthetic construct
  misc_feature 1..669: note = source = /note="Description of Artificial Sequence: Synthetic coding sequence"
  source 1..669: mol_type = other DNA
atgaacaaaccgctgttgtggatctccgtgttgacttctctgcttgaagcctttgctcacacagatctttctgggaaagtgtttgttttccctagagagtccgttacagaccacgtgaatttgataactcccctcgagaagcctctgcagaatttcacactttgttttcgggcttactccgacttgtcaagagcatatagcctgttctcttataacactcagggccgcgacaacgaactgctggtctataaagagcgggttggtgagtacagtctttatatcggaagacataaagtcacgagtaaagtgattgagaagttccccgcaccagtgcatatttgcgtgagctgggagtcatccagcggaatcgccgaattttggattaacggtacccccctggtcaaaaaaggtttgaggcaggggtatttcgtcgaagctcagcccaagatcgttctgggccaggaacaggattcatacggaggcaagtttgataggtctcagagctttgtcggggagatcggagacctttatatgtgggactccgttctgccaccagagaacatcctttctgcctatcaggggacaccgctgcctgcgaatattctggactggcaggctctcaactacgaaatcagaggttatgtgattattaaacccttggtttgggtg

SEQ ID NO: 6190 - DNA, 669 bp, synthetic construct
  misc_feature 1..669: note = source = /note="Description of Artificial Sequence: Synthetic coding sequence"
  source 1..669: mol_type = other DNA
atgaacaagccactgctatggatctctgtattgacttccctgctggaggccttcgcacacacagacctgtctggaaaggtgttcgtgttcccgagggagtccgtcaccgaccacgtcaatttgatcactcctttggagaaacccctgcagaactttaccctttgttttagggcgtatagtgacctgagtagagcatacagcctgttttcctacaacacccagggacgggacaacgagctactagtgtacaaggagcgggtgggggaatactcactttatatcggacgccacaaagtgacatctaaggtcatcgaaaagtttcccgcccccgttcatatttgtgtgtcttgggagagttcttcaggaattgcagaattttggatcaatgggacacccctagtgaaaaaaggcctccgacaaggttatttcgtcgaagcccagcccaaaatcgttttgggacaggaacaggactcttacggggggaaatttgatcgttcgcagagttttgtgggggaaattggggacctatatatgtgggattcggttttaccccccgagaatattctgtcagcctatcagggcacccctctgcccgcaaatattctcgactggcaggctttgaactatgagatacgcggatacgtgatcatcaagccgctggtgtgggtt

SEQ ID NO: 6191 - DNA, 669 bp, synthetic construct
  misc_feature 1..669: note = source = /note="Description of Artificial Sequence: Synthetic coding sequence"
  source 1..669: mol_type = other DNA
atgaataaacctctgctttggatatctgttctaacctcgcttcttgaagcttttgcccataccgatcttagcgggaaggtgttcgtgttcccacgggaatccgttaccgaccacgtaaatctgattacaccactagaaaaaccacttcagaacttcacactatgttttagagcttacagtgacctgagcagagcttacagtctcttctcttacaacacccagggcagggacaatgagctgcttgtatacaaggaacgagtaggtgagtactctctctatatcggtcgccataaagtgaccagtaaggtcattgaaaaattccctgcgcccgtgcacatatgtgtcagttgggagtcgtcaagtggtattgcagaattttggatcaatggcacgcctttagtgaagaagggcctgagacagggatactttgtcgaggcccagccaaaaatagtcctaggtcaagagcaggactcttacggaggcaagttcgatagatcccagtcttttgttggcgagattggcgacctttacatgtgggatagcgtgctcccgcctgagaatattctgtcagcttaccaaggcacgccactgccagccaatattttggactggcaggccttaaactacgaaattcggggctacgtcattatcaaaccactggtttgggtg

SEQ ID NO: 6192 - DNA, 669 bp, synthetic construct
  misc_feature 1..669: note = source = /note="Description of Artificial Sequence: Synthetic coding sequence"
  source 1..669: mol_type = other DNA
atgaataagccacttctttggatatcggtgcttacctccctccttgaagcatttgcacatacggatctgagtggaaaggtgtttgtgtttccacgagagtccgttactgatcacgtgaatctcatcactcccctcgaaaagccgcttcagaactttaccctgtgctttcgcgcatactccgatctgtcgcgggcatactcccttttctcgtataacactcagggccgggataacgaacttctggtgtacaaggagcgtgttggagagtactcgctgtacataggaaggcacaaggtcacttcgaaagtgattgaaaagtttccagcacctgtgcacatctgtgtgtcctgggaaagcagctcaggcattgccgaattctggatcaacggcacccctcttgtgaaaaagggtctgcgacagggatacttcgtggaagcccaacctaagattgtgttgggccaagaacaagactcgtacgggggtaaattcgatcggtcccagtcctttgtgggagagatcggtgatctgtacatgtgggattcggtgttgccaccagagaacattcttagcgcatatcaaggcactccgctcccagccaacatactggattggcaggcactgaattacgaaattcgggggtacgtcatcatcaagcctctcgtctgggtt

SEQ ID NO: 6193 - DNA, 669 bp, synthetic construct
  misc_feature 1..669: note = source = /note="Description of Artificial Sequence: Synthetic coding sequence"
  source 1..669: mol_type = other DNA
atgaacaagccactcctgtggatctcggtcttgaccagcttgcttgaggcctttgcgcatactgacctttccggtaaggtgtttgtgtttcctagagagagcgtgaccgatcatgtcaatttgataaccccacttgagaaacctcttcagaatttcaccctgtgcttcagggcatactccgacttgagcagagcgtattcgctgttttcgtacaatacccaaggtcgcgacaatgaacttctcgtctataaggaacgtgtgggagaatactccctgtacatcggtagacataaggttacctccaaggtcattgaaaagtttcccgctccggtgcatatatgcgtcagctgggaatcctcgtctggaattgccgagttctggataaacggaacccctctggtcaagaagggactgcggcaaggatactttgttgaagcgcaacctaagatcgtgctcgggcaagaacaggattcatacggtggaaagttcgataggtcgcagagcttcgtgggagagattggggatctttacatgtgggatagcgtgctcccaccagaaaacattctgtcggcataccaggggactcctctccccgccaacattctggattggcaggcgctcaactatgaaattagagggtacgtgattatcaaacccctggtgtgggtg

SEQ ID NO: 6194 - DNA, 669 bp, synthetic construct
  misc_feature 1..669: note = source = /note="Description of Artificial Sequence: Synthetic coding sequence"
  source 1..669: mol_type = other DNA
atgaataaaccgttgctctggatctccgtgctgacttctctgctggaagcattcgctcataccgacttgtccggcaaggtttttgtcttcccgcgggaaagcgtaactgaccacgtaaatctcattacaccactcgaaaagccactccagaatttcacgttgtgtttcagggcctattccgatcttagcagagcctatagtctgttctcttacaatacacaggggagagataacgaactgctggtttataaagagagagtgggcgaatattccctttacatagggcggcataaggttacttccaaggtaatagagaagttcccagcgccggtgcacatttgtgtgagctgggagagctctagtgggattgcagagttctggatcaacggaactcctctggtgaaaaaaggccttagacaggggtacttcgtggaagctcagccaaagatcgtgttggggcaggagcaggactcctatggggggaagtttgaccgctcacagtcatttgtcggtgagataggtgatttgtatatgtgggattccgttcttcctcctgaaaatattctgtccgcttatcaggggacgccattgcctgccaacatcctggactggcaggctctgaactacgaaatacgaggatacgtcattattaaaccgctggtgtgggtg

SEQ ID NO: 6195 - DNA, 669 bp, synthetic construct
  misc_feature 1..669: note = source = /note="Description of Artificial Sequence: Synthetic coding sequence"
  source 1..669: mol_type = other DNA
atgaacaagcccctgttgtggatatctgtgctcacctctctgcttgaggcttttgcccatacagatctgagtggcaaagtatttgtcttccctagggagtcagtcacagaccacgtgaacctcatcacaccgctagagaagcccctgcagaacttcaccctgtgctttcgagcctattctgacctatcacgagcttactccctcttcagttacaacacccagggtagggataacgagctgctggtatataaggaaagagtcggcgaatacagtctttatattggtcgccataaggtgactagtaaagtgatcgagaagtttcctgctccggtgcatatctgtgtgagctgggagtccagctccgggatcgccgaattctggattaatggcacccccttggttaaaaaaggtttgaggcaggggtacttcgtcgaggctcagcctaaaattgttctcggacaggagcaagattcctatggcgggaagttcgataggagtcaatcttttgtgggcgaaattggggatctttacatgtgggattcggtgctcccgccggaaaacattttgtcagcgtaccagggcacacctcttcctgccaacattctggactggcaggccctaaactatgagattagaggctacgttatcatcaagccgttggtgtgggtc

SEQ ID NO: 6196 - DNA, 669 bp, synthetic construct
  misc_feature 1..669: note = source = /note="Description of Artificial Sequence: Synthetic coding sequence"
  source 1..669: mol_type = other DNA
atgaacaagccacttctttggattagcgtcctcacttcgcttctcgaagccttcgctcatactgaccttagtggaaaagtctttgtctttcctcgcgagtcggtcaccgatcacgtcaatctgattacccctctggaaaagccactgcagaactttactctttgcttcagagcgtactcggacctgtcgagggcttactcactcttctcatacaatacccaaggacgtgataatgaacttctggtctacaaggaaagagtgggagaatacagcctttacattggacggcacaaagtgacttccaaggtgattgaaaagttccctgcaccagtccacatttgtgtgtcctgggaatcctcttcagggatagcagaattttggatcaatggaaccccgcttgtgaagaaaggccttagacagggatactttgttgaggcccaacctaagatcgtgctgggacaagagcaggattcgtacggagggaagttcgatcgaagccagtctttcgtcggagaaattggagacttgtacatgtgggacagcgtcctccctcccgaaaacattctctccgcctatcaaggtacgccccttcccgcgaacatccttgactggcaagcactgaattacgagatccggggttacgtcatcattaaaccccttgtgtgggtg

SEQ ID NO: 6197 - DNA, 669 bp, synthetic construct
  misc_feature 1..669: note = source = /note="Description of Artificial Sequence: Synthetic coding sequence"
  source 1..669: mol_type = other DNA
atgaacaagcccctgctctggatttcagtcctgacgtcccttctggaggcttttgcacacactgatctctccggaaaggtctttgttttccctcgggagagcgtgaccgaccacgtgaatctgatcaccccccttgaaaagccactccagaatttcactttgtgtttcagagcatactctgatctgtcgagagcatactcgcttttttcctacaatacccaagggagagataatgaactgcttgtttacaaggagcgggtgggtgaatacagcctctacatcggacggcataaagtgaccagcaaggtcattgaaaagtttcctgcacccgtgcacatttgcgtgtcgtgggagagctcctcgggaattgctgagttttggatcaacggtacccctctcgtcaagaagggactgaggcaaggatactttgtggaagcacaacctaagattgtgctgggacaggaacaagactcgtacggagggaagttcgatcggtcgcagtcgttcgtcggtgaaattggtgacctctatatgtgggattcggtgctgccacctgagaacattctcagcgcataccaagggaccccattgcccgcaaacattctcgattggcaagccctgaattacgaaattcgtggatacgtcatcattaagccgcttgtctgggtg

SEQ ID NO: 6198 - DNA, 669 bp, synthetic construct
  misc_feature 1..669: note = source = /note="Description of Artificial Sequence: Synthetic coding sequence"
  source 1..669: mol_type = other DNA
atgaacaagccactgctctggatctccgttctcacgtctctgcttgaagcatttgcacataccgatctttctggcaaggtgtttgtgtttccccgggagagcgtgactgatcacgtgaacctcatcaccccacttgagaagcctttgcaaaactttacgctttgtttccgagcctactcagacttgagccgggcttattcgcttttcagctacaacactcaaggcagagacaacgaattgctcgtgtacaaggagcgagtcggagaatactcgctgtacattgggagacataaggtcacctcaaaagtaattgaaaagtttcccgcacctgtgcatatctgcgtctcctgggaaagctcgtcaggaattgcggaattttggattaacggtactccattggtcaagaaaggacttcgacaagggtatttcgtcgaagcccaacctaagatagtccttggtcaggagcaggactcctacggtggaaagtttgataggagccagtcgttcgtgggagagattggcgatctttacatgtgggattcagtgctgcctcccgaaaacatacttagcgcctatcaaggaaccccattgccagctaacattctggattggcaggcacttaactacgaaattaggggttacgtgatcattaagccactggtgtgggtc

SEQ ID NO: 6199 - DNA, 669 bp, synthetic construct; identical to SEQ ID NO: 6168
  misc_feature 1..669: note = source = /note="Description of Artificial Sequence: Synthetic coding sequence"
  source 1..669: mol_type = other DNA

SEQ ID NO: 6200 - DNA, 669 bp, synthetic construct
  misc_feature 1..669: note = source = /note="Description of Artificial Sequence: Synthetic coding sequence"
  source 1..669: mol_type = other DNA
atgaataagccgctcctttggatctcggtcctgacctcactgctcgaggcatttgcccatactgatctctcaggaaaagtgttcgtgttccctcgcgaatccgtaactgatcacgtgaatctgataacgccactggaaaagccgctgcagaatttcactctgtgctttcgggcttactcagacctgtcccgcgcttattcactcttctcatacaacacccaaggacgcgacaacgagctcctggtgtacaaggaacgggtcggcgaatactcgttgtacattggtcgacacaaagtgactagcaaggtgatcgagaagttcccggcgcctgtgcatatatgtgtgagctgggagtccagctcggggatcgccgaattttggatcaacgggacccccctggtgaagaagggactcaggcagggctacttcgtcgaggcacagcctaagattgtgctgggacaggaacaagactcctacggcggaaaattcgacaggtcccaaagtttcgtgggagagatcggcgatctgtacatgtgggacagcgttcttccgccggagaacatcctgtcggcgtatcaaggaaccccattgccggccaatatactcgactggcaggcgctcaactacgaaatccggggctacgtcatcatcaagccacttgtctgggtc

SEQ ID NO: 6201 - DNA, 669 bp, synthetic construct
  misc_feature 1..669: note = source = /note="Description of Artificial Sequence: Synthetic coding sequence"
  source 1..669: mol_type = other DNA
atgaacaaaccactgttgtggatttctgtcctcactagcctcctggaagcctttgcccacaccgacttatctgggaaagtgttcgtttttccgcgggagagtgtgaccgatcatgtgaatctcatcacccctttggagaagccattacaaaactttactctctgctttcgcgcttactccgacttgtcacgggcatacagtctattcagttacaacacccagggcagagacaatgagcttctcgtatataaggaaagggttggggaatactccttgtatatcgggcgccacaaggttacgagtaaggtgatcgaaaaattccctgctcccgtccacatatgcgtgtcctgggagtccagttctggaattgcggagttctggataaacggcacccctctcgttaagaaggggctccgacaggggtactttgttgaggctcagcctaagatcgtgttgggacaagagcaggactcctacgggggaaaatttgatcgatcacagagcttcgtgggagagataggggatctgtacatgtgggactccgtccttccgcccgagaacatccttagcgcatatcaaggtacccccctccctgccaacatcctcgattggcaggcactcaactacgagattcggggctacgtgattatcaagcccctggtctgggtg

SEQ ID NO: 6202 - DNA, 669 bp, synthetic construct
  misc_feature 1..669: note = source = /note="Description of Artificial Sequence: Synthetic coding sequence"
  source 1..669: mol_type = other DNA
atgaacaaacctctgctttggataagcgttcttactagccttctggaagcgtttgcccataccgatctctctggaaaggtgttcgtgtttcccagagaaagcgtcactgatcatgtcaacctcattactccgcttgagaagcctttgcaaaacttcaccctttgttttcgcgcttactcagatctttcgcgtgcctattcccttttctcatacaacacgcaagggcgagataacgaactgctggtgtacaaagaacgagtcggagaatactccctttacattggtcgacataaagtgactagcaaggtgatcgaaaagtttcctgcacctgtccacatctgcgtcagctgggagtccagctcgggaattgctgagttttggatcaacggaacccccttggtcaagaaaggtttgagacaaggatacttcgttgaggcgcaacctaagattgtgctgggccaagagcaggattcatacggcggcaagttcgacagatcgcaatcctttgtgggagaaattggcgacctctacatgtgggactccgtgcttcctccggagaatatactttcagcataccaggggacccccctgcccgcaaatatcctggattggcaggccctgaattacgagatcaggggatacgtgatcattaaaccactcgtttgggtg

SEQ ID NO: 6203 - DNA, 669 bp, synthetic construct
  misc_feature 1..669: note = source = /note="Description of Artificial Sequence: Synthetic coding sequence"
  source 1..669: mol_type = other DNA
atgaacaagcctctgctgtggatttccgttcttacgtcactgctggaagcatttgcgcacaccgatctgtccggaaaggtgtttgtgtttcctcgggagtcggtgaccgatcacgtgaatctcatcactccactggaaaagccactccagaactttactctttgtttcagggcctactcggacctttcccgcgcgtactccttgtttagctacaacacccaagggagagataacgaacttctggtctacaaagaacgggtgggcgaatactcgctttacattggtaggcataaagtgacttcaaaagtcattgaaaagtttccagcaccggtgcatatatgtgtctcatgggagagctcatccggaatcgcagaattttggattaacggtacccctcttgtgaagaagggactgagacagggatatttcgtcgaggctcaacctaagattgtgcttggacaggagcaagattcctacgggggaaagttcgatcggtcccaatcgtttgttggcgaaattggtgatctctacatgtgggattcagtgcttcccccagagaatatactttcagcataccagggcaccccactccctgcgaacatccttgattggcaggcactcaattacgagataagaggatacgtgataatcaaacccctggtgtgggtg

SEQ ID NO: 6204 - DNA, 669 bp, synthetic construct
  misc_feature 1..669: note = source = /note="Description of Artificial Sequence: Synthetic coding sequence"
  source 1..669: mol_type = other DNA
atgaacaagcccctgttgtggatctcagttcttacaagcttgcttgaggcgttcgctcacacagatctgagtggaaaagtgttcgtgtttcctagagaatcggtgacagaccatgttaatctgatcactccactggaaaagcccctgcagaatttcacgctgtgttttcgcgcatattccgacttgagccgggcctattctctcttctcctacaatacccaaggaagggataatgaactgctagtctataaagagcgcgtgggtgaatatagcttgtacatcggacggcacaaagtgaccagtaaagtgatcgaaaagttcccagcgccagtgcacatttgcgtgagttgggaaagcagcagtggcattgctgaattctggataaacggcaccccactcgtcaaaaaggggctgcggcagggttacttcgtcgaagctcagcccaagatcgtgctcgggcaggaacaggacagttacggaggcaaattcgatcgcagccaaagcttcgtcggcgaaatcggggatttgtatatgtgggattctgtactaccccctgagaacattttatcagcctatcagggtacacctctgcctgcgaatattttggactggcaggcgctcaactatgagatcagagggtacgtcatcatcaaacctcttgtctgggtg

SEQ ID NO: 6205 - DNA, 669 bp, synthetic construct
  misc_feature 1..669: note = source = /note="Description of Artificial Sequence: Synthetic coding sequence"
  source 1..669: mol_type = other DNA
atgaataaaccactgctgtggatttcagtgcttacctcgctgttggaagcgtttgcccataccgatctgtccgggaaggtgtttgtattcccgcgcgagagcgtgactgatcatgtgaatcttatcaccccactcgaaaagcctctgcaaaactttaccctctgcttccgcgcatatagtgatctgagccgagcctactcgctgttttcgtacaacacccaaggacgggataatgaattgttggtgtacaaagaacgcgtgggagaatactccttgtatattggtagacacaaggtcacttcaaaggtgatagaaaagttccccgcgcctgtgcacatttgtgtttcctgggagtcctcgagcggaatcgcggaattttggatcaacggaaccccgctggtcaaaaagggtcttagacaaggatacttcgtggaagcccagccgaaaatcgttctgggacaagaacaggatagctatggcggaaagtttgatcgctcccaatctttcgtgggtgaaatcggtgatctttacatgtgggatagcgtcctccctccggagaatatactctccgcataccagggtacgccccttccagcaaacattctggactggcaagctctcaactacgagattaggggctacgtcataatcaagcccctggtctgggtc

SEQ ID NO: 6206 - DNA, 669 bp, synthetic construct
  misc_feature 1..669: note = source = /note="Description of Artificial Sequence: Synthetic coding sequence"
  source 1..669: mol_type = other DNA
atgaacaaaccattgctctggattagcgtgctgacatctctgttagaggccttcgcacatactgacctgtccggaaaagttttcgtttttccccgcgaaagcgtcaccgatcatgtaaacttgattactcctttggagaagcctctccagaattttactctgtgtttccgagcatatagtgacctgagccgcgcgtacagcctcttcagttataacacccagggtcgtgacaatgagctactggtatataaggagcgggttggagagtatagcctttacattggtcggcataaggtaacgtctaaggtgatcgagaaattccccgcgcccgtgcatatatgtgtctcttgggagagttcaagcggtattgccgaattttggattaatggtacccccctggtgaaaaaggggttgcgccagggttactttgtcgaggcgcagccgaagattgtcctgggccaggaacaggattcgtacgggggaaaatttgaccgctctcagtcattcgtgggagagatcggcgatctgtacatgtgggattccgttctgccgccagagaacatactatctgcctaccaaggaacccctcttcctgctaatatcctcgattggcaggcactaaactacgagattcgcggatacgttatcattaaacccctagtttgggtc

SEQ ID NO: 6207 - DNA, 669 bp, synthetic construct
  misc_feature 1..669: note = source = /note="Description of Artificial Sequence: Synthetic coding sequence"
  source 1..669: mol_type = other DNA
atgaacaagccactgctttggatctcagttttgacttctctgctcgaggcctttgcgcacaccgacctctcgggcaaggtgttcgtgttcccccgagagtcggtgactgaccatgtgaatcttatcaccccactcgaaaaacctttgcagaactttacgctgtgttttagagcttatagcgatctctcccgggcgtactcgcttttctcgtataacactcaagggagagacaatgagctgctcgtctacaaggagcgggtgggagagtacagcctgtatatcggacgccataaggtgaccagcaaggttatcgagaaattccctgcgccggtgcacatctgcgtgtcgtgggagtcctcatcagggatcgcagaattctggatcaacggtaccccgctcgtgaagaagggactgaggcagggttactttgtggaagctcaaccgaagatcgtgctgggccaagaacaggatagctacgggggcaagtttgaccgtagccagtcattcgtgggcgaaattggagatctgtacatgtgggactccgtgctcccaccagagaacatcctcagcgcataccaaggcaccccgctgccagccaacatcctggactggcaggccctgaactacgagatccggggatacgtcatcattaagccgctcgtgtgggtc

SEQ ID NO: 6208 - DNA, 669 bp, synthetic construct
  misc_feature 1..669: note = source = /note="Description of Artificial Sequence: Synthetic coding sequence"
  source 1..669: mol_type = other DNA
atgaacaagcccctgctgtggatctccgttctcaccagcttgctcgaggcgttcgcccatactgacctgtccgggaaagtgtttgtgttcccacgcgaatctgtgaccgaccacgttaatttgatcactcccctcgaaaaacctcttcaaaattttacgctgtgttttagggcatacagtgacctttcccgagcgtattcactgttctcctataatacgcagggccgggacaacgagctgctggtgtataaagagcgagtcggtgagtattcactgtatatcgggcgccataaggttacgtccaaagttatcgagaaattcccggccccggtacacatttgtgtgtcttgggagagcagctccgggattgctgaattctggattaatggtacacctctggttaaaaaggggctacggcaggggtatttcgttgaggcccagccaaagattgttcttgggcaagaacaagacagttatggaggaaaattcgaccggtcacaatcattcgttggggaaatcggggatttgtacatgtgggactccgtgctaccccccgaaaacatcctctctgcataccagggcacgccacttcctgcaaacattcttgactggcaggcgttgaactacgagatccggggttacgtcatcataaagcctttagtatgggta

SEQ ID NO: 6209 - DNA, 669 bp, synthetic construct
  misc_feature 1..669: note = source = /note="Description of Artificial Sequence: Synthetic coding sequence"
  source 1..669: mol_type = other DNA
atgaacaaaccgctcttgtggatttctgtgctgactagcctcctggaggcgttcgcccatactgacctcagcgggaaagtgtttgtctttccacgggagtcggttaccgaccacgtgaacctcattacacctttggagaagcccctgcagaacttcacactatgtttccgggcttattctgacttgtcccgagcctactccctgttttcttacaacacccagggcagggacaacgaactcctggtctacaaagaacgcgtgggcgaatattcgttatatatcgggagacacaaggtcacctccaaagttatagagaagttcccagcacctgtccacatctgtgtttcttgggagagtagtagcgggatcgcagagttctggataaatggcaccccactcgttaaaaaagggctaagacagggctatttcgttgaggcacagcccaaaattgttctgggtcaagagcaagactcctatggcggaaaattcgaccggtcccagagctttgtgggtgagatcggagatctatacatgtgggatagcgtcctccctccggagaacatcctcagcgcatatcagggtacccccctgccagccaacatacttgattggcaggctctgaattatgagatcagggggtacgtcattattaagcccctggtttgggtt

SEQ ID NO: 6210 - DNA, 669 bp, synthetic construct
  misc_feature 1..669: note = source = /note="Description of Artificial Sequence: Synthetic coding sequence"
  source 1..669: mol_type = other DNA
atgaacaagccgctcctgtggatctccgtactgactagcctacttgaggcttttgctcatactgacctctctggtaaggtctttgtctttcctagggaaagcgtcaccgatcacgtcaacctaataactcctctggagaaacccttacagaactttaccttgtgtttccgagcttatagcgatcttagccgggcttatagtctgttcagctataatacccagggtcgcgataacgagctgcttgtctataaggagagagtgggagagtatagcttatacatcggacgacacaaagtgacaagcaaggtcattgagaaattccccgccccggttcacatctgtgtgagctgggagagtagttccgggatcgcagagttttggataaacggtaccccacttgtgaaaaaaggcttgcggcagggttactttgtggaagcacagcccaaaatagtgttaggccaggagcaggattcatacgggggcaaattcgatcggagccaaagctttgtgggcgagataggcgatctgtatatgtgggactccgttctcccaccggaaaacatcctttccgcttaccagggtacacctctgccggccaatatcctagattggcaggctctgaattacgagatcagaggatacgtgatcatcaagcccctagtgtgggtg

SEQ ID NO: 6211 - DNA, 669 bp, synthetic construct
  misc_feature 1..669: note = source = /note="Description of Artificial Sequence: Synthetic coding sequence"
  source 1..669: mol_type = other DNA
atgaataaacccctactgtggatatccgtgcttactagcctgctagaggctttcgcccataccgacctgtcaggcaaagttttcgtctttcccagggaatccgtcactgatcatgtgaacttgatcacacccctcgaaaaacccttgcagaacttcaccctctgctttcgggcatactcagatctgtctcgggcctatagcttgtttagttacaacacccaaggcagggacaacgagctgctagtgtacaaagagagggtcggcgagtactctctgtatatcggcagacataaggtcacctccaaagttatcgagaagttccctgctccagtgcacatatgtgtgtcttgggaaagctcctcaggaatagcagagttctggataaatggaaccccactggtcaagaagggtctgagacaggggtatttcgtggaagcacagcccaaaatagtcttgggccaggaacaggactcatacggaggcaagtttgaccgcagtcaaagcttcgttggggagataggtgacctgtacatgtgggacagcgtgttgcctcccgagaacatcctaagcgcctatcagggcaccccactgccagctaatatcctggattggcaagccctcaattatgaaattaggggctatgtcataatcaagcccctggtgtgggtc

SEQ ID NO: 6212 - DNA, 669 bp, synthetic construct
  misc_feature 1..669: note = source = /note="Description of Artificial Sequence: Synthetic coding sequence"
  source 1..669: mol_type = other DNA
atgaacaaacctttgctttggatttccgtgctgacttcgcttctggaggcattcgcccacaccgacctctcaggcaaggtgtttgtgttcccacgggaaagcgtgaccgatcatgtaaacctcattaccccactggaaaagcctctgcagaactttacgctgtgttttagagcttactcggatttgtcccgggcatactctctgtttagctacaatactcagggcagagataacgaactgcttgtgtacaaggaacgtgtgggtgagtactccttgtacatcggtcgacacaaggtcacctcaaaagtcattgaaaagtttcctgccccagtccatatatgtgtgagctgggaaagcagcagtggcattgcggaattttggatcaatggaactccccttgtgaaaaagggcctgcgccaaggctactttgtggaagcccaacctaagatcgtgctcggtcaagaacaagattcctacggtgggaaattcgatcgatcacagtcgttcgtgggtgagatcggtgatctgtatatgtgggacagcgtgcttccaccggagaacattctttccgcgtatcaaggcacgcctcttccagctaacattctggattggcaggcgttgaattatgagatccgtggatacgtcatcattaagcccctcgtctgggtg

SEQ ID NO: 6213 - DNA, 669 bp, synthetic construct
  misc_feature 1..669: note = source = /note="Description of Artificial Sequence: Synthetic coding sequence"
  source 1..669: mol_type = other DNA
atgaacaaacccctgctctggatttccgtgctgacgagcctactggaggcatttgcccataccgatctgagcggcaaagtctttgtttttccgagagagtctgtaaccgaccacgttaacctgatcactcccctggagaagcctctccaaaactttaccttgtgctttcgcgcctatagcgatttgagccgtgcctactctctgttcagctacaacacccagggacgtgacaacgagctgctggtgtataaagagcgcgtgggagaatacagcctctatatcggcaggcacaaggtgaccagtaaagtcattgagaagtttccggcccccgtgcatatttgcgtcagctgggagagctccagcggaatcgcggagttctggatcaacggtacgccgctggtaaagaaaggccttcgtcagggttattttgtggaagcccagccaaaaatcgtcttgggtcaggagcaggatagctatggcggcaaattcgatcgaagccagagctttgtgggcgagattggcgatttgtacatgtgggacagtgttcttccacctgaaaatatccttagcgcctaccagggcacgcctctcccggccaacatcttagactggcaggccctgaactatgagatcagggggtatgtcattatcaagccgcttgtgtgggtt

SEQ ID NO: 6214 - DNA, 669 bp, synthetic construct
  misc_feature 1..669: note = source = /note="Description of Artificial Sequence: Synthetic coding sequence"
  source 1..669: mol_type = other DNA
atgaacaagccactcctttggatctccgtgctgacctcacttttggaggcatttgcgcataccgatctttcaggaaaagtttttgtttttccacgcgagtcggtgactgatcatgtgaatttgatcacccccctggagaaaccactgcaaaactttaccctgtgttttcgggcatactcagacctttcccgcgcatactcactgttctcctacaacacccagggaagggacaatgaactgttggtgtacaaagaaagagtgggtgaatacagcctctacattggcagacataaggtgacttccaaggtcatagagaaatttccagcccccgtccacatctgtgtctcgtgggagtcatcgtccggaatcgcagaattttggataaatggcacccctctcgtcaaaaagggattgaggcagggatacttcgtcgaagctcaaccgaagatcgtgcttggacaagagcaggactcctacggtggcaagtttgatagatcgcaatcatttgtgggagagattggcgatctgtatatgtgggattccgtgctgccaccagaaaacatcctttcggcatatcaaggtacgcctctgccagccaatattctcgattggcaagcattgaactacgaaattcgaggttacgtgatcattaagccgctggtgtgggtg

SEQ ID NO: 6215 - DNA, 669 bp, synthetic construct
  misc_feature 1..669: note = source = /note="Description of Artificial Sequence: Synthetic coding sequence"
  source 1..669: mol_type = other DNA
atgaacaaaccgctcctgtggatttcggtgctgacttcactcctggaagcgttcgcccacaccgatctgtccggaaaagtgttcgtgttccctagagagtccgtcacggaccacgttaatctgatcactcctctggaaaagcccctgcagaactttactctgtgttttagggcttattcggacctttcaagagcttacagccttttctcgtacaacacccagggccgcgacaacgaactgctcgtctacaaagagagagtcggagagtacagcctttacatcggacggcacaaggtcacctcgaaggtgatcgagaagtttccagctccggtgcacatctgcgtgtcatgggaatcaagctccggcatcgctgagttctggattaatggaaccccgctggttaagaagggactccggcagggctacttcgtggaagctcagcctaagattgtcctcggtcaagaacaagactcctatggagggaaattcgatagatcccagtcgtttgtgggagaaatcggggacctctacatgtgggacagcgtgttgccaccagagaacatcttgtccgcttaccagggcacccctctgccagctaatatccttgattggcaggcactgaattacgagatccgcgggtacgtgatcatcaagccgctcgtctgggtc

SEQ ID NO: 6216 - DNA, 2415 bp, synthetic construct
  misc_feature 1..2415: note = source = /note="Description of Artificial Sequence: Synthetic coding sequence"
  source 1..2415: mol_type = other DNA
atgtccagttcgagctggctgttgctttccctggttgcggtgaccgcagcacaatcgacaattgaggagcaagcgaagaccttcttagataaattcaatcatgaagccgaagaccttttctaccaatccagcttggcctcctggaattataatactaacatcaccgaggagaacgtgcagaacatgaataatgcaggcgataaatggagtgctttcctcaaagagcagtcaaccctggcacaaatgtatcccctgcaggagatccagaatctgacagtgaagctgcagctgcaggctctgcaacagaatggatctagcgtgctctccgaggataagtctaagcgtttgaacacaatcctgaataccatgtccacaatatacagcaccggaaaagtgtgtaaccccgataaccctcaggaatgtttgctgctggagccagggctcaacgaaattatggccaattctcttgattacaacgagcggctctgggcctgggagtcatggcgctctgaggtgggtaagcagctgcgacctctgtacgaagagtatgtcgttctgaaaaacgagatggcaagagccaatcactacgaggattacggcgactactggaggggagactacgaggtgaacggggtcgatggctatgactacagtcggggacaactgatcgaagacgtggagcacacctttgaagaaatcaagcccttgtatgagcacctgcacgcttatgttcgtgccaaacttatgaatgcctatcctagctatatcagtcctattggatgtctaccagcgcaccttctgggagatatgtggggtaggttctggactaacctgtatagcctgacggtgcctttcggacaaaagcctaacatcgacgtcacggatgctatggtagaccaggcctgggacgcccagcgaatctttaaggaggcggagaaattcttcgtatccgtggggttgccgaatatgactcagggcttttgggagaatagcatgctgacagatccaggcaacgttcagaaggccgtatgccacccaactgcatgggacctggggaaaggggatttccgtatcctgatgtgtactaaggtcacaatggacgactttctcacggcccatcacgagatgggtcacatccagtacgacatggcctacgcggcacaaccatttctgctgcggaatggcgctaacgaaggattccacgaggcagttggcgagataatgagcttgtccgccgcaactcctaagcacctaaagtctatcggtctgctgagccccgactttcaagaggacaacgagactgagatcaactttctgctcaagcaggctttaaccattgtgggcactctccccttcacatatatgctggagaaatggaggtggatggtcttcaaaggggagatcccgaaggatcagtggatgaaaaagtggtgggaaatgaaacgcgagattgtcggcgtagtcgagcctgtgcctcatgacgagacttactgcgatcccgcgtcattgttccacgtgtcaaacgactattctttcattagatactacacaagaacgctgtatcagtttcagtttcaggaggccctgtgtcaggctgctaagcacgaagggccactacacaaatgtgacatctctaactctaccgaggctggacaaaaactatttaatatgctgaggctcggcaaaagcgaaccttggaccctggccctggagaacgtcgtcggagcaaaaaacatgaacgtgcggcctcttttgaactactttgagcctctatttacatggctgaaagatcagaataagaatagctttgtcggatggtccaccgactggtccccctacgcggaccagtccattaaggtgagaatcagtctcaagtctgccttgggcgataaagcatacgagtggaatgacaatgagatgtacctcttcaggagctcagtcgcttatgccatgaggcagtacttccttaaggtgaagaatcaaatgatactctttggggaggaagatgtgagggtcgccaacctgaagccccgaatctcatttaatttctttgtcactgccccaaagaatgtgagtgatataataccccggactgaggtcgagaaggccatacgtatgagcagatccaggattaatgacgcatttaggctgaatgataatagcctggaatttctggggattcagcccacactcggtcctcccaaccagccgcctgtctccatctggttaattgttttcggggtggtaatgggtgtgatagtcgtgggaatagtgattcttatctttaccggtatcagagaccgcaaaaagaagaataaggcccgatcaggtgaaaatccctatgcctctatagatatcagtaaaggggaaaacaaccctggcttccagaataccgatgatgttcagacgtcattt

SEQ ID NO: 6217 - DNA, 2415 bp, synthetic construct
  misc_feature 1..2415: note = source = /note="Description of Artificial Sequence: Synthetic coding sequence"
  source 1..2415: mol_type = other DNA
atgtcaagtagctcgtggctcctgttatctctagtcgcggtcactgcggcacagtccaccatcgaagagcaggctaaaacattcctggacaagttcaatcacgaagcagaggacctgttttatcagtcctccctggcttcctggaattataataccaacataactgaggagaatgtccagaatatgaacaacgcgggggataagtggtctgcctttttgaaggagcaatccacattggcgcagatgtaccctctgcaagagattcagaatctgaccgtcaagcttcagctgcaggctctgcagcagaatggatcttcagtcctctccgaagataaaagcaagcgcctcaacaccattctcaacaccatgagcacaatctatagtacagggaaggtctgcaatccagacaacccccaggaatgcctgttactggagcctggactcaacgagatcatggctaactccctagattataatgaacggctctgggcatgggagagttggaggagtgaggtggggaagcagctcaggcccctgtatgaggagtacgtcgtattgaagaacgagatggcccgggccaaccactacgaagattacggtgactattggcggggagactacgaggtcaacggcgtggacggatacgactacagtagagggcagctaatcgaggatgtcgagcatacgtttgaggaaattaaacccttgtacgaacatctccacgcctatgtccgggcaaagcttatgaacgcctacccatcttatatcagccctatcgggtgtctgccagcacatctcttgggcgacatgtgggggagattttggaccaatctctatagcctgacggtgccttttggccaaaagccgaatatcgacgtaaccgacgctatggtggatcaagcgtgggacgcgcagcggattttcaaagaagccgagaagttctttgttagcgtaggtctgcccaacatgacacagggattttgggaaaacagcatgctgacggatcctggaaacgtgcagaaggcagtttgccatcccacggcttgggacctgggtaaaggcgattttaggattctgatgtgtacgaaggtcacaatggatgattttctgacagcccatcatgagatggggcacatccagtacgacatggcctacgccgcacagccattcctattgcgcaatggcgccaacgaaggcttccatgaggctgttggcgagattatgtccttaagcgccgcaacgccgaagcatcttaaatccatcggtttactttcaccagattttcaagaggacaatgaaacggagattaattttctgctcaagcaggccctgaccatcgtgggaacgcttccctttacctacatgctggagaagtggcgctggatggtttttaagggcgagattcccaaggaccaatggatgaaaaaatggtgggaaatgaagcgcgaaatagtgggggtggtggagcccgtcccacatgatgagacctattgtgatccagcctcactcttccacgtatccaatgactactcctttattcgctactacactaggaccctttaccagttccagttccaggaggccctgtgccaggccgccaaacacgaggggccactccataagtgtgacatttccaattcaacggaagccgggcagaagttattcaatatgctgaggttggggaagtctgaaccctggaccctggctcttgaaaatgttgtcggggccaagaatatgaacgttagacccctcctgaactactttgagcccttatttacttggttgaaggatcaaaataagaactctttcgtcgggtggtccactgattggtcaccctatgccgaccagagcatcaaggtgagaatctctctgaagagcgcgttaggtgacaaagcatacgaatggaatgataatgagatgtatctgttccgttcttcagtcgcctacgccatgcggcagtattttctgaaagtgaagaatcagatgattttgttcggtgaggaggacgtgagggttgcaaacttaaagcccagaatctcatttaacttctttgttaccgccccgaaaaatgtatcggacataatccccagaactgaggtggagaaggcgatcagaatgtcccgctcaagaattaatgacgctttccgactgaatgacaattctctcgaatttttgggtatccaaccaacactgggccctcccaaccagccacccgtaagcatttggctgattgtgttcggcgttgtgatgggagtgattgtggtcgggatcgtgatcctgattttcacaggaatacgcgacaggaaaaaaaagaataaggcccggtcgggggagaacccttatgcctcgatagacatcagtaagggggagaacaaccctggcttccaaaacactgacgacgtgcaaactagtttt

SEQ ID NO: 6218 - DNA, 2415 bp, synthetic construct
  misc_feature 1..2415: note = source = /note="Description of Artificial Sequence: Synthetic coding sequence"
  source 1..2415: mol_type = other DNA
atgtcatcatcatcttggctcttattgagtctcgtggccgtgacagccgctcagtcaactatcgaagaacaggccaaaacatttctggacaaatttaaccatgaagctgaagatttgttttatcaatcaagtctcgccagttggaattataatacaaacattactgaagagaacgtgcagaatatgaacaatgccggagataagtggagtgccttcctgaaagaacagagtactctggcccagatgtatcctcttcaggaaatccaaaatcttacagtcaagttacagttacaagctctccaacagaatgggtctagtgtgctctctgaggataaaagtaaaagacttaatactatattgaacacaatgtctacaatatattcaactggaaaagtttgtaaccccgataacccccaggaatgcctcctcctcgaaccaggattaaatgaaatcatggctaatagtctagattataatgaaaggctctgggcctgggaatcctggaggagtgaagtggggaagcagcttcgtcccctttatgaagagtatgtggtgttaaaaaacgaaatggctagagctaatcattacgaagattatggggattattggagaggagattatgaagtgaacggagtagatgggtatgattatagtagaggacagcttatcgaagacgtggagcatacatttgaggaaataaaacccctttatgaacatctccatgcatatgttcgcgcaaaactcatgaatgcatacccctcttacatatcacctatcgggtgccttcccgcccacttacttggagatatgtgggggaggttctggactaatctgtattctctgacagtaccatttggacagaaacccaatattgatgtgacagacgctatggttgatcaggcttgggacgctcagaggatctttaaagaggcagagaaatttttcgtttctgtagggctgccaaatatgacacaggggttctgggaaaattctatgctcactgaccctggaaacgtacagaaagcagtttgtcaccctactgcatgggacctagggaagggagacttccgaatacttatgtgcacaaaggtaactatggatgattttctcacggcacaccatgaaatggggcatatccagtatgatatggcatatgccgcacagccgttcctcctcaggaatggagcaaatgaagggtttcatgaagctgtcggagagattatgtcgctatctgcggctactcctaagcacctgaaatccatcgggctactcagtcccgattttcaagaagataacgaaacggaaattaactttttgctcaaacaggcgcttacaattgtaggaacactcccatttacttacatgctcgaaaagtggcggtggatggtatttaaaggggaaatcccaaaagaccagtggatgaaaaaatggtgggaaatgaagagggaaatcgttggggtggtggaacctgtaccacatgacgaaacatattgtgacccagcgtcgctgttccatgtatctaacgactattcctttatcagatattatactcgaacactttatcaatttcagttccaggaggcactgtgccaggcagctaaacacgaaggaccattgcataaatgtgatatcagtaactccactgaagccgggcagaaactgttcaatatgctgaggctaggaaaatcagaaccctggactctcgcattggaaaatgtggtaggggcaaaaaatatgaatgtgcggccactcctcaattattttgaacctctatttacatggctgaaagaccaaaacaaaaatagtttcgtcgggtggagtacagattggtcaccttatgccgaccagtcaatcaaagtgcgcatctctctgaagtctgccttgggagataaggcttatgaatggaatgataacgagatgtatctatttcggtcttcagtggcctatgctatgaggcagtattttctaaaagtaaagaaccagatgatactgttcggagaagaagatgtacgggtggctaatctaaaacctcgaatctctttcaatttttttgtaactgcccccaaaaatgtttctgatatcattcctcggacagaagtcgaaaaagctataaggatgtcacggtctaggatcaatgatgctttcagactcaatgacaattctctggaattcttggggatacagcctactttaggaccacccaatcagccccccgtatctatctggctaatagtgtttggagtcgtaatgggagttatagttgtgggaatcgttatcctaatcttcacagggattcgagatcgaaaaaaaaaaaacaaagcaagatccggagagaacccctatgcctccatcgacatatctaaaggagaaaacaaccccggattccagaatacagatgatgtccagacatcgttt

SEQ ID NO: 6219 - DNA, 2415 bp, synthetic construct
  misc_feature 1..2415: note = source = /note="Description of Artificial Sequence: Synthetic coding sequence"
  source 1..2415: mol_type = other DNA
atgagtagctcttcatggctcctgttgagcctggtggcagttaccgctgctcaaagcactatcgaagaacaggctaaaactttcctagacaagttcaatcacgaggctgaggacctgttttatcagagcagtctcgcttcatggaactacaatactaacatcactgaggaaaatgtacagaatatgaataatgccggggataagtggtcagcattcctcaaagaacagagcacactagcccagatgtatcctctacaagagattcagaacctgaccgtgaaactacagctgcaggccctgcagcagaatgggtcttccgtcctaagtgaggacaagtccaaacggttgaacaccattctgaacaccatgagcaccatatattccaccggcaaggtgtgcaaccccgacaatccacaggagtgcctcctgctggaaccaggtctgaacgaaataatggctaatagcctcgactataacgagaggctttgggcttgggagtcttggcgatctgaagtgggtaagcagctgcgtccactgtatgaggagtacgttgtgctaaaaaatgagatggcccgggccaaccattatgaagactatggggattactggcgcggtgattatgaagtgaacggggttgatggctacgactacagtcgtggccagctgattgaggatgtggaacataccttcgaggagatcaagcccctctatgagcacctgcacgcctacgtgagggccaagctgatgaacgcttatccaagttacattagtccaattggctgcctacctgcccacctcttgggcgacatgtggggcagattctggaccaacctatattccctgactgtaccattcgggcagaaacctaacattgatgtgacagacgccatggtagatcaagcatgggacgcccagagaatcttcaaggaagccgagaaattctttgtctcagttgggttgccaaacatgacccagggcttttgggagaattctatgctcaccgaccctggcaacgtccagaaggccgtgtgccacccaactgcctgggacctcggcaagggcgatttccgtatcttgatgtgtacaaaagttaccatggacgattttctaactgcacaccacgaaatgggccacatacagtatgacatggcttacgccgcacagccatttcttctgcgaaacggggctaatgaagggttccacgaggctgtcggagagattatgtctctgtctgccgctacaccaaagcatttaaagagtattggtctgcttagccctgacttccaggaggataacgagacagagattaattttctactgaaacaggctctcactattgtgggcaccctcccttttacatacatgctggaaaaatggaggtggatggtgttcaagggagagattcccaaagatcagtggatgaaaaaatggtgggagatgaaacgagagattgtgggggttgtggaaccagtcccacacgatgagacttattgcgaccctgcttctctattccatgtgagcaacgactactcctttattcgctattatacaagaactctatatcagttccagttccaggaagccttgtgtcaggcagccaaacacgagggccctctgcataagtgtgatatttctaatagcacagaagctggtcaaaaactgttcaacatgctgcggctgggaaaatcagaaccatggaccctagctctggagaacgttgtcggcgcaaagaacatgaatgtgcgcccactgctgaattatttcgagccactgtttacatggctcaaggatcagaacaaaaacagttttgtgggctggtcaacagactggagtccttacgccgatcagtctattaaggtgcgcatcagtctgaagtctgctctaggtgataaagcttacgaatggaatgataatgagatgtacctgttccgctcctcagtcgcctatgcaatgcgacagtatttccttaaggtgaagaatcagatgatactgtttggcgaagaggatgtgagggtggctaacctgaaacctaggatttctttcaacttcttcgtgactgcacccaagaatgtgagtgacatcattcctcgcacagaggtcgagaaggctattaggatgagcaggagcagaatcaacgacgcctttcgactcaatgataatagcctggaattcctgggtatccaacccaccctgggaccacctaaccagccccctgttagtatttggctgattgtatttggggtggtgatgggcgtaattgtcgttggtattgtgattctgatctttaccggaattcgcgacaggaaaaaaaagaataaggcaaggtccggggaaaatccatacgcctcaatcgatataagcaagggagaaaacaatcctgggttccagaacacagacgatgttcagaccagtttt

SEQ ID NO: 6220 - DNA, 2415 bp, synthetic construct
  misc_feature 1..2415: note = source = /note="Description of Artificial Sequence: Synthetic coding sequence"
  source 1..2415: mol_type = other DNA
atgtccagctcgtcatggctgttgctttcgcttgtcgcggtgactgctgctcagagcaccattgaggaacaggccaagacttttctcgacaagtttaaccacgaagcagaggatctcttttaccaatcttcgcttgcatcgtggaactataacaccaacattacggaagagaatgtccagaacatgaacaacgcaggcgataagtggtcggctttcctcaaggaacaatcgactttggcacaaatgtacccgcttcaagaaattcagaacctgaccgtgaagctgcagctgcaagccctgcagcaaaatggatcatccgtgctgtcggaggataaatccaagcgcctcaatacgatcctcaataccatgagcaccatttacagcaccggtaaggtttgtaatcccgataacccccaagaatgccttttgcttgagcctggattgaacgaaatcatggcgaattccctggattacaatgagagactgtgggcgtgggaaagctggcgaagcgaagtgggaaagcaattgcggcccctctacgaagaatacgtcgttctcaagaacgagatggcccgcgcaaatcattacgaagattacggtgactactggcgaggcgattatgaagtgaacggagttgacggttacgattattcacgaggccagctgatcgaagatgtcgagcatactttcgaggagattaagcctctttacgagcatctgcatgcatatgtgcgtgccaaacttatgaatgcttacccgtcatacatatcacctataggttgcctgcccgcacaccttcttggagacatgtggggtcggttttggaccaatctttactctctgacggtgccttttggacaaaaaccgaatatcgatgtgactgacgcgatggtcgaccaggcctgggatgctcagcgcatctttaaggaagcggaaaagttttttgtgagcgtgggactcccgaacatgactcaagggttctgggagaactccatgctgacggacccaggcaacgtccagaaagcagtctgccatccaactgcatgggacctcggcaagggagatttcagaattctcatgtgtaccaaggtgactatggatgattttctcaccgcacaccacgagatgggtcacattcaatacgacatggcatacgccgcacaaccattcctgcttagaaacggcgcaaacgaaggattccatgaagccgtcggcgaaatcatgtcactgtccgccgcgactccgaagcatctcaagtccatagggctgttgagccctgactttcaagaggataacgagactgaaatcaactttcttttgaaacaagcgctcacgatcgtggggaccctgccatttacctacatgctcgaaaagtggagatggatggtgtttaaaggagaaatccctaaggatcaatggatgaagaaatggtgggagatgaaaagggaaatcgtcggcgtggtggaacccgtgcctcatgacgagacttattgcgatcctgcctcactcttccacgtgtcaaacgattactcctttatccgctactacactagaactttgtatcagttccagtttcaggaagcgctttgtcaagccgcaaaacatgagggaccactgcacaagtgtgacatatccaattcgactgaagcagggcagaaactctttaacatgctgcggctcggcaagagcgaaccctggactctggcactcgagaatgtcgttggagcaaagaacatgaacgtgaggcctctgttgaactactttgaacctctctttacctggcttaaagatcagaacaagaatagctttgtgggatggtctacggactggtccccatacgcagatcagtcaatcaaggtgcgcatttcgctgaagtccgcactgggcgataaggcatatgaatggaacgataatgagatgtacctcttcagatcgtcagtggcatatgcaatgcggcagtactttcttaaggtgaagaaccaaatgatcctgtttggtgaagaggacgtccgtgtggccaatctgaagcctaggatctcgttcaacttttttgtgaccgcacccaaaaatgtgtccgacataattccacgaactgaagttgagaaggcaatccggatgtccaggagcaggattaatgatgcttttcgcctgaacgacaattcccttgaattcctcggtatacaaccaactctgggaccacctaaccaaccaccagtctccatatggctgatcgttttcggagtggtcatgggtgtgattgtggtcggcattgtgattttgatattcaccggcattcgagatagaaagaagaaaaacaaggcaagatcgggggagaacccatacgcaagcattgacatctcgaaaggtgagaataatccagggttccaaaacaccgatgatgtccaaactagcttt

SEQ ID NO: 6221 - DNA, 2415 bp, synthetic construct
  misc_feature 1..2415: note = source = /note="Description of Artificial Sequence: Synthetic coding sequence"
  source 1..2415: mol_type = other DNA
atgtcgagctcgagctggctgttgctctccctggtggccgtgactgcagcacaatcgactatcgaagaacaagcaaagactttcctggataagtttaaccatgaagcagaagatctcttctaccagtcgagcctcgcttcgtggaactataacactaacattacggaagagaacgtgcaaaacatgaacaatgctggcgacaaatggtccgcctttttgaaggaacaaagcacccttgctcagatgtaccctctgcaggaaattcaaaatcttaccgtcaagttgcaactgcaagcactgcagcagaacggctcgtccgtgctttcggaagataaatccaaacggttgaacaccattttgaacaccatgtcgactatttactcaaccggaaaggtgtgtaaccccgacaatccgcaggagtgtctgctgcttgagcccgggctgaacgaaatcatggccaacagcctggattacaacgaaagactgtgggcatgggaaagctggagatcagaagtgggaaaacaacttcgtcctctgtacgaagaatacgtcgtccttaagaacgaaatggcaagggctaaccattacgaagattacggagattactggagaggggattacgaagttaatggcgtggacggttacgactactctcgcggacagttgattgaagatgtggaacacactttcgaagagattaagcctctttacgagcatcttcatgcctacgtgcgcgccaaacttatgaatgcatacccttcgtacatttcaccaattggttgccttccagcacaccttttgggagatatgtggggtcgcttctggaccaacctttactcccttaccgtcccttttggacaaaagccaaacatcgacgtgaccgatgcaatggtggatcaggcatgggatgctcaacgcattttcaaggaggcagagaagttttttgtgtccgtgggccttccgaatatgactcaaggattctgggaaaatagcatgctgaccgatccaggaaacgtgcagaaggcagtgtgccacccaacggcgtgggatcttggtaaaggagatttcagaatactgatgtgtaccaaggtcactatggacgactttctgaccgcacaccacgaaatggggcacatccaatacgatatggcctacgcagcgcaaccgtttcttcttcggaatggagcaaatgaaggcttccatgaagcagtcggagagataatgagcctgtcggccgccactccaaaacacctgaaatcaatcggcttgctgtccccggatttccaagaggataacgaaaccgaaatcaactttttgctcaagcaggcactgaccatcgttggaaccttgcctttcacttacatgctcgagaagtggcggtggatggtctttaagggtgaaataccgaaggatcagtggatgaaaaagtggtgggaaatgaaacgcgaaatagtcggtgttgtggagccagtccctcacgacgaaacctactgcgaccctgcatcgctgttccatgtgtcaaatgattactcctttatcaggtactacacgcgtactctctaccaattccaatttcaagaggcactttgtcaggcagctaagcatgaagggcccctccataaatgcgatatatcgaactcgaccgaggccgggcaaaaactgtttaacatgctgagacttgggaagagcgagccttggaccctcgcccttgagaacgttgtgggagcgaagaacatgaatgtccgacctcttctgaactacttcgagccgcttttcacttggctcaaggaccagaacaagaatagcttcgtgggttggagcaccgattggtcaccttacgcagatcaaagcattaaagtgcggattagcctgaagtctgcacttggcgataaggcatacgaatggaatgacaacgagatgtatctctttagatcctcggtggcctatgccatgaggcagtattttctcaaggtcaagaaccaaatgatcttgtttggagaggaagatgtgagggtggcgaacctcaaaccgcgcatctcattcaatttctttgtaacggctccgaaaaatgtgtccgacatcattccaagaaccgaagtcgagaaggcaattagaatgtccagatcaaggatcaacgacgcattccggcttaacgataacagccttgagtttttgggtatccaaccgactctcgggcctcccaaccaaccacctgtgtctatttggctcatcgtgttcggagtcgtgatgggggtgattgtcgtcggcatagtcattctgattttcactgggatccgagatcggaagaaaaagaacaaggcaaggtccggagaaaatccttacgcatccatcgatattagcaagggcgagaataatcctggattccagaacactgacgatgtgcaaacttccttc

SEQ ID NO: 6222 - DNA, 2415 bp, synthetic construct
  misc_feature 1..2415: note = source = /note="Description of Artificial Sequence: Synthetic coding sequence"
  source 1..2415: mol_type = other DNA
atgtcatcctcttcctggcttctcctttctctggtggctgtaacagccgcgcagtctactatcgaggagcaggctaaaactttcctggacaaattcaatcacgaagctgaagatctgttttatcaaagttctctcgcatcatggaactataacactaacatcactgaggagaatgtacagaacatgaataatgcgggcgataagtggtctgcttttctgaaagagcagtctacgctcgctcaaatgtaccccctccaggaaatccaaaatttgacagtcaagctgcaactccaggcactgcaacaaaatggtagcagtgttctgtcagaagacaaatccaaaaggctcaacaccattctcaacacgatgagcacgatttatagtaccggcaaggtgtgcaatcccgataacccccaggaatgtttgctcctggaaccggggttgaacgagattatggccaacagcctcgattacaatgagcgactttgggcttgggaatcttggagatctgaagtggggaagcaactcagaccgttgtacgaggagtatgtagtgctgaaaaatgaaatggcaagagctaatcactatgaggattatggggactactggcggggtgattacgaggtcaacggggtagatggctacgattatagccgggggcagctcatcgaggacgtggagcacactttcgaggagatcaagcccctgtatgagcacctgcacgcctacgtcagggccaaattgatgaacgcctatccctcctacatttctcctattggctgtcttccagctcatctgcttggggatatgtggggacgattttggaccaatttgtattctctgacagtgcctttcggccagaaacctaatattgatgtgaccgacgcgatggtcgaccaggcctgggacgctcagaggattttcaaagaagccgagaagttctttgtgagcgtgggattgccgaacatgactcagggattctgggaaaatagtatgctcacggacccgggcaacgtccaaaaggcagtgtgccaccctactgcgtgggatctggggaagggcgatttcaggatacttatgtgcacgaaggtcactatggatgacttcttgacagcccatcacgaaatgggtcacatacagtacgacatggcctacgccgcccagcctttccttctgcggaacggggcgaacgagggtttccatgaggccgtcggagaaatcatgtccttgagcgcagcaaccccaaagcacctgaaatccattgggcttctgagccccgacttccaggaggacaatgagacagagatcaatttcctgctgaagcaggccctgacaatcgtcggtaccctgccttttacctatatgctggaaaagtggcgctggatggtattcaaaggagaaattcctaaggatcagtggatgaaaaaatggtgggagatgaagcgggaaatagtgggagttgtcgaacctgtccctcacgatgagacgtactgcgatcccgcgagcctcttccatgtgtccaacgattatagcttcatacggtactacacgcgaacattgtatcagttccagttccaagaggcgctgtgtcaggcagcaaaacacgaggggcctctgcataaatgtgacatcagcaattccactgaagcgggccagaaactgttcaacatgttgaggctggggaagtctgaaccttggaccttggccctcgagaatgttgtgggggccaagaacatgaatgtaaggccactgctcaactatttcgagccgctgttcacctggctcaaggatcagaacaaaaactcttttgtcggctggagcaccgactggagtccatacgctgaccagtctataaaagtacgcatctctcttaagagcgcacttggcgataaggcctatgaatggaatgacaatgagatgtacctgttcaggtcatctgtcgcctatgctatgagacagtatttcttgaaggtgaaaaaccagatgatcctgtttggggaagaagacgttcgggtggctaaccttaaaccccgcatatccttcaatttttttgtaaccgcgcctaaaaacgtcagcgatatcataccccggactgaggtcgagaaagcaataagaatgtctagatctaggatcaacgatgccttcaggctgaatgataactccctggaattcttgggcatacagcctactctgggccctccgaaccagccacctgtgagcatttggctcattgttttcggagtggtgatgggcgtcattgtggtggggatagtaatcctcatctttactggaatccgcgacagaaagaagaagaacaaggctaggagcggtgagaatccctacgcgtctatcgatatcagtaagggagaaaacaatcctggttttcagaataccgacgacgtccaaacctctttt

SEQ ID NO: 6223 - DNA, 2415 bp, synthetic construct
  misc_feature 1..2415: note = source = /note="Description of Artificial Sequence: Synthetic coding sequence"
  source 1..2415: mol_type = other DNA
atgtcaagtagcagctggctactccttagtctggttgcagttacagccgctcaaagcactattgaggagcaggccaagacctttttggataagttcaaccatgaggccgaggatctgttttatcagtcatccctcgcttcttggaattacaacactaacattaccgaagagaatgtgcagaatatgaacaatgccggagacaagtggagtgcttttcttaaggagcaatctaccctggcacagatgtaccctctgcaggaaatacagaatctgactgtcaaactccaactccaagcactccagcagaacggctccagtgttctgagcgaggacaaatccaagaggcttaacactatacttaatactatgagcaccatatacagcacgggcaaagtctgcaatccagacaatcctcaagaatgcctgttattagagcccggattgaacgagattatggccaatagtctggattataacgagcgcctgtgggcctgggagagctggcgttctgaagtgggtaagcaactgaggcccttatatgaagagtatgtggtgctcaaaaatgaaatggccagggccaaccactatgaagactatggggactactggcgcggggactatgaagttaatggggttgacgggtatgattactcaagaggacaattgattgaggatgtggaacacactttcgaagagatcaagccactatacgaacacctgcatgcttatgtccgggccaagctgatgaatgcttacccttcttatatctcaccgatcggatgcctacccgcccacctcctgggagatatgtggggacgcttttggacaaacctgtattctctcactgtacccttcgggcagaaaccaaacatagatgtgactgatgctatggttgaccaagcatgggacgcccaaaggatctttaaagaggctgaaaaattttttgtgagtgtgggcctccctaacatgactcagggattttgggagaattctatgctcaccgatcccggtaacgtacagaaggctgtgtgccatcctacagcctgggatctggggaagggcgactttcgaatcctgatgtgcacaaaggtgacgatggacgatttcctgacggctcatcacgagatgggtcacatccaatacgacatggcatacgccgcccagccttttcttctccgaaacggagccaatgaagggttccacgaagctgttggcgagatcatgtcactgagcgctgccacacccaaacaccttaagtctattggccttctaagcccggacttccaggaggacaacgagactgaaatcaacttcctgttaaagcaagccttgacgatcgtgggaactctgccattcacctatatgctggaaaagtggagatggatggtgtttaagggtgaaataccaaaagatcagtggatgaagaaatggtgggagatgaagagagaaattgtgggcgtggtcgagccagtgccccatgatgagacctactgtgaccctgcctcactctttcacgtctccaacgactactcgtttatcagatattacaccaggactttgtaccagtttcaatttcaggaagcactgtgccaagcagccaaacatgagggccccctccataaatgcgacatctctaatagcacagaggcggggcagaaattgttcaatatgctgaggctgggcaaaagtgaaccatggaccctggctctcgagaatgtagtgggagctaagaatatgaatgtgcgcccgttattgaactattttgaaccactgtttacctggctcaaagaccagaacaagaattcgttcgtggggtggagcacagactggtccccctatgcagaccagtcaatcaaggtcaggatcagcctgaagtccgctttgggcgacaaagcatacgagtggaacgacaatgagatgtatctgtttaggtctagtgtggcttacgcgatgcggcagtattttctcaaagtcaaaaatcaaatgattctttttggtgaagaagacgttcgcgtggcaaatttaaaaccgcggatatctttcaatttctttgtgacagccccaaagaatgtttctgatatcatcccgcggacagaggtcgagaaggccattagaatgtctcgtagccgcattaacgatgcctttaggctgaacgataatagtctggagttcctgggcattcaacctacgcttggacctcccaaccagccccctgtctctatttggcttattgtgtttggggtcgtcatgggtgtcattgtcgtgggaatcgtgattctgatctttactggcattcgagatcgcaaaaaaaagaacaaagcccgctctggagaaaacccgtacgcatccattgacatttcaaaaggagagaacaacccaggcttccaaaacacagatgacgtacagacatctttc

SEQ ID NO: 6224 - DNA, 2415 bp, synthetic construct
  misc_feature 1..2415: note = source = /note="Description of Artificial Sequence: Synthetic coding sequence"
  source 1..2415: mol_type = other DNA
atgtcttccagttcctggctcttgctgtcgctggtcgccgttactgcagcacagtcaactattgaggaacaggcaaagacttttctggacaagtttaaccacgaggcagaggatctgttctaccagtccagtttggctagctggaactacaacaccaacattacggaagagaatgtccagaacatgaacaatgccggcgacaagtggtccgcatttctgaaagagcagagcactctggcccagatgtatcccttgcaggagattcaaaatttaaccgtgaagcttcagctccaagccttgcagcaaaatgggtcgtccgtgctgtcagaagataagtcaaaaagactcaacacaattctcaacaccatgtctactatctacagcacaggtaaggtgtgtaaccctgacaatccccaggaatgcctgctgctggagccaggtcttaacgagatcatggccaactccttagattacaacgaacggctgtgggcttgggagagttggcgtagcgaggtggggaagcagctccggcccctgtatgaggagtacgtcgtcctgaaaaatgaaatggctcgcgctaatcactatgaggactatggagactattggcggggtgactacgaagtgaatggcgtcgacgggtacgattattcccgaggtcagttgatagaggatgtggagcatacatttgaggagattaaaccactctatgaacaccttcacgcatacgtcagggcaaagttgatgaatgcctatccaagctacatttctccaattggctgcttgcccgcccacctgctcggcgacatgtgggggagattttggaccaacctgtatagcctcactgtcccctttgggcagaagcctaatattgatgtaactgacgctatggtagatcaagcatgggacgcccagagaatcttcaaggaagctgaaaaattttttgtgtccgtgggcttacctaatatgacccaggggttctgggagaactcaatgctcacagatcccggtaatgtgcagaaagctgtgtgtcatccaacggcctgggatctaggaaagggtgatttcagaattctcatgtgtaccaaagtcactatggacgactttctcactgctcatcacgagatgggtcatatccagtatgatatggcttacgctgcccagccgtttctgctgcgaaatggcgcaaatgaaggtttccatgaagctgtaggggaaatcatgagcctgtcggcggctacccccaagcacctgaagagtattggcttgctgtctcctgacttccaggaagacaacgagaccgagattaatttcctgctcaagcaggctctgaccatcgtgggcactctacccttcacctatatgctggaaaagtggcgttggatggtcttcaaaggcgagatccccaaggaccaatggatgaaaaagtggtgggagatgaagcgcgagatcgtgggggtggtcgagccagtgccgcacgacgaaacctattgtgaccccgcctctctcttccatgtgtccaacgactattccttcatacggtactatactaggaccttgtatcagttccagtttcaggaggctctttgtcaggccgccaagcacgagggtcctcttcacaagtgcgatatctccaattccaccgaggctggtcaaaagctgttcaacatgctgaggcttggaaagtcagagccgtggacactcgctctcgaaaacgtggtgggagccaagaatatgaacgtgcgccccctcctgaactatttcgaacctctgttcacatggctgaaagatcagaataaaaattcctttgtgggttggtcaacggattggtcgccttacgctgaccaaagtatcaaagttcggataagcctcaaatctgccctgggagataaggcctacgaatggaatgacaatgagatgtatctgttccggagcagtgtggcttacgcgatgaggcaatacttcctgaaagtaaaaaatcagatgatactcttcggcgaagaagatgttcgcgtggcgaatctgaagccacgaatatcctttaacttctttgtgaccgcacccaagaacgtatccgatatcattcccaggaccgaggtagaaaaagctatcaggatgtcacgcagccggatcaacgatgccttccggctgaacgacaactccctcgagttcctgggaattcagcctacattgggtccccccaaccagcccccagtttccatctggctgatagtgtttggtgttgtgatgggagtcatcgtcgtggggatcgtcattctgatctttactggcatcagagataggaagaaaaagaataaggcacgcagcggcgagaatccttacgcctcaattgatatctcaaagggagagaacaacccaggtttccaaaacacagacgatgtgcagactagcttc

SEQ ID NO: 6225 - DNA, 2415 bp, synthetic construct
  misc_feature 1..2415: note = source = /note="Description of Artificial Sequence: Synthetic coding sequence"
  source 1..2415: mol_type = other DNA
atgtcatccagctcatggctcctgctgtcgcttgtcgctgtgactgcagcccagtccacgatcgaggaacaagcaaagactttcctggataagttcaaccatgaagctgaagatctgttttaccagtcctcgctggcctcgtggaactataacaccaatatcacggaagaaaacgtgcaaaacatgaacaacgcgggcgataagtggtctgcttttttgaaagaacaatcgacgctggcacaaatgtatcctctgcaggagatccaaaacctgactgtcaagctccagctccaggccttgcagcaaaacggatcgtcggtgctgtcagaagataagtcaaagcgcctgaacaccatcctgaataccatgtcgacgatctactcaactgggaaggtctgcaatcccgacaaccctcaggaatgcctgctgctcgagccaggcctgaacgaaatcatggcaaactcgctcgattacaacgagcgattgtgggcctgggaatcatggcggtccgaagtcggaaaacagctccggcccctctacgaagaatacgtggtgttgaaaaacgaaatggcgcgggctaaccactatgaagattacggagactactggcgtggagactatgaggtcaacggagtggacggatacgactactccagaggacagctgattgaggacgtggagcacacgttcgaagagatcaagccgctctacgagcacctccatgcatacgtgagagccaaactgatgaatgcctacccatcgtacatctcgccgatcggatgcctcccggcccacctgttgggcgatatgtggggaaggttttggactaatttgtacagcctcactgtccctttcggacaaaagcccaatatcgatgtgaccgacgccatggttgaccaagcatgggatgcacagcggatcttcaaagaagctgagaagtttttcgtgagtgtgggactgccgaacatgactcaggggttctgggagaactctatgctgacggatcctggtaatgtccaaaaggctgtgtgtcatccgactgcatgggaccttggaaaaggggacttccggatcctcatgtgtactaaagtgaccatggacgacttcctgactgcccaccacgaaatgggccacatccagtacgatatggcatatgcagcccagcctttcctcctccgcaatggcgctaacgaaggattccacgaggcggtcggcgaaatcatgagcctgtccgccgcgaccccgaaacatctcaagtcgattggactgctcagccccgacttccaggaggataacgaaaccgagatcaactttctgctgaaacaagctctgaccatcgtgggcacgctgccttttacctacatgctggaaaaatggcggtggatggtctttaagggggagatccctaaggaccagtggatgaagaagtggtgggagatgaaaagggagattgtgggggtcgtagaaccggtgccgcacgatgagacttactgcgaccccgcgtcgctgtttcacgtgtctaacgactacagcttcatccggtactacacgcggaccctgtaccagttccagttccaggaagcgctgtgtcaagcagccaagcacgaaggaccgcttcataagtgcgatatctcaaactcgaccgaggctgggcagaagctgttcaatatgctgcgcctgggtaaatcagagccttggaccttggccctggaaaatgtcgtgggagccaagaacatgaacgtgcgtccgctgctgaactacttcgaaccactcttcacgtggctgaaagaccagaacaagaattccttcgtgggatggtcgactgattggagcccgtacgcagaccagagcatcaaggtccgcatttcgttgaaatcagctctcggcgacaaggcctacgaatggaatgacaacgaaatgtatctgttccgctcgtcggtcgcctacgcaatgaggcagtacttcctcaaagtgaaaaaccagatgatcctgttcggagaggaggacgtccgcgtggcgaatctgaaaccgagaatttcgtttaacttcttcgtgaccgcacctaagaacgtgagcgatatcatcccgcggaccgaagtggaaaaagccatcagaatgtcgagatctcgcatcaatgatgcttttcgccttaatgacaatagtctggagttcttgggcatccagccgactctcggcccgccaaaccagcctccagtctccatctggctcatcgtgttcggagtcgtgatgggggtcattgtggtgggcattgtcattcttatcttcaccggtatccgggatcgcaagaagaagaataaggcacggagcggagagaatccatacgcgtccattgacatctccaaaggcgagaacaatccgggctttcaaaacaccgatgacgtgcagacctcgttc

SEQ ID NO: 6226 - DNA, 2415 bp, synthetic construct
  misc_feature 1..2415: note = source = /note="Description of Artificial Sequence: Synthetic coding sequence"
  source 1..2415: mol_type = other DNA
atgagctcctcgtcctggctgctgctttctctggtcgcagtgactgcagcccagtctactatcgaagaacaggcaaaaactttcctggacaagtttaaccacgaagcagaggatctgttctaccagtcgtcactggcgtcgtggaattacaacactaatatcactgaagaaaacgtccaaaacatgaacaatgcaggagataaatggtccgcctttctgaaagagcaaagcactctcgcgcagatgtaccctctgcaagagatccagaacctcacggtgaagctccagctccaggcgctgcaacagaatgggtcatccgtcttgtccgaagataagtcgaagcggctgaataccatcctgaacaccatgtcgaccatctactcgactgggaaagtgtgtaatcccgacaatccgcaagaatgtctgctgctggaacccggactcaacgaaatcatggcaaactcgcttgactacaatgagcggctgtgggcttgggaaagctggcgctcagaggtcggcaagcaattgcggcccttgtacgaagagtatgtggtgctgaagaacgaaatggcccgagccaatcactacgaggactacggagattattggcggggagactacgaggtgaacggagtggacggatacgactacagccgggggcagttgatcgaagatgtcgaacacaccttcgaggagatcaagccgctgtacgaacacctgcatgcctacgtcagagccaagctcatgaacgcctacccgtcatacatctcacctatcggatgtctcccagctcacctgttgggcgacatgtgggggcgcttctggaccaatctctattcactgaccgtccctttcggacagaagcctaacatcgacgtcaccgacgcgatggttgatcaggcctgggacgcgcaaagaatctttaaagaagcagaaaagttctttgtgtcggtgggacttccgaatatgacccaaggattctgggaaaattccatgttgaccgaccccggcaacgtgcagaaggcagtgtgccacccaactgcatgggacctgggtaagggagatttcaggatccttatgtgcactaaagtgactatggatgatttccttacggctcaccatgagatgggccatatccagtacgacatggcctatgctgcgcagccgtttttgctccgcaacggcgcgaacgaaggatttcacgaagctgttggtgaaatcatgtcactgagcgcagccacgccgaagcatctgaagtcgattgggctgctctcgccggattttcaagaagataacgaaaccgaaatcaatttccttttgaagcaggccttgaccattgttggaacgctcccgttcacttacatgttggagaagtggagatggatggtgttcaagggagagattccaaaggatcagtggatgaaaaagtggtgggagatgaaaagagaaatcgtgggtgtggtggaacctgtgccacatgacgaaacgtactgcgatccagccagcctgttccacgtgtcgaacgactactccttcatcagatactacaccaggactctgtaccaattccagttccaggaggcgctgtgccaggctgccaaacacgaaggacccctccataaatgtgatatttcgaactcgaccgaggctgggcaaaagctgtttaacatgttgcgcctgggtaaatcggaaccgtggaccctcgccctcgaaaatgtggtgggcgcaaaaaacatgaatgtccggccactgttgaattacttcgagccgctgttcacctggctgaaggaccagaacaagaattcgtttgtcggatggtccactgactggtcaccgtacgcggaccagtccatcaaagtgcggatttccctgaagtcggccctcggcgacaaggcttacgagtggaacgacaatgagatgtacttgttcagaagcagcgtggcttacgccatgcggcagtacttcctcaaggttaagaaccaaatgatcctgttcggtgaagaggacgtgagagtggccaacctgaagccacgaatctccttcaatttctttgtcactgcaccaaagaatgtgagcgacataatcccacggaccgaggtggagaaggcgattcggatgtctcgctctcgcatcaatgacgccttccgactcaacgacaattcgctcgaatttcttggaatccaacctactctcggacccccgaaccagccgccggtgtccatctggctcatcgtgttcggagttgtgatgggtgtgattgtcgtcgggatcgtcatcctgatcttcaccggaattcgagatcgcaagaagaagaacaaggctcggtcaggtgagaacccgtacgcgtctatagatatctccaaaggggagaacaacccgggattccaaaacacggacgatgtgcaaacttcgttt

SEQ ID NO: 6227 - DNA, 2415 bp, synthetic construct
  misc_feature 1..2415: note = source = /note="Description of Artificial Sequence: Synthetic coding sequence"
  source 1..2415: mol_type = other DNA
atgtcttcatcctcatggcttcttctgagcttggttgccgtcaccgctgctcagtctactattgaagagcaagctaaaaccttcctagataaatttaaccatgaggctgaagatctcttttatcagtcgagcttagcctcttggaactacaatacaaatatcactgaggaaaacgtccaaaacatgaataacgctggcgataaatggtctgcctttctaaaagaacagtcaaccctcgctcaaatgtacccgcttcaagagattcaaaatttaacagtgaagcttcaattgcaagccttgcagcagaacgggtcttctgttctgtcagaggataaaagtaaaaggttgaacacgatactgaatacgatgtccacaatttatagtacaggaaaagtgtgcaaccctgacaacccgcaggaatgcctattgctcgaaccaggcctcaacgaaatcatggccaacagcctcgattacaatgaacgtctgtgggcgtgggagtcatggaggtcggaggtgggtaagcagttacggccattatacgaagaatacgttgtactgaagaatgagatggctagagcaaatcactatgaggactatggagattactggagaggtgattatgaggttaacggggtagatggatacgattattcacgtggtcaattgattgaggacgtggagcacacgttcgaagagattaaacctctttacgaacatttgcatgcttatgtccgtgctaagcttatgaatgcatacccttcgtatataagtccaatcggatgcctcccagcacaccttcttggagacatgtggggaagattttggacgaacttgtattccttaactgttcctttcggacagaaacctaatatagatgtgacagatgcgatggtcgatcaggcttgggatgcacagagaatctttaaggaggccgagaagttctttgtgtcggtggggctaccaaacatgactcagggtttttgggagaactctatgctaacagatcctggtaacgtacaaaaggccgtctgccatcctaccgcttgggatcttggaaaaggggacttccgaatacttatgtgcaccaaggtgacgatggatgactttcttacggcccatcatgagatgggacatattcagtacgatatggcttatgccgctcaaccttttctattacgcaacggagcgaacgagggtttccatgaagccgtcggagagatcatgagtttatcagctgcgacaccaaaacacttaaaatctatcgggctccttagtcccgatttccaggaagataatgaaaccgaaatcaattttctccttaagcaggccttgactattgttggtacactccccttcacttatatgcttgagaaatggcgctggatggtatttaagggcgagatccctaaagatcaatggatgaagaagtggtgggagatgaaaagagagattgtgggtgttgttgaaccagttccgcatgacgaaacatattgtgatcctgcgagcctgtttcatgtaagcaatgactattcattcattcggtattacactagaactctctaccaatttcaattccaagaggcactatgtcaggctgcaaaacatgagggtcctttgcataaatgtgatatttcaaattcgaccgaagcaggtcaaaagctgtttaacatgttgagattgggtaaatcagaaccatggacattagccttagaaaatgttgttggcgccaagaatatgaatgtgcgtccattgttgaattacttcgagccgctttttacctggttgaaggatcagaacaaaaactcatttgtaggatggagtacggactggtcaccttatgctgatcagtctattaaggttcgtatttcattgaagagcgctctcggcgacaaagcttatgagtggaacgataatgaaatgtatttgttccggtcttcagtagcctatgctatgcgacaatattttctgaaggtaaaaaaccagatgatcctttttggcgaagaggacgtgagagttgctaatttgaagccacggatctccttcaactttttcgttacagccccaaaaaatgtgagcgatattattccgaggacagaggttgaaaaagctatacgtatgtcccgaagcagaatcaatgacgcttttaggttaaacgacaattcacttgaattcctaggtattcaacccaccctcggtcctcctaatcaacctcctgtgtcgatatggttgatagtcttcggtgtcgtaatgggagtaatcgtcgttggcattgttatacttattttcacaggtattcgtgatagaaaaaaaaaaaataaagcaagatcgggagagaacccttacgcttccattgatatctctaaaggggaaaataatcctggttttcaaaacaccgatgatgtccagacatccttt

SEQ ID NO: 6228 - DNA, 2415 bp, synthetic construct
  misc_feature 1..2415: note = source = /note="Description of Artificial Sequence: Synthetic coding sequence"
  source 1..2415: mol_type = other DNA
atgtcgtcgtcgtcatggcttctgctgtcactcgtggccgtcactgcagcacaatccaccatcgaagaacaggccaaaactttcctcgacaagttcaatcatgaagcggaagatctgttctaccaatcatccctggcctcctggaactacaacactaacatcacggaagaaaacgttcaaaacatgaacaacgcgggagataagtggtcagcgtttctgaaggaacagagcaccctcgcgcagatgtacccactccaagaaatccaaaacctgactgtgaaactccaactgcaagcccttcagcagaacggcagcagcgtgctgtccgaagataaaagtaagcgccttaataccattctgaacactatgtccactatctatagcaccgggaaagtgtgtaacccggataacccgcaggaatgcctgttgctcgagccaggactgaacgagataatggcgaactcactggactacaatgaaaggctgtgggcgtgggaaagctggaggtccgaagtgggtaaacagctgaggccgctttatgaggagtacgttgtgcttaagaatgaaatggcaagagccaatcactatgaagattacggggactactggcgaggcgattacgaagtcaacggagtcgatggatacgactactctcgcggccaactgatcgaggacgtcgagcacaccttcgaggaaatcaaaccactctatgaacatctgcacgcttacgtgcgcgcgaagttgatgaacgcctacccgtcatacatttcgccgatcggatgcctgccggctcacctgctcggcgacatgtgggggcgcttctggactaacctctactcgctgacggtgccattcggacagaagccaaacattgacgtgaccgacgccatggtcgaccaggcctgggacgcccaacggattttcaaagaagcagagaagttctttgtgagcgtcggactcccgaatatgacccagggattttgggagaactcaatgcttacggatcctgggaatgtgcaaaaagccgtatgccacccgactgcgtgggatctcggaaagggcgacttccggatcctgatgtgcactaaggtgaccatggatgacttcctcacggcgcatcatgagatgggccacatccagtacgacatggcctacgctgcacagccattcctcctgcggaacggtgccaacgagggcttccacgaagccgtgggcgagatcatgtcgctgtcagccgcgactccgaagcatctgaaatccatcggcttgctcagcccggatttccaagaggacaacgagacggaaataaacttcttgctcaagcaggctttgaccattgtgggcaccctgcctttcacgtacatgctggagaagtggagatggatggtcttcaaaggagaaattccgaaagaccagtggatgaagaagtggtgggagatgaagcgggaaattgtgggcgtcgtggagcccgtgccgcatgacgaaacctactgcgatccagcgtccctgttccacgtgtcgaatgactacagctttatccgatactacactcgcactctgtaccaatttcagttccaggaagctctgtgccaggcagctaaacacgaaggacctctccacaaatgtgatatctcgaactctacggaagcaggacagaaactgttcaatatgttgcggttgggtaaatcggagccgtggaccttggctttggagaatgtggtgggtgccaagaacatgaacgtccgcccactcctgaactactttgagcctctgttcacttggctgaaggaccaaaacaagaactcttttgtaggatggtccacggattggagcccttacgccgaccagtctatcaaagttagaatctctcttaagtccgcactcggtgataaggcttacgaatggaacgacaacgagatgtacctctttcgctcgtcggtcgcctacgccatgcgccagtactttctgaaggtcaagaatcagatgatcctcttcggcgaagaagatgtgagggtggcgaatctgaaacccagaatctccttcaacttctttgtgacggcacctaagaacgtgagcgacatcatcccacgcaccgaagttgagaaagccatccggatgtccaggtcgcgcatcaatgacgcatttagactgaatgataattccctggagtttctgggaatccaaccaacgctcggaccgccaaatcagccgcccgtgagcatctggctgatcgtgttcggagtcgtgatgggggtaattgtcgtcggcatcgtgattctcatcttcactgggatccgcgatcggaagaagaagaataaggcacggtcaggagagaacccgtacgcgtcgatcgacatctctaagggagagaacaatccaggtttccagaataccgacgatgtgcaaacctccttc

SEQ ID NO: 6229 - DNA, 2415 bp, synthetic construct
  misc_feature 1..2415: note = source = /note="Description of Artificial Sequence: Synthetic coding sequence"
  source 1..2415: mol_type = other DNA
atgagttcgtcttcgtggcttttgctatcactggtcgcggttaccgcggcgcagtccaccattgaggagcaggccaagaccttcctagataaattcaaccatgaagcggaggatctcttctatcagtcctcgctggcctcctggaactataatacaaacatcaccgaagagaacgttcagaacatgaataacgcgggagataaatggagtgcattcttgaaggaacagtcaaccctagcgcagatgtacccgcttcaagagatccagaatcttaccgtgaagctccaactgcaggctctacagcaaaatggctctagtgtgctgtccgaggataaatcgaaacgccttaacacgatcctaaacacgatgtctacaatctattccaccggcaaggtctgcaacccggataacccgcaggagtgccttctgttggagccgggtttgaacgagattatggctaactcgttggactacaatgagagactgtgggcatgggagtcttggaggtcggaggtcggaaaacaactccgcccactgtatgaggaatacgtagtcctcaaaaacgagatggcgcgggcaaaccattacgaggattacggcgactactggagaggagactatgaagtcaacggagtggatggatacgactattcccgaggccagctaatagaagacgtggagcatactttcgaagaaattaagccactgtatgaacacctgcatgcatacgtgagagcaaagctaatgaatgcctatccgtcatatatctccccgataggctgcctaccggcgcatcttcttggagatatgtgggggaggttctggacaaatttgtattcgctcactgttccgttcggacaaaagccaaacattgacgttacggacgctatggttgatcaggcttgggatgctcaacgaatatttaaagaggccgaaaagtttttcgtgtcagtcggcctccctaatatgacgcaggggttttgggaaaattcaatgttgacagatcctggcaacgtccaaaaagcggtttgtcatcccacagcttgggacctgggaaaaggagatttccgtattcttatgtgcaccaaggtgaccatggacgatttcttaacggcccaccatgagatgggacatattcaatatgacatggcctatgcagcgcagccattcctgctgcgcaacggcgcaaacgagggttttcatgaagcagttggagagattatgtctttgtcagccgcgacgcctaaacatctaaagtctatcggacttctctctccggactttcaggaagataacgagactgagattaacttcctcctgaaacaggcgcttactatagtaggaacccttcccttcacttacatgcttgagaagtggcgttggatggtttttaaaggtgaaatcccgaaagatcaatggatgaaaaaatggtgggaaatgaaacgcgagatcgttggcgtcgtggagcccgtgccacatgatgaaacctattgtgaccccgcctcactctttcacgtctcaaacgattacagtttcatcaggtattatacaagaaccctttaccaatttcagttccaggaagcgctctgtcaagccgcgaagcatgaaggtccactacataaatgcgacatttccaactcaaccgaagctgggcagaagctattcaatatgttaagactcggaaagagcgagccatggacccttgcgctcgagaacgtcgtgggggctaaaaatatgaatgtccggcctctattaaactactttgaaccgctctttacatggctgaaggaccagaacaaaaattcctttgttggttggtctaccgactggtcgccctatgccgatcagagcatcaaagtccgcatctctcttaagagcgccttgggtgataaagcgtatgaatggaatgataacgaaatgtacctgttccggagcagtgtggcttacgcgatgcgacagtatttcctgaaggtgaagaatcaaatgatcctctttggtgaagaagatgtcagagttgcgaacctaaagcctcgtatctcttttaatttttttgtcaccgccccgaagaacgttagtgacatcatacctcgcactgaagttgagaaggccatccgtatgagccgttcacgtataaatgatgccttcagactgaacgacaactcactcgagttccttggaatacaacctacgctcggaccaccaaaccaaccaccagtctctatttggcttattgtcttcggtgtcgttatgggcgttatcgtcgttggaatcgtcatcttgatcttcacgggtatccgggaccgcaagaagaagaataaagcgcgctctggtgaaaatccgtatgccagtatcgacatttcgaagggcgaaaataaccccggattccagaacacggatgacgtgcaaacttctttt

SEQ ID NO: 6230 - DNA, 2415 bp, synthetic construct
  misc_feature 1..2415: note = source = /note="Description of Artificial Sequence: Synthetic coding sequence"
  source 1..2415: mol_type = other DNA
atgtcgagttcatcctggctcctcctgagtttagtcgcagttaccgctgcacaatcaactatagaagagcaggctaagaccttcctcgataagttcaaccatgaagctgaagatctcttttatcagtcatctctggcttcatggaattataatactaacataactgaagaaaatgtccagaacatgaacaacgcaggtgacaagtggtcagcattccttaaagagcagagcacgttggcccagatgtatcctcttcaggaaatacagaaccttacggttaagcttcagttgcaggcactgcaacagaacggatcctctgtgcttagtgaggataagagcaagcggttgaacaccatccttaacacgatgagcactatctacagtaccgggaaggtttgtaatccagacaatccacaggaatgtctgctcctggagcccgggctgaacgaaataatggctaactcacttgattacaacgaaaggctgtgggcatgggaaagttggcgttcagaggtgggtaagcagctaagaccactctacgaagagtatgttgtgctgaaaaacgaaatggcaagagcaaaccattacgaggattatggagactactggcgtggagactacgaggtgaatggcgtggatgggtacgactatagccgtggccaactgattgaggacgtggagcacacctttgaggagataaaacccctctatgagcacctccacgcgtatgtgcgcgcaaagctgatgaacgcttacccctcatacattagtcctattggctgtctccccgcccacctattaggagacatgtggggccgcttttggacaaatctgtacagcctaaccgtgcccttcggccagaaacctaatattgacgttactgacgccatggtcgaccaggcatgggacgctcagagaatttttaaagaagccgagaagttctttgtttcggtcggcctccctaatatgacccagggtttctgggagaatagcatgctcacggaccctggtaacgttcagaaagccgtgtgccaccccacagcttgggacctgggcaagggggatttcaggatcctcatgtgcaccaaggtcacaatggatgactttttgaccgcgcaccacgagatgggccacatacaatacgacatggcttacgctgcccagccattcctattgcggaacggagccaatgaggggttccatgaggcggtgggtgaaataatgtcactttccgcagcaaccccaaaacaccttaagtcaattggtttactgtctcctgattttcaggaagacaacgaaaccgagattaactttctgctgaagcaggcactgacgatcgtgggcacactgccgttcacgtacatgcttgagaaatggcgctggatggtcttcaaaggggaaatcccaaaagaccagtggatgaagaagtggtgggagatgaaacgcgagattgtaggggtcgtggaacccgtaccccacgatgaaacctactgcgaccctgcctccttgtttcacgtgagcaatgattattctttcattcgttactatacacggactttgtaccagttccaattccaggaagccctctgtcaggccgctaagcacgaggggccgttgcacaagtgcgacatctctaattctactgaagctggccagaaactctttaatatgctgcgtctgggaaaaagtgaaccatggacactggccctggaaaacgtggtcggcgctaaaaacatgaatgtgcgacctctgctgaattacttcgaaccattgtttacctggttgaaggaccagaataaaaattctttcgtcggctggagcaccgactggtcaccttacgcagaccaatctattaaggtaagaatctccttgaaaagtgccctgggggataaagcctatgagtggaatgacaatgagatgtacctttttcgcagctccgtcgcatacgctatgaggcaatatttcctcaaggttaagaatcagatgattttattcggtgaggaagatgtgcgtgtggccaacctgaaaccccgaatctctttcaattttttcgtaacggctcctaagaacgtgtcagatatcatcccgaggacagaggtagagaaagcaatacggatgtcccgatcccgtataaacgatgctttccgattgaatgataattccttggagttccttggcattcagcctacgttaggcccacctaaccaaccccccgtaagcatctggctgatagtgttcggagtggtcatgggcgtgatcgtggtcggcatcgttatcctgatattcacagggattcgtgacaggaaaaaaaagaataaagccaggagtggcgagaacccctatgccagcatagacatcagcaaaggcgaaaacaatccgggcttccaaaacacagatgacgtccagactagcttc

SEQ ID NO: 6231 - DNA, 2415 bp, synthetic construct
  misc_feature 1..2415: note = source = /note="Description of Artificial Sequence: Synthetic coding sequence"
  source 1..2415: mol_type = other DNA
atgtcaagcagcagctggttgctcctttcactggtagcggtcacggccgcccagtcaaccattgaagaacaggccaagacttttctggacaagttcaaccacgaggccgaggacctcttctaccaaagcagccttgcctcgtggaattacaatactaacattaccgaagaaaatgtccagaacatgaataacgccggagacaagtggtcagcgttcttgaaggagcagtcaactctggcacagatgtacccgttgcaagaaatccagaacctcactgtgaagttgcagttgcaggctctgcaacaaaatggatcctctgtcctttccgaggataaatcgaagcggctgaacactatcctgaataccatgtctacgatttactccaccggaaaggtgtgcaatccggacaatccacaagaatgcctcctgctcgaacctggactgaacgaaatcatggctaactcgctggactacaacgagcggctgtgggcgtgggagtcctggcgctcggaagtgggaaagcagctccgccctctgtacgaagaatacgtggtgttgaaaaatgagatggcccgggcaaaccactacgaggattacggggactactggagaggagactacgaggtgaacggagtggacggctacgattactccaggggtcaactcatcgaagatgttgagcacacctttgaagagatcaaaccactgtacgaacacctgcacgcgtatgtgcgggctaaactcatgaacgcatacccgagctacatctccccgatcgggtgcctgccggcgcacctgctgggagacatgtggggacggttctggactaatctgtattccctgaccgtgccattcgggcagaaaccgaatatcgacgtgactgacgccatggtggaccaggcctgggatgcgcagcgcatctttaaggaagcggagaagttcttcgtctccgtgggactcccaaacatgacccagggattttgggaaaattcaatgctcaccgacccgggcaatgtgcagaaagccgtgtgccacccgaccgcttgggatctcggaaaaggagacttcagaatcttgatgtgcaccaaggtgaccatggacgactttctgaccgcgcaccatgaaatgggacatatccagtacgacatggcttacgccgcacaaccctttctgctgcggaacggtgctaatgaaggcttccacgaagccgtcggagagatcatgtccctttccgccgccactccgaaacacctgaaaagcatcggccttcttagcccagattttcaagaggacaacgagactgagatcaacttcctcttgaaacaagcgctgaccattgtcggaacgctcccattcacctacatgctggagaaatggcggtggatggtgtttaagggagaaatacctaaagatcagtggatgaagaagtggtgggaaatgaagagagaaatcgtgggagtcgtggaaccggtcccacatgatgaaacctactgcgatccagcttcacttttccatgtgagcaacgattactcgttcatccgctactacacgagaactctgtaccaattccagtttcaggaagccctttgtcaggccgcgaagcacgaaggaccactgcataagtgtgacatcagcaacagcactgaagccgggcagaagctgttcaatatgttgagattgggcaaaagcgaaccttggaccctcgctcttgaaaacgtggtgggagccaagaatatgaatgtgaggccccttctgaattacttcgagcccctgttcacgtggttgaaggatcagaataagaactcgttcgtcggatggtccactgactggtcaccttacgccgaccagagcatcaaggtgcgcatctctctgaagagcgctctcggcgacaaggcctacgaatggaacgataacgaaatgtacctgtttcgctcgagcgtggcatacgccatgagacagtacttcctcaaggtgaaaaatcagatgatcctgttcggcgaagaggacgtcagagtggcaaacctgaagccgcggattagtttcaatttctttgtgaccgcgccgaagaatgtgtccgacatcatcccacgcacggaagtggaaaaagcgatcaggatgtcgaggtcacggattaatgatgcgttcagattgaatgacaactcgctcgaattcttgggcatccagccgactttgggcccaccgaaccaacctccggtgtccatctggctgatcgtctttggtgtcgtgatgggtgtgatcgtcgtgggaatcgtgatactcatcttcacgggaatccgggaccggaagaaaaagaataaggctagatcgggagagaatccatacgcctcaatcgatatttcaaaaggagagaacaacccaggattccaaaacactgatgacgtccagacctcattc

SEQ ID NO: 6232 - DNA, 2415 bp, synthetic construct
  misc_feature 1..2415: note = source = /note="Description of Artificial Sequence: Synthetic coding sequence"
  source 1..2415: mol_type = other DNA
atgtcatcgtcctcgtggcttctcctctcactggtggcagtgactgcagcgcagagcaccatcgaggaacaggccaagacgttcctggacaaattcaaccacgaggccgaggatctcttttaccaaagcagcctggccagctggaactacaacaccaacatcaccgaggagaacgtgcagaacatgaataatgccggtgacaaatggtccgcctttttgaaagaacaatcaaccctggctcagatgtacccactgcaggaaatacaaaacctgacggtaaaactgcagctccaggccctgcagcagaacgggtcatcagtcctgagcgaagataagtcgaaacggttgaacaccatcctgaataccatgtccactatctacagcactgggaaggtttgcaacccagacaatccacaggaatgtctcctgctggaacctggactgaacgagatcatggccaatagcctggactacaacgaaagattgtgggcctgggaatcctggagatcggaggtcggcaagcaactgcgcccgctctacgaagaatacgtggtgctcaaaaatgagatggcgcgcgcaaaccactacgaggattatggcgactactggcggggagattacgaggtgaacggagtggatggctacgattactcgcggggccagttgatcgaagatgtcgagcacaccttcgaggaaatcaagccgctgtacgagcacttgcacgcctatgtgcgggccaagctcatgaatgcatacccatcgtacatttctccgatcggttgcctgccagcgcacctgctcggagacatgtggggccggttctggaccaatctgtatagcttgacggtcccattcggacaaaaaccaaatatcgatgtgactgacgccatggtggaccaagcctgggatgcacagcgcatctttaaggaggctgagaagttttttgtgtccgtcggactgcccaacatgacccagggtttctgggaaaactccatgctgactgaccctggcaacgtccagaaggccgtctgccaccctaccgcgtgggatcttggtaagggagactttcggatcctgatgtgtacgaaggtgactatggacgatttcttgactgcgcatcacgagatgggacacatccagtacgacatggcttacgccgcacaacctttcctgctgcgcaacggagccaacgaagggtttcacgaggctgtgggtgaaatcatgagcctctcggcggcaactccaaagcatctgaaatccatcggcttgctttctccggacttccaggaagataacgagactgagatcaacttcctgctcaagcaggcactcaccatcgtgggcactctgcccttcacttacatgctggagaagtggcggtggatggtgtttaagggcgagattccgaaagatcagtggatgaaaaagtggtgggaaatgaagcgggaaatcgtcggagtcgtggaacccgtgccgcacgacgaaacttactgtgatccggcatcgctgttccacgtgtcgaatgactactcgttcattcgttattacactcgcactctgtaccaattccaatttcaggaggccctgtgccaggctgcgaagcatgagggaccgctgcataagtgtgacatctccaattcgactgaagctggacagaagctgttcaacatgctccggctgggaaagagcgaaccatggactcttgcgcttgagaacgtggtcggcgctaagaatatgaacgtccggccgcttctgaactatttcgagccgctgttcacttggcttaaagaccagaataagaactcattcgtggggtggtcgactgactggtccccttacgccgaccagtcaatcaaggtgagaatctcgctcaagagcgccctcggtgataaggcatacgagtggaacgataacgaaatgtatctgtttcggtccagcgtcgcttacgccatgcggcagtacttccttaaggtcaagaatcagatgatcctcttcggcgaggaggacgtgcgggtcgccaatctgaaaccacggatcagcttcaacttttttgtcaccgcccctaagaatgtgtccgatatcatcccccgtaccgaggtggagaaggccatcaggatgtctcgcagccgcattaacgatgcattccgccttaacgataattcgctcgagtttttgggaattcagcccacccttgggccacctaaccaaccaccggtcagtatctggctgatcgtgttcggtgtggtgatgggcgtcattgtggttggaattgtgatcctcattttcaccggcatccgcgacagaaagaaaaagaataaggcgcggagcggtgagaatccatacgcgtccatcgacatctccaagggagagaataaccccggattccaaaacaccgacgacgtgcagacttccttt

SEQ ID NO: 6233 - DNA, 2415 bp, synthetic construct
  misc_feature 1..2415: note = source = /note="Description of Artificial Sequence: Synthetic coding sequence"
  source 1..2415: mol_type = other DNA
atgagtagttcaagttggctcctgttgagcctggtggccgtcactgcagcccaaagtacaatcgaagagcaggccaagaccttcctggacaagttcaaccatgaagccgaggatttattctatcagagctctctggcgtcctggaactataacacgaatataaccgaggaaaatgtccagaatatgaacaacgcaggcgataagtggtccgcattcttgaaggaacagagcaccttggcccagatgtaccccctccaggagatccagaaccttactgtgaaactccagctgcaggccctccagcagaatggaagctccgttttgtctgaggacaaatctaagcggctgaacacaattctgaatactatgtctacgatatactcgaccggtaaggtttgcaaccccgataacccccaggagtgccttctgctggaacccggcttgaacgagattatggcaaattctttggactacaatgagagactttgggcatgggagagctggcgaagcgaagtgggcaagcaactgaggcccctttacgaggagtacgtggtactgaaaaacgaaatggcgcgtgccaatcattacgaggactacggagactactggaggggtgactacgaagtgaacggcgtggacggctacgactacagtcgggggcagctgatcgaagatgtagagcacaccttcgaggagattaaaccactctatgaacatctccacgcttatgtgcgagctaagctcatgaatgcttacccttcatatatttctccaattggatgccttccagctcatctgctaggtgacatgtggggaaggttttggacaaatctctattctctgaccgttccatttgggcagaaacctaacattgacgtgacagatgctatggtggaccaagcttgggatgcacagaggatctttaaagaggccgaaaagtttttcgtgagcgttggactgccaaatatgactcaggggttttgggagaatagcatgttgacagacccagggaatgtgcagaaggctgtctgccaccctaccgcatgggacttaggaaaaggagacttccgaattctgatgtgcacaaaagtgaccatggatgatttccttacagcacaccacgaaatgggacatattcagtatgacatggcctacgccgcccagccatttctcctccgcaatggagctaacgaaggttttcacgaggctgttggcgaaattatgtcactttccgccgcgactcctaagcacctgaagtctatagggctcctttctcctgacttccaggaagataatgagaccgagatcaatttcctgttaaagcaggcattaaccatagttggcacactgccatttacctatatgcttgagaaatggagatggatggtattcaaaggagagattcctaaagaccagtggatgaaaaaatggtgggagatgaagagggagatcgtcggcgttgttgaacctgttccgcacgacgagacttattgcgatccagcgagcttatttcatgtgtccaatgactattctttcattcggtattatacccggacgctatatcagttccagttccaggaggccctgtgtcaggccgccaagcatgagggcccattgcacaagtgcgacataagtaattcaacggaagctggccagaaactgttcaatatgcttcgtctcggaaagagcgagccatggactctggctctcgaaaacgttgtcggagccaaaaacatgaatgtacgacccctattaaactatttcgaaccactgtttacttggctgaaggatcaaaacaagaattccttcgttgggtggtcgaccgactggtccccctacgcagatcagtctatcaaggtaaggatttccctgaagagcgcattgggagataaggcctatgagtggaacgataatgagatgtatttattcagaagcagcgtggcctatgccatgagacagtactttcttaaggtgaagaatcagatgatcctctttggcgaggaggatgtgcgagtcgccaatttaaaaccgcggatctccttcaacttttttgtgaccgcccccaagaacgtgagtgatataataccccgaacagaggtcgagaaggcaatcagaatgagtcgttccagaattaatgatgcctttcgcctcaatgacaattccttagagttcctcggtatccagccaaccttaggacctcctaaccagcccccagtgagtatttggctcatagtgttcggcgtcgtcatgggtgttatcgtcgtgggtatcgtcatcctgatcttcactggaattagagataggaagaagaagaacaaagcccggtctggggagaacccgtacgccagcatcgatatctcaaaaggcgagaacaaccccgggtttcaaaataccgacgatgttcaaacctcgttt

SEQ ID NO: 6234 - DNA, 2415 bp, synthetic construct
  misc_feature 1..2415: note = source = /note="Description of Artificial Sequence: Synthetic coding sequence"
  source 1..2415: mol_type = other DNA
atgtcctcaagctcgtggctgcttctgtcgctggtcgccgtcaccgcggctcaatcgacgatcgaagaacaggcgaaaaccttccttgacaaattcaatcatgaagcagaggatttgttctaccagagcagccttgcgtcgtggaactacaacaccaacatcactgaagaaaacgtgcaaaacatgaataacgcgggtgacaagtggtcggcctttcttaaagagcagtcaaccttggctcagatgtacccgctgcaggaaatccagaacttgaccgtgaaactccagctccaggcgttgcagcagaacggatcctcagtgctgtcagaagataagagcaaaagactgaatactattctcaacaccatgagcactatctactcaaccggcaaggtgtgtaaccctgacaatccgcaagaatgtctgctgctcgagccaggcctgaatgaaatcatggccaactcgctggattacaacgaacggctgtgggcgtgggaatcatggagatccgaggtgggcaagcagctccgcccactgtacgaagagtacgtggtgctgaagaacgagatggctcgggccaaccactacgaggattacggagactactggcggggagattacgaggtgaacggagtggacggctacgactactcaaggggacagctgatcgaggacgtggagcacactttcgaggaaatcaagccgttgtacgaacacctgcacgcttacgtgagagccaagctgatgaacgcctacccttcatatatctcccctatcggatgcctgcccgcacacctgctcggggatatgtgggggcgcttttggactaacctgtactcccttaccgtcccctttggacagaagccgaacatcgacgttacggacgccatggtggaccaagcctgggacgcccagagaattttcaaagaagccgagaagtttttcgtgtccgtcggcttgcccaacatgacgcaagggttctgggagaacagcatgctgaccgaccctggcaatgtccagaaggcggtgtgccacccgaccgcctgggatctgggtaagggagacttccgcatcctcatgtgtactaaagtgactatggacgacttcctgaccgcgcaccatgagatgggacatatccagtacgacatggcatatgccgcccagcccttcctgttgagaaatggagccaatgaaggattccatgaagccgtgggagagataatgtcgctgtccgccgccaccccaaagcacctgaagtctatcggcctgctgagcccagacttccaggaggacaacgaaaccgagatcaactttttgctcaaacaggccctgactatcgtgggaactctgccgtttacctacatgctggaaaagtggcggtggatggtgtttaaaggggaaatccctaaggaccagtggatgaagaagtggtgggaaatgaagcgcgaaatcgtcggagtcgttgaacccgtcccgcacgacgaaacctactgtgacccggcaagcctgttccacgtgtccaacgactactcgttcattcgctactacactcggactctctaccaatttcagttccaggaggccctgtgccaggcagcaaagcacgaaggcccgctccataaatgcgacatctcgaattcaaccgaggccggacagaaactgtttaacatgctccgtctgggaaagagcgaaccctggacgcttgcattggagaacgtggtcggagctaagaacatgaatgtgcggcctttgcttaactactttgagcctctcttcacctggctcaaagaccagaataagaattcgttcgtcggatggtccaccgattggtcgccgtacgcagaccagagcatcaaggtgagaatcagcctgaagtcggccctcggtgacaaagcgtacgagtggaatgataacgagatgtatctcttccgatcaagcgtcgcttacgcaatgcgccaatactttctcaaggtgaagaaccagatgatcctgttcggtgaagaggacgtgcgcgtggcaaaccttaagcctcggatctctttcaatttcttcgtgactgcaccgaagaacgtgagtgacattatcccgcggactgaagttgagaaagccatccgcatgtcgcggtccaggattaacgatgcctttcgcttgaacgacaattccctggaattcctggggatccagccgaccttgggaccaccaaaccagccaccggtgtccatttggctgattgtgttcggagtggtcatgggcgtgatcgtggtgggtattgtgatcctgatctttaccggtatccgggatagaaaaaagaagaacaaggcgcgctcgggagaaaacccgtatgcctccatcgacatctccaaaggagagaataaccctggattccagaacaccgatgacgtccagacttctttc

SEQ ID NO: 6235 - DNA, 2415 bp, synthetic construct
  misc_feature 1..2415: note = source = /note="Description of Artificial Sequence: Synthetic coding sequence"
  source 1..2415: mol_type = other DNA
atgagctcttcttcgtggctgctcctgtcgctggtggcagtgaccgcggcgcagagcactattgaagaacaagcaaagactttccttgacaagtttaaccacgaggctgaggatctgttttaccagtcgtcgcttgcctcctggaattacaacactaacattaccgaagaaaatgtgcagaatatgaacaacgccggagataagtggagcgcatttcttaaggaacaatcgacgcttgcccaaatgtacccactccaagaaattcagaacttgactgtgaaacttcaactgcaggctctgcaacagaacgggtcatccgtcctgtcagaggataagtcaaagcgactgaacaccatactcaacaccatgtcaaccatctactccaccggaaaggtgtgtaacccggacaaccctcaagaatgtctgctcctggaaccaggacttaacgaaatcatggcaaattcactggactataacgagcgactctgggcatgggaatcctggaggagcgaggtcggaaagcagcttaggcccctttatgaagaatacgtggtgctgaagaatgaaatggcgcgcgcaaatcattacgaagattacggagattactggcgaggagattacgaagtgaacggtgtcgatggctacgactacagccggggacaactcattgaggatgtcgaacatacctttgaagaaatcaaaccgctttacgaacaccttcacgcatacgtgcgagccaaactcatgaacgcatacccttcctacattagccctataggatgccttcccgcacatctgctgggagacatgtggggaagattctggaccaatctgtacagccttacggtgcctttcggtcagaagccaaacattgacgtgaccgacgcaatggtggatcaagcatgggatgcgcagcggattttcaaggaagctgagaagttttttgtgtccgttggtctgcctaacatgactcaaggattctgggagaattccatgctgactgatcctggcaatgtccaaaaggccgtgtgtcatccaacggcatgggatctcggtaagggggattttagaatccttatgtgtaccaaagtcaccatggatgattttctgaccgcgcaccatgaaatggggcatatccagtatgacatggcctacgcggcacagccttttctgctgcggaacggtgctaacgaagggtttcatgaagctgtgggagaaatcatgtccctttcggcagccaccccaaaacatctcaaatcgatcgggcttctgtcacccgactttcaagaagataatgaaactgaaatcaatttcctcctcaagcaggcactcaccattgtcggcactcttccgtttacctacatgctcgaaaagtggagatggatggtgtttaaaggagaaattcccaaggaccaatggatgaagaagtggtgggaaatgaaaagagaaattgtcggcgtcgtggagccagtgccgcatgatgaaacctattgcgatcccgcatccctttttcatgtctccaatgattactcattcattcgttactacacgcgaactctttaccaatttcaattccaagaagccctgtgtcaggcggcaaagcatgaaggtcctcttcataagtgtgatatttcgaactcaactgaagcgggtcaaaaactgttcaacatgcttcgcctgggtaaatcagagccctggacgctggcgctcgaaaatgtggtgggagcaaagaatatgaacgtcagaccgctgctcaactacttcgaacccctgttcacttggctgaaggaccagaacaagaacagtttcgtgggatggtccactgactggtcgccctacgccgatcagtccatcaaggtgcgcatctccctgaagagcgccctgggagataaggcttacgagtggaacgacaacgagatgtaccttttccgcagctccgtggcatacgcaatgagacaatactttctgaaggtgaaaaatcagatgatactttttggtgaggaagatgtgagagtggcaaaccttaagcctagaatcagctttaactttttcgtcactgcaccgaagaatgtctcggacattatccctcggaccgaggtggagaaggccataagaatgtccagaagccgaattaacgacgcatttcgtcttaacgacaattcgttggagtttttgggtatccagccaactctgggcccacctaatcaaccacctgtgtcgatttggctgatcgtctttggcgtcgtcatgggagtgattgtcgtcgggattgtgattctcatcttcacgggaattcgcgatcgcaaaaagaagaacaaagcacgtagcggagagaacccctacgcgtccatcgatatctccaagggtgagaataatcctggctttcaaaacaccgatgacgtccaaacctcgttt

SEQ ID NO: 6236 - DNA, 2415 bp, synthetic construct
  misc_feature 1..2415: note = source = /note="Description of Artificial Sequence: Synthetic coding sequence"
  source 1..2415: mol_type = other DNA
atgagctcatcgagctggctgttgctaagcttagtcgctgtgaccgcagcacaatctactattgaggagcaggcaaagacatttctagacaagttcaatcatgaagcggaggacctgttctaccagagtagccttgccagctggaactacaatactaacatcacagaggagaatgtgcagaacatgaataacgcaggggataaatggagcgcctttctcaaggaacaatcgacccttgcccagatgtaccctttgcaggagatccagaacctgaccgtgaagctacagctgcaggccctgcaacaaaacggtagtagcgtactgagtgaagataaatccaagaggctgaacactattctgaacaccatgtccacaatatattccacgggaaaagtctgtaacccagataacccccaggagtgtcttctgctagaacccggattgaacgagattatggccaattctctcgattataacgaacgcctgtgggcttgggagtcctggcgttcagaggtggggaagcaattgcggcccctttatgaagagtacgtggtgttgaagaacgaaatggcgcgagctaatcattacgaggactatggcgactactggaggggggactacgaagtcaacggagtggatgggtatgactatagtcggggtcaattgatcgaggatgtggagcatacatttgaggagataaaaccactatacgagcacctgcatgcatacgtgcgagcaaagctgatgaatgcttatccttcctacatttccccaatcggatgcttgcctgcccatttactgggtgacatgtggggccgcttctggacaaacctttatagcttgactgtgcccttcggacagaaaccaaacatagacgtcactgatgccatggtggaccaggcttgggacgcacaacggatcttcaaggaggctgaaaaattcttcgtttctgttggccttcctaacatgacccagggcttctgggaaaacagtatgctcaccgatcctggaaacgtccagaaggctgtatgccacccaactgcctgggacctgggaaagggtgattttcgcatcctcatgtgtactaaagtcaccatggacgattttctcacggcccaccacgagatgggccacattcagtatgacatggcgtacgccgctcaaccattcctactacggaacggcgccaatgaagggttccatgaagcagtgggggagattatgtcactgagcgcggccacgcccaaacacctgaaatctataggtctgttgagtcccgatttccaagaggacaatgaaacagaaattaacttcctgctgaagcaagccctcaccattgtgggcacgttacctttcacctacatgctcgaaaaatggaggtggatggtattcaagggtgaaataccaaaggaccagtggatgaaaaagtggtgggaaatgaaacgagaaatcgtgggcgtggtggagccagtacctcatgacgaaacatattgtgacccagcttccctgttccacgtctcaaacgactactccttcattcgctactacacacggaccttgtaccagtttcaatttcaggaggccctttgtcaggctgccaaacacgaaggtcccttgcataagtgcgatattagcaactctacagaggcgggacagaagctcttcaacatgctccgcttgggtaaatcggagccatggaccctcgccctggagaacgttgttggggcaaagaacatgaatgtacggcccctactcaactactttgaacctctgtttacgtggctgaaagaccagaacaaaaatagttttgttgggtggagcaccgattggtcaccttatgcagatcagtcaattaaagtacgcatcagcctgaagtccgccttaggcgataaggcctacgagtggaatgacaacgagatgtatctttttaggtccagcgtggcctacgctatgcgccagtattttttaaaggttaagaatcagatgatccttttcggcgaggaggatgtacgggtcgctaacttgaagccgcgcatctcatttaacttctttgttacagcacccaaaaacgtttcagatatcattccaagaacagaggtggagaaggctattcgtatgtctcgtagcaggattaacgacgccttccggcttaatgataatagtcttgaatttttggggattcagcctaccttggggcctcccaaccagcctccagtgagcatttggctgattgtttttggggtcgtgatgggggttatcgtggttggtatcgtgattctgatctttaccgggatcagagatagaaaaaaaaaaaataaagctcggtcaggcgagaatccttatgcttccatcgacatatccaaaggcgaaaacaatcctggttttcagaacacagacgatgtacagaccagcttc

SEQ ID NO: 6237 - DNA, 2415 bp, synthetic construct
  misc_feature 1..2415: note = source = /note="Description of Artificial Sequence: Synthetic coding sequence"
  source 1..2415: mol_type = other DNA
atgtcaagctcgtcgtggcttctgctctcgctcgtcgccgtgaccgccgcccagtcaaccatcgaagaacaggccaagactttcctcgacaaattcaaccatgaagcagaagatctcttctaccagagctccctggcgtcttggaattacaacaccaacatcaccgaagaaaacgtgcagaacatgaacaatgccggagacaagtggtccgcgtttctgaaggaacagtcaaccctggcacaaatgtacccgctgcaagagatccagaacctcacggtgaagctccaactccaggcactgcaacaaaatggttcgtcggtcctgagcgaggataagtcgaaacggcttaacaccatcctcaatactatgtccacgatttactcgaccggaaaagtctgcaacccagacaatcctcaagagtgtctgctgctggaaccgggactcaacgaaatcatggctaactccctggactacaacgagagactgtgggcttgggagtcatggcggtcagaggtcgggaagcagctgcggccgttgtacgaagagtacgtggtgctcaagaacgagatggcgcgcgctaaccactacgaagattacggggattattggcgaggcgactacgaagtgaacggagtggacggctacgactactcccgggggcagttgatcgaagatgtcgaacatacgttcgaagaaatcaaaccgctgtacgaacacctgcatgcatacgtccgggcgaagctgatgaatgcttacccttcatacatctcaccaatcggctgccttccagctcacctgctgggagatatgtggggacgcttctggacgaacttgtactcgctgaccgtgccgtttggacagaaaccaaacatcgatgtcactgacgcgatggtcgatcaagcatgggatgcgcaacgcatcttcaaagaggccgagaagttcttcgtgtcggtgggactgcctaacatgacccagggcttctgggaaaacagcatgcttactgacccaggtaacgtgcaaaaggcagtctgccatcctaccgcttgggacctgggtaaaggcgatttcagaatcctgatgtgcaccaaggtgactatggacgattttctgactgcccatcacgaaatgggacacatccagtacgacatggcgtacgcggcacagcctttcctgcttaggaatggtgcaaatgagggattccatgaggccgttggagagatcatgtcactgtcggcggcgaccccgaaacatcttaagtctatcggactgctcagccccgactttcaagaagataatgagactgaaatcaacttcctgctcaagcaagcgctgaccatcgtggggactctgccattcacctacatgctcgaaaagtggcggtggatggtgtttaagggcgagattccaaaggatcagtggatgaaaaagtggtgggagatgaagagagaaatcgttggcgtggtggaaccagtgccgcacgacgaaacttactgtgaccctgcctcgctgttccacgtttcaaacgattactcatttatcagatactacactagaaccttgtaccagttccaattccaggaggccctgtgtcaggcagccaaacatgagggaccacttcacaagtgcgacatctcgaattcgaccgaggccggccaaaagctgttcaacatgctgagactggggaaatccgagccttggactctggcgttggagaatgtggtgggagccaaaaacatgaatgtgaggccgttgctgaactatttcgaaccgctgtttacctggctcaaggaccaaaacaagaactcctttgtgggatggtcaactgattggagcccgtacgcggatcagtccattaaggtgcgcattagcctgaagtcggctctgggagacaaggcttacgagtggaatgataatgagatgtacctcttccgctcgtcggtggcgtacgctatgaggcaatacttcctcaaagtgaagaaccagatgattttgttcggtgaggaggatgtgcgcgtggcaaatcttaagcctcgcatttcgtttaacttctttgtgaccgcccctaagaatgtttccgacatcatcccgagaaccgaagtcgaaaaggcgatccgcatgtccagatctcgtatcaacgacgcatttcgcctcaacgataactcactggaattcctgggcatccagccaactcttggaccaccgaaccagcctccggtcagcatctggctcatcgtgttcggcgtggtgatgggtgtgattgtggtgggtatcgtgatcctgatctttaccggcattcgggataggaagaagaaaaacaaggcacgctcaggagaaaacccctacgcatcgatcgatatttcgaagggcgagaacaatcctggattccagaacacggacgatgtgcagactagcttc

SEQ ID NO: 6238 - DNA, 2415 bp, synthetic construct
  misc_feature 1..2415: note = source = /note="Description of Artificial Sequence: Synthetic coding sequence"
  source 1..2415: mol_type = other DNA
atgagctctagctcgtggctattacttagcctggtggcagttactgcggcccagtcaacaattgaggaacaggcaaagacattcctcgataagttcaatcatgaagccgaggatcttttctaccagtcttcactggccagctggaactataatactaatattaccgaggagaatgtgcagaatatgaataatgctggtgacaaatggtccgcattccttaaggaacagtccaccctcgcccagatgtacccattgcaagaaatccagaatttgactgtcaaactccagctgcaggcgctccagcaaaacgggtcgagtgtgctctcagaagacaaaagtaagcgactgaatacaatcctgaacaccatgagcacaatttatagcactggcaaggtgtgcaatcccgacaacccgcaggaatgcttgctgttggagcccggcttaaacgagataatggcgaactccctcgattacaacgaaaggctttgggcctgggagtcctggcgcagcgaagtcggtaaacagctcaggccgttgtatgaggaatatgtcgtgctgaagaatgaaatggcacgtgcgaatcactacgaggactacggcgactattggcggggcgactatgaagttaatggagtcgacgggtacgactatagtagagggcagctgatcgaggatgtagagcatacttttgaggagatcaagcctctctacgaacatctacatgcctacgtcagggccaaactgatgaatgcctacccgtcctatatctcccccatcggctgtctgcccgcccatctattgggggatatgtggggcaggttctggaccaacctatacagtctcactgtccccttcggacaaaagcctaacatcgacgtgaccgatgctatggttgaccaggcttgggacgcacagcggattttcaaagaggctgagaagttcttcgtttccgtgggactccctaatatgacacagggcttttgggagaacagcatgctcaccgacccgggtaacgtccagaaggctgtctgccaccccaccgcttgggatcttggcaagggagatttccggattctcatgtgtaccaaagtgacgatggatgactttctgaccgcccatcacgaaatgggacacatccagtatgatatggcttatgccgcccagccattcttgctccgaaacggcgctaacgagggattccacgaagccgttggtgaaattatgtccctcagcgcggcaactcccaagcaccttaaatcaataggtctgctgtctccagacttccaagaagataatgaaaccgaaattaacttcctgctcaaacaggcgctaaccattgtgggcacccttccattcacctatatgcttgagaagtggcggtggatggttttcaaaggagagatacccaaagaccaatggatgaagaagtggtgggagatgaaacgcgagatcgtcggtgtggtggagccagtgcctcatgatgagacatactgcgatcccgcatccctcttccacgtatcgaatgactactcttttatccgctattacactcgcaccctgtaccagttccagttccaggaagctttatgtcaagccgccaagcacgaaggcccgctgcacaaatgtgatatctctaactccacagaagcaggccagaaactgttcaacatgcttcgcttgggcaaatcagagccctggacacttgctctcgaaaatgtggtgggagccaaaaatatgaacgtgagaccacttttgaactattttgagccactgtttacatggttgaaggatcagaacaaaaactcattcgtaggatggtctaccgattggagcccttatgccgatcagagcataaaagtgcgcatctctttaaaaagcgccctaggagataaggcatatgaatggaatgataacgagatgtacctgttcagatcctccgtggcctatgctatgaggcagtacttcctgaaagttaagaatcagatgatcctcttcggtgaggaagatgtccgtgttgcaaacctgaagccccgaatcagttttaatttcttcgttactgccccaaagaacgtctcagatatcatccctagaacagaggtcgagaaggcgattaggatgtcaaggtcccgtatcaacgatgccttcagacttaatgataattccctcgagttcctcggaatccagcctaccctggggccaccaaaccaaccccctgtttccatctggttgatcgtctttggcgtggtcatgggcgttatagtggtgggcatagtgatcctgatcttcacaggcatccgggaccggaagaagaaaaacaaggccaggagcggcgagaacccttacgcatcaattgacatctcgaaaggtgagaataaccccggttttcagaatactgatgacgtgcagacctcgttc

SEQ ID NO: 6239 - DNA, 2415 bp, synthetic construct
  misc_feature 1..2415: note = source = /note="Description of Artificial Sequence: Synthetic coding sequence"
  source 1..2415: mol_type = other DNA
atgtcctcctcgtcttggctgctgctgtcgctcgtcgcggtgaccgcagcccagtcgactattgaagagcaggccaaaacgtttctggacaagtttaaccacgaggcagaggacctcttttaccaaagctcgctcgcatcctggaactacaatacgaacattactgaggagaacgtgcagaatatgaataacgcaggggacaagtggtcggcgtttctgaaggagcagtcgactcttgctcagatgtaccctcttcaagaaattcaaaatctcaccgtgaagctgcaacttcaagcactgcaacagaatgggtcgtcggtgctttcggaagataagagcaagcggctgaacactatcctgaacaccatgtccacgatctattccaccggaaaggtgtgtaaccccgacaaccctcaggagtgtctcctgttggagcctggacttaacgagatcatggcaaattcgctcgattacaatgagagactttgggcgtgggaaagctggcgatcagaggtgggcaagcaacttcggcctttgtacgaagagtacgtggtcctgaagaacgagatggcaagagccaaccattacgaagattacggagattactggcgcggcgattacgaagtgaatggcgtggatggatacgactactcgcgggggcagcttattgaagatgtcgaacacaccttcgaggagattaaacccctttatgaacatctgcatgcatacgttagggcaaagctgatgaacgcctacccctcatacatcagccctatcggctgtctgcctgcccacctgctgggagatatgtggggacgcttttggacgaacctgtactcgctgaccgtcccattcgggcagaagcccaacattgatgtgaccgacgcaatggtggaccaagcatgggatgcgcaaagaatcttcaaagaggcagaaaagttttttgtgtcggtggggctccctaacatgacccaaggcttctgggaaaactcaatgctcactgaccctggcaacgtgcaaaaggctgtgtgccatcccactgcatgggatcttggaaagggagactttagaatactgatgtgtacgaaggtcactatggatgacttccttactgcccaccacgaaatgggtcatatccaatacgacatggcctacgcagcccaaccttttcttctcaggaatggggccaacgagggttttcacgaggcagtcggggagattatgtcactgtcggcagcaacccccaagcacctgaaatcgattggccttctctcgccagattttcaagaggataacgaaaccgagataaacttcttgttgaaacaggccctgactatcgtggggaccctgccattcacttacatgcttgaaaagtggagatggatggtgttcaaaggcgaaattccgaaggatcagtggatgaagaagtggtgggagatgaagcgcgaaatcgttggagtggtcgagcctgtgccacatgatgaaacttattgcgaccccgcatcacttttccacgtgtccaacgattactccttcataagatactacactagaactctgtaccagtttcaatttcaagaggcactgtgtcaagcagccaagcatgagggtcctctccataaatgtgacattagcaactccaccgaagcaggacaaaagttgtttaacatgcttcgccttgggaagagcgaaccatggaccctggcactcgaaaacgtcgtgggtgctaagaatatgaatgttagacccctcttgaactacttcgagcctctgttcacctggttgaaggatcagaataagaattcgtttgtgggttggtcgaccgactggtcaccttacgctgatcagtccattaaggtgaggatttcactcaagtcggctctcggcgataaggcgtacgaatggaacgataacgagatgtaccttttccgttcatccgtggcatacgcaatgcgacagtattttctgaaagtgaaaaaccaaatgattcttttcggagaggaggacgtcagggtcgcaaatctcaagcctagaatctcgttcaacttttttgtgaccgcacctaaaaacgtgtccgatatcatcccgagaactgaagtcgaaaaagcaattagaatgtctcggtcgcgcattaacgatgcattccgactgaatgacaactctcttgaattccttggaattcagcctaccttgggtccgccgaaccagcctcccgtctccatctggcttattgtgtttggggtggtgatgggtgtgatagtggtcggaatagtgattctcatctttacgggtatcagggatcgtaaaaagaagaataaggcacgatctggcgaaaacccatacgcttcgattgacatatcgaaaggagagaataacccagggtttcagaatactgacgacgtgcagactagcttc

SEQ ID NO: 6240 - DNA, 2415 bp, synthetic construct
  misc_feature 1..2415: note = source = /note="Description of Artificial Sequence: Synthetic coding sequence"
  source 1..2415: mol_type = other DNA
atgagttcttccagctggctgctgctaagcctggtcgcggtgacggccgcccagagcaccatcgaagaacaagcgaaaactttccttgataaatttaaccatgaggccgaggatctgttttaccaaagctccctggcctcatggaactacaacacaaatattactgaggaaaatgttcagaatatgaacaacgcgggcgacaagtggagcgcttttctgaaggaacagtctaccctggcacagatgtacccactgcaggagattcagaacctaacagttaaactgcagctccaggctttgcagcaaaacggcagctccgttctcagcgaggataagagtaagagactgaacacgatactgaataccatgagcaccatctattccacgggtaaagtttgcaatcccgacaacccacaagagtgtctgctgctggagccaggcctgaatgaaattatggctaatagccttgattacaacgagcgactttgggcctgggaatcttggcgcagcgaggtgggtaagcagctgaggccgctctacgaagagtacgtggttttgaagaatgagatggcccgcgccaaccactatgaagattacggtgactattggcggggcgactatgaagtaaacggcgttgacggttatgattattcaaggggacaactgattgaggatgttgagcatacttttgaggagatcaagccactgtatgaacacctgcacgcgtatgtgcgcgccaagctcatgaacgcttacccaagctatatcagtcccattggatgtctgccagcccacctgctgggtgacatgtggggccgattttggacaaacctgtatagcctgactgtgccttttggccagaagccgaacattgatgtgaccgatgctatggtggaccaagcctgggacgcccagcgcatttttaaagaggcggagaagttctttgtttctgtaggactgccgaatatgacccagggtttttgggaaaacagcatgctgactgatccgggtaatgttcaaaaagcagtgtgccaccctaccgcgtgggatctgggcaagggcgacttccgcatcctgatgtgcaccaaggttaccatggatgatttcttaaccgcgcaccacgagatgggacacatccaatacgacatggcatacgccgcgcaaccatttcttttgcgcaatggagcaaacgagggcttccacgaggcggtcggtgagatcatgtctctgagcgccgcgacccctaaacatctgaaatctatcggtttgctaagccctgactttcaggaggataatgaaaccgaaatcaacttcctgctgaagcaggccctgacgatagttggaaccctgccttttacgtatatgttggagaagtggagatggatggtttttaagggcgaaattccgaaggaccaatggatgaaaaaatggtgggaaatgaaacgggagattgttggcgtggtggagccggtgccacatgacgagacctactgcgacccggcctctctgttccatgtttctaatgattactcgttcatccgctattacactaggacgctgtaccaattccagttccaagaggcgctgtgtcaggccgcgaagcatgagggcccactgcacaaatgtgatatatcgaacagcacggaggccggtcagaagctgttcaatatgttaagactgggcaagtctgaaccttggacgctcgcattggaaaatgtcgtgggtgcaaaaaacatgaacgttagaccactgttgaactattttgagcctttgttcacctggctgaaggaccaaaacaagaactcgttcgtaggttggtctactgactggtccccatacgccgatcaaagcatcaaagtccgtattagcttaaagagcgctctgggcgataaagcgtacgagtggaatgacaatgagatgtacctgttccgtagtagtgtggcctacgcaatgcgccagtatttcttaaaggttaaaaaccaaatgattttattcggtgaggaagacgtgcgtgtggccaacctcaaaccgcgcatcagcttcaactttttcgtgaccgcccctaagaatgtgtctgacattatccctcggacggaagttgaaaaagctatccgaatgagccgctcccgcatcaatgacgcatttcgcctcaacgataactctctggagtttctggggatccaaccgacccttgggcctcctaatcagccaccagtgagcatttggcttatcgtctttggcgtcgtgatgggtgttattgtcgtgggtatcgtaatcctgatttttaccgggatccgcgacaggaaaaaaaagaataaggctcgcagcggggaaaatccgtacgcctccattgacataagcaaaggggagaacaacccaggctttcagaataccgacgacgttcagacctccttc

SEQ ID NO: 6241 - DNA, 2415 bp, synthetic construct
  misc_feature 1..2415: note = source = /note="Description of Artificial Sequence: Synthetic coding sequence"
  source 1..2415: mol_type = other DNA
atgtcgagctcatcatggctactgttatctcttgtcgccgtgaccgctgcccagtcgaccattgaggaacaggctaagacatttctggacaaatttaaccacgaggcggaggatttattctaccagtccagcttggcaagctggaactataataccaatattaccgaggaaaacgtgcaaaacatgaacaacgcgggtgacaagtggagcgcattccttaaagaacagagcaccctggctcaaatgtatccacttcaggaaatacagaacttgactgtgaaactgcagcttcaggcacttcagcagaacgggagttccgtcctttccgaagataagtcaaagcggctaaacactatactcaataccatgtccacaatatactctaccggtaaggtgtgtaaccctgataatccgcaagagtgtctgttacttgagcctggactgaatgagattatggccaattccctggactacaacgaacgactctgggcctgggagtcttggcggagtgaggtcggcaaacagcttcgcccgctgtacgaggagtatgtagtcttaaaaaatgagatggcccgggccaaccactacgaagattacggtgactattggcggggcgattacgaagtcaatggtgtggatggatacgattattcgcgcggccagctgattgaggacgtggagcacacattcgaggaaataaagcctttgtacgaacaccttcacgcgtacgtccgagctaagctaatgaatgcctatccgtcctatatctcgcccattggctgcctcccagcccacctgcttggcgatatgtgggggagattctggaccaacctatattcactgactgtcccatttggccagaaacctaacattgatgtaactgatgccatggtggatcaggcctgggatgctcaacgcatattcaaagaggcagagaaattttttgtatcggtgggcttgcccaatatgacccagggcttttgggagaattctatgctaacagatccagggaatgtacagaaggctgtgtgccaccccaccgcctgggacctcggtaagggggattttcgtatcttgatgtgcaccaaggttacaatggatgacttcctgactgcacaccatgagatgggacacatccaatatgacatggcctatgcagcccagccatttctgttacggaatggagcaaatgaaggtttccatgaagccgtaggcgagatcatgtctcttagcgctgcgacacctaaacacctcaaatctatcggcctactttccccggatttccaagaggataatgagaccgagattaacttcctgcttaagcaagctcttaccatcgttggaactctgccctttacttatatgctcgagaagtggagatggatggtgtttaagggcgaaattcccaaggatcaatggatgaaaaagtggtgggagatgaaacgagaaatagtcggagtggtcgagcccgtacctcatgatgaaacctactgcgatcctgcgagcctgtttcacgtatcgaatgattactccttcatcaggtattataccagaacgctgtaccagtttcagtttcaagaggccctctgccaggctgctaagcacgagggacccctgcacaagtgcgatatcagcaattccactgaggctggacaaaaactctttaatatgctcaggctgggaaaaagtgagccatggaccctagcgctagaaaatgtggtgggtgctaagaacatgaacgtccggcctctcctaaattactttgagcccctgttcacctggcttaaggaccaaaacaaaaacagcttcgttggctggtcgacagattggtccccctatgcggatcagagcatcaaagtccggatttcgctgaagagcgctctcggggacaaggcctacgaatggaacgacaacgaaatgtatctatttcggagcagtgtcgcctacgcaatgcgtcagtacttcctgaaagtgaagaaccagatgattctatttggagaagaggacgtgagagtcgccaacctgaagccccgaatctccttcaacttctttgtgacggccccaaagaacgtctccgacatcatcccaaggacagaagtggagaaagccattcggatgtctagatcccgaattaatgatgcatttcgactcaacgacaatagtcttgaattcctggggattcaaccaaccctgggccctcccaaccaaccgccagtttccatctggctgattgtgtttggcgtggttatgggcgtcatcgtcgtgggcatagttatcttgatttttactggcatacgcgatagaaaaaaaaagaataaggctcggagtggagaaaatccttacgcctctatcgacatcagtaaaggggagaacaaccctggatttcagaacactgatgacgtacaaacctccttc

SEQ ID NO: 6242 - DNA, 2415 bp, synthetic construct
  misc_feature 1..2415: note = source = /note="Description of Artificial Sequence: Synthetic coding sequence"
  source 1..2415: mol_type = other DNA
atgtcatcctccagttggctgcttctatcgttggtcgcggttactgcagcccagtcgacaatagaggagcaggccaagacgtttctggataagtttaatcacgaggctgaggacctgttttatcagtcctcgttagcgagttggaactacaacactaacatcacagaggaaaacgtgcagaacatgaacaacgctggtgacaaatggtccgcgttcctcaaggagcaatcaacccttgcccagatgtacccgctccaggaaattcaaaacctcactgtgaaactccaactgcaagccctgcaacagaatgggagctcggtgttgtcggaggacaagagcaagcgcttgaacacaatactgaacaccatgtcaactatctactcaacgggtaaagtgtgtaacccagacaacccccaggagtgcctgctgttggagcccggcctcaacgagatcatggccaactccctggattacaatgaacgcctgtgggcgtgggagagctggaggtccgaggtgggcaagcaactgagaccgctgtatgaggaatacgtagtgttaaagaatgagatggcccgggccaaccactacgaagactacggcgactattggagaggagactatgaggtcaacggcgtggacggctatgactactcgcgaggccagctgattgaagacgtcgaacacacttttgaggaaatcaagccgctttacgagcatctacatgcctatgtccgagcaaagctaatgaatgcgtaccccagttatatctcgccgattggctgccttcccgcccatctactcggagatatgtggggccgtttttggacgaatctgtattcccttacggtcccctttgggcagaagccgaatatcgatgtgaccgacgcaatggtggatcaagcctgggatgcccagcgaatctttaaagaggcagagaaattctttgtttccgtgggactgccgaacatgacccaaggtttctgggagaatagtatgctgaccgatcctggaaacgttcaaaaggcggtatgccaccctacagcctgggacttgggcaagggcgacttccggatccttatgtgcacgaaagtcacaatggatgacttcctgacagctcaccacgagatggggcacatccagtacgatatggcgtacgctgcccaaccgttcttgctgcgcaacggcgcaaatgagggcttccatgaggccgtgggtgagattatgtccctgtccgcggccaccccgaagcatctcaagagcataggcctcctctcgcccgactttcaggaggataacgaaactgaaataaacttccttctgaagcaggccctaactatcgttggcactctaccctttacttatatgttggagaagtggagatggatggtgtttaaaggagagataccaaaggaccaatggatgaagaagtggtgggagatgaagagagagatcgtgggagtcgtagagccagttccgcatgacgaaacttattgcgacccagctagcctgttccacgtcagcaatgactattcgttcatccggtattatacgcgcacgttgtaccagttccagtttcaggaagccctgtgccaggccgccaagcatgagggtccgctccacaagtgcgatatatcgaacagtacggaggccggccaaaagcttttcaacatgctacgcctcggtaagagtgagccgtggacactcgcactagaaaacgttgtgggagcaaaaaacatgaatgtcagacctctcctgaactattttgagccgttgttcacctggctgaaggatcaaaacaagaactccttcgtgggctggtcaacggactggtccccctatgctgaccaaagtatcaaggtgcgcattagcctaaagtcggccctgggtgacaaggcatacgagtggaatgataatgagatgtacctgttccggagctccgttgcctacgccatgaggcaatattttctcaaggtaaagaatcagatgatattgttcggcgaggaagatgtgagggttgctaacctgaagccgcgtatttcattcaacttcttcgtcaccgccccaaaaaacgtttctgacattatcccacgcacggaagtggaaaaggctatccgaatgagccgtagcaggatcaatgatgcatttcgactgaacgataatagtctggaattcctgggcatacagccaacgttggggccccccaaccagccacccgtgtccatttggctgattgtgtttggcgtggtaatgggagtgatcgtggtcggcatcgtcatcctgatttttacaggaatccgggaccgaaaaaagaagaacaaggccaggagcggtgaaaacccgtatgccagcattgatataagcaaaggcgagaataatccaggttttcagaacactgatgatgtgcagacctcgttc

SEQ ID NO: 6243 - DNA, 2415 bp, synthetic construct
  misc_feature 1..2415: note = source = /note="Description of Artificial Sequence: Synthetic coding sequence"
  source 1..2415: mol_type = other DNA
atgtcctccagcagctggctgctgttgagcctggtagctgtcaccgcagctcagtctacgattgaagagcaggctaagacctttctagataagttcaatcatgaggctgaggacctcttctaccagtcctccctggcttcatggaactacaataccaacataactgaagaaaatgtgcagaacatgaacaacgcaggagataagtggtccgcctttctgaaagagcagagtaccctggcacagatgtacccactccaagaaattcaaaacttgactgtgaagctccaacttcaggccttgcagcagaatggatcgtctgtgctttcagaagacaaatccaagcgacttaacaccatactcaatactatgtccaccatctacagcaccggcaaggtttgtaatcctgataacccacaagagtgtttactgctggaacccgggttaaacgaaatcatggcaaactctctcgactacaatgagcgactctgggcttgggaatcgtggcgcagcgaggtagggaaacagctgcgaccgctgtatgaggaatatgtggtgttgaagaatgaaatggcaagggccaaccactatgaagactacggcgattactggaggggtgattacgaggtgaatggcgtcgatggctacgactatagtcgcgggcagttaattgaggatgtggaacataccttcgaggagatcaagcccctatatgaacacctgcatgcatacgtgagagcaaagttaatgaacgcatatccttcatacatctccccaatcggatgcctgcctgctcacctgctcggggacatgtggggccggttctggaccaacctctacagcctgaccgtgccctttggccagaagcctaatattgacgtgactgatgcaatggtggatcaggcctgggatgcgcagcgaatttttaaagaagctgagaagttcttcgtgtccgtcggcctaccaaatatgactcaaggcttctgggagaattctatgctaactgatcctggtaatgtccagaaggcagtgtgccatccgacagcatgggatctagggaagggcgacttccgaattctaatgtgtaccaaagtgactatggatgactttctgaccgcccaccacgagatggggcatatccaatatgatatggcctacgcggcccagcctttcttgctgcgtaatggagccaacgaaggctttcacgaagccgtcggggaaattatgtccctcagcgccgctactcctaaacatctcaagtctatcgggctgttatccccagacttccaggaggacaacgaaacggagataaactttctattgaagcaagcgctcactattgtcggtaccctaccgttcacctatatgctcgagaagtggaggtggatggtgtttaagggcgagatccccaaagaccagtggatgaagaagtggtgggaaatgaagagggaaatagtgggcgtagtggaacctgtgccacatgatgaaacttactgcgatccagctagtctgtttcacgtgtccaacgactatagtttcatcaggtattatacaaggaccttataccagtttcagttccaggaggccctgtgtcaggccgctaagcacgaggggcctcttcataaatgtgacatttcaaactccactgaagcagggcaaaagctgtttaatatgctcagacttgggaaaagtgagccctggaccctcgctcttgaaaacgtggttggtgcaaagaacatgaacgtacgaccactgttaaattatttcgagccactttttacctggctgaaggatcagaacaagaactcatttgttggctggagtaccgattggagcccttacgccgaccagagtatcaaggtacggatttctctgaagagtgcgctcggcgataaagcttacgaatggaacgacaatgaaatgtatctcttccggtcctctgttgcctacgctatgaggcagtacttcctaaaagtgaagaatcagatgatcctgtttggagaagaggacgtgcgagtggccaatctgaagccacgaattagctttaattttttcgtaacagcgcccaaaaacgtaagcgatatcatacctcgaactgaggtggaaaaagcaatacgaatgagtagatctagaatcaacgacgcatttcgattgaatgataacagcctcgagttcttaggcatccagccaacgcttggcccgccaaatcagcctcctgtttcaatttggctcatcgtctttggggtggtgatgggcgttattgtcgttggcattgtgatattaatcttcaccgggattagagacagaaagaagaagaacaaggcaagaagtggggagaacccctatgccagtatcgacatttcaaagggtgaaaataatcccggctttcagaatactgatgacgtgcaaacgagcttt

SEQ ID NO: 6244 - DNA, 2415 bp, synthetic construct
  misc_feature 1..2415: note = source = /note="Description of Artificial Sequence: Synthetic coding sequence"
  source 1..2415: mol_type = other DNA
atgtcgagttccagctggctccttctttcactcgtggcagtgaccgcagcacaatctactatcgaagaacaagcaaagacctttcttgataagttcaaccatgaagcagaagatttgttttaccaaagcagcctggcatcttggaattacaacaccaacatcacggaagagaatgtgcagaacatgaacaatgccggagacaagtggtccgcatttcttaaggaacaaagcaccctcgcgcagatgtacccactgcaggaaatccagaatcttactgtgaaactgcaacttcaggcgctgcagcagaacgggtcgagcgtgctctccgaggataaatcgaagcgtcttaataccattctcaacactatgagcaccatttacagcaccgggaaagtgtgtaaccccgataacccccaagagtgcctgctgcttgaacctgggcttaatgagataatggcaaactcactggattacaatgaaaggctttgggcttgggaatcatggagatcagaagtgggaaaacagcttagaccactttacgaagaatacgtggtgctgaaaaatgagatggccagggccaaccattacgaagattacggcgactactggcggggggactacgaggttaatggggtggatggatacgattattcacggggtcagctgattgaagatgtggagcacacttttgaagagatcaagccactgtacgagcatctgcatgcatatgtgcgagcgaaactcatgaacgcctacccaagctacatttcccccattggatgtctccccgcccatctgctgggcgatatgtggggcagattttggactaacctttactccctgaccgtgcctttcggtcagaagcctaacattgatgtgaccgatgcaatggtggatcaggcttgggatgcacaacgcattttcaaagaagccgagaagttttttgtctccgtcgggttgcctaacatgacccaaggattttgggaaaattcaatgttgacggaccctggaaacgtgcagaaggcagtgtgccacccaactgcctgggatctgggaaaaggtgactttagaattctgatgtgcactaaagtgactatggatgattttctgactgcacatcatgaaatgggtcacattcaatacgacatggcatacgctgctcaaccatttctcctgcgtaatggagcaaacgaaggctttcacgaggcagtcggtgaaatcatgtccctgtcagcagcaactcctaagcatctgaagtcgattggccttctgagccctgattttcaagaagataatgaaactgagatcaactttctgcttaaacaggctcttaccattgtggggactcttcctttcacctatatgttggaaaagtggcgctggatggtctttaagggcgagattccaaaggaccaatggatgaagaagtggtgggagatgaaaagggaaatcgtaggtgtggtcgaacctgtgccacacgacgaaacctactgcgaccccgcctccctgttccatgtgtcaaacgattatagctttattcgctactatactagaactctgtaccaatttcaatttcaggaggcactgtgtcaagcggcaaaacacgaaggtcctctccataaatgtgatatttcgaactcaactgaagctggccagaagctgtttaacatgcttagactggggaaaagcgaaccttggaccctcgccctggaaaatgtggttggcgcaaaaaacatgaacgtgcgcccccttctcaattactttgaacctctgtttacttggttgaaggatcagaacaagaattcatttgtgggttggagcaccgactggtccccctacgcagatcagagcatcaaggtgcgaatttcgttgaagtccgcactcggtgacaaagcatacgagtggaatgacaatgaaatgtacttgtttaggtcctccgtggcatacgcaatgaggcaatactttctcaaagtcaagaaccagatgatactttttggtgaagaagatgtcagagtggcgaaccttaaacccagaatctcatttaacttctttgtcactgcaccaaagaatgtgtctgatatcattcctcgcactgaagtggaaaaagcaataagaatgtcgaggtcccgcattaacgatgcatttcggctgaacgataattcgctggaatttctcggtattcagcctactctgggtccccctaatcagccaccagtgagcatttggctgatagtctttggcgtggtcatgggagtcatcgtcgtcgggatcgtcatcttgattttcacgggaatccgagatcgcaagaagaaaaacaaagcgagatccggtgaaaacccgtatgcgtccattgacatcagcaagggagagaacaacccaggattccaaaacactgatgatgtgcagactagcttc

SEQ ID NO: 6245 - DNA, 2415 bp, synthetic construct
  misc_feature 1..2415: note = source = /note="Description of Artificial Sequence: Synthetic coding sequence"
  source 1..2415: mol_type = other DNA
atgtcctcttccagttggctcctgctctcactggttgcagtgacagccgcccagtctacaatcgaggagcaagccaaaactttcctggacaagtttaaccacgaggctgaggacctgttctatcagtcaagtttggcatcttggaactataatacgaatatcacagaggaaaatgtccagaacatgaataatgcaggtgataagtggtcagcatttttgaaagagcagtcaacccttgcccagatgtaccctctgcaggagattcaaaacttgactgtaaaattgcagcttcaagctctgcagcagaacgggagctcagttctgtccgaggataaatcaaagagactgaacaccattttgaacaccatgtccaccatttattccacgggcaaagtgtgtaacccggacaatccccaggaatgtcttctccttgagccaggtctgaacgaaatcatggctaatagcctggactacaacgagaggctgtgggcatgggagtcttggcggtctgaggtaggtaagcagttgcggcccctgtatgaggaatatgtggttctcaaaaacgaaatggcgcgggccaaccattacgaagattacggtgattactggcgcggagactatgaggtcaacggtgtcgatgggtatgattacagcaggggacagctcatcgaggacgtcgaacatacttttgaggaaataaagcccctgtacgagcacttgcacgcatacgtgcgggctaaactgatgaacgcctacccatcatacatctccccgattgggtgcctccctgcccacctgctgggtgacatgtggggaaggttctggaccaacctgtactctttgacagtcccctttgggcagaaacccaacatagatgtgacggacgccatggtggatcaggcctgggatgctcagcggatcttcaaagaggccgaaaaattcttcgtctctgtcggcctccccaatatgacacagggattctgggagaacagtatgctgactgatcccggtaatgtgcagaaggcagtgtgccaccctaccgcctgggatctgggcaaaggagacttccggattctgatgtgcactaaggtgacgatggatgacttcttgaccgctcatcacgaaatgggccatatccagtatgacatggcatatgccgcacaaccattcctgctgagaaatggagccaacgagggctttcacgaagctgttggggaaattatgtctctgtccgcagctacacctaaacatctgaaatccatcgggctcctttcacccgactttcaggaggacaatgaaaccgagatcaatttcctgttgaagcaggctctgaccattgtggggacgttgcccttcacatacatgttggagaagtggagatggatggtgtttaaaggggaaatcccaaaggatcagtggatgaaaaaatggtgggagatgaaacgcgaaattgtcggcgttgttgaaccagtgcctcatgacgagacctattgtgatccggcaagcctctttcatgtcagcaacgactacagtttcatccgatactacaccaggactctgtaccagtttcaattccaggaagctctgtgccaggctgccaagcatgaaggccccctgcataagtgtgacatatcaaacagcactgaagccggtcagaaactgtttaacatgctccgattggggaaaagcgagccttggacattggcactggagaatgtcgtcggggcgaagaacatgaacgttaggccacttctcaattattttgagcccctgtttacatggctgaaggatcaaaacaagaattcttttgttggatggtccaccgactggtctccctacgcagaccaatctatcaaggtccgaatatctcttaaatcagctctcggcgataaagcatatgagtggaacgataacgaaatgtatttgttcagatcctccgttgcctatgccatgcgacagtactttttgaaggtaaagaaccagatgatactgtttggtgaggaggatgtgagggtagccaacctgaagccgaggatttctttcaacttttttgtcactgctcccaagaacgtctcagacattatccctagaacggaagtcgagaaagcgattcgcatgtcccgctcacggattaatgatgcattccgcctgaatgataatagtttggaatttttggggatccagccaaccctgggccctccaaatcagccgcctgtctccatctggctgattgtctttggcgtcgtcatgggcgtaattgtagtgggcatcgtgatcctcatctttactgggatccgcgatcggaagaagaaaaacaaggcgaggagcggggaaaatccttatgcatcaatcgatatctccaagggcgaaaataatccaggctttcagaatacggacgacgtacagacaagcttc

SEQ ID NO: 6246 - DNA, 2415 bp, synthetic construct
  misc_feature 1..2415: note = source = /note="Description of Artificial Sequence: Synthetic coding sequence"
  source 1..2415: mol_type = other DNA
atgtcctcgagctcctggctgctcctcagccttgttgcagtcaccgctgcccagtcgactatcgaagaacaggcgaaaactttcttggacaagtttaatcatgaggccgaggatctcttctaccagagctcactggcttcatggaattacaacaccaacattactgaagaaaacgtgcaaaacatgaacaacgcgggtgacaagtggtccgcattcttgaaggagcagtcgacccttgcacagatgtacccgctgcaggaaatccagaatctcaccgtcaaattgcaactgcaggccctgcaacagaacggctcgtcagtcctctccgaggacaaatctaagaggctgaacacgatcctgaacacgatgagcactatttacagcaccggaaaagtgtgcaatccggacaatccacaggaatgcctcctcctggaaccgggactgaatgaaatcatggcgaactctctcgattacaacgagagactctgggcatgggaatcatggcggtccgaggtgggaaagcagttgaggcctctgtacgaagaatacgtggtcctcaagaatgaaatggccagagctaatcactacgaagattacggagactactggcgcggagactacgaagtgaacggggtcgatggatacgactacagccgcggtcaactgatagaggacgtggaacacactttcgaagaaatcaaaccactgtacgaacacctgcacgcctacgtgcgcgccaaactcatgaacgcctacccaagctacatttcgccgatcggatgccttcctgcccacttgctgggagatatgtggggacggttctggactaacctgtactcgcttaccgtccctttcggtcagaaacctaatatcgacgtgactgatgccatggtcgatcaggcctgggatgcccagcggatcttcaaggaggccgaaaagttctttgtcagcgttggactcccaaatatgacgcaggggttctgggaaaactcaatgcttactgatccggggaatgtgcagaaagctgtctgtcacccgactgcatgggacttgggaaagggcgatttccgcatcctgatgtgtaccaaggtgaccatggatgacttcctgactgcccaccatgagatgggtcatatccaatacgacatggcgtacgccgcgcaaccattcttgctccgcaacggagctaacgagggatttcacgaggcagtgggagaaatcatgtccctttccgccgccacccctaagcatctgaagtcgatcggactgctcagcccggatttccaagaggataacgaaaccgagatcaacttcctcctgaagcaagcgctgactattgtgggtaccctgccattcacctacatgctcgagaaatggcggtggatggtctttaaaggagaaatccctaaggaccagtggatgaagaagtggtgggaaatgaaacgagagatcgtgggagtagtggaacccgtgccgcacgacgaaacctactgcgacccggcttcactgtttcatgtgtcgaacgactacagcttcatcagatactacactcgcactctctaccaattccagttccaggaagccctgtgccaggccgcgaagcacgagggacccctgcacaagtgcgatatctccaactccactgaagcaggacagaaactgttcaacatgctgcgcttgggaaaaagtgagccgtggactctggctcttgagaatgtggtgggagcgaagaacatgaacgtccgccctcttctgaactacttcgaacctctcttcacctggttgaaggaccagaataagaactcgttcgtcggctggtctactgactggagcccatacgcggatcagtcaatcaaagtgagaatctcccttaagtccgcgctgggggataaggcttatgagtggaacgataatgaaatgtacctgtttcggtcgtcagtggcttacgccatgaggcagtatttcctgaaggttaagaaccagatgatcctgttcggagaagaggacgttcgggttgccaaccttaaaccgcgcatctcctttaacttcttcgtgactgcaccgaaaaacgtctcggacatcattccgcgcaccgaagtggaaaaggcgatccgcatgagccgctcgcgcatcaatgacgcgttcagactgaacgataactccttggaatttctggggatccagccgaccctgggaccgcccaatcaaccgcctgtgtccatctggttgattgtgttcggcgtggtgatgggagtgattgtcgttggcatagtgatcctgatctttaccggcatccgggatcgaaagaagaagaacaaggcacggtccggtgaaaacccctacgcgtccatcgatattagcaaaggcgaaaacaacccagggttccagaacacggacgatgtgcaaacctccttc

SEQ ID NO: 6247 - DNA, 2415 bp, synthetic construct
  misc_feature 1..2415: note = source = /note="Description of Artificial Sequence: Synthetic coding sequence"
  source 1..2415: mol_type = other DNA
atgtcatcatcctcatggctcctgctgtccctggtagccgtaacagcagctcagagcactattgaagaacaggcaaaaacttttcttgacaaatttaaccacgaagcagaagatctgttctaccagtcgagtctcgcctcgtggaattacaacaccaacattacagaggaaaacgtccagaacatgaacaatgctggggataaatggtccgccttcctgaaagaacaatccactctggctcaaatgtaccctctccaggagatccagaacctgacagttaagctgcagctccaggccctgcagcagaatggttcgtcagtcttgtctgaggataaatctaagaggctcaatacaatcttaaacaccatgtccactatttactcaaccggtaaagtgtgcaacccagacaatcctcaagagtgccttttgctcgaacccgggctcaacgagattatggcaaactctctggactacaatgaaagactgtgggcatgggagtcttggcggagcgaagtaggaaagcagctgcggcctctgtacgaggagtacgtggttcttaagaacgagatggctcgtgccaatcattacgaagactacggagattattggcgtggggattacgaagtgaatggagtcgacggttacgactattctagggggcagctgatcgaggacgtagaacatacatttgaggaaatcaagcccttgtacgagcatcttcacgcgtacgtgagggcaaaattgatgaacgcttaccctagttatatcagccctattggttgtttgccggctcacctgctcggggatatgtggggcaggttctggaccaatttgtactcattaacagtgcccttcgggcagaagcctaatatcgacgttaccgacgccatggtagatcaggcatgggatgcacaaaggatcttcaaagaagcagagaagttctttgtgagtgtagggctacccaacatgacccaggggttttgggagaactcaatgctgaccgaccccggcaacgtgcagaaggctgtgtgtcaccctactgcatgggacctgggaaagggtgacttcaggatactgatgtgtacaaaggtcacgatggacgattttctgactgctcatcacgaaatgggacacattcagtatgacatggcatatgccgcccagcccttcttgcttcgcaatggagctaatgaaggatttcacgaggctgtcggggaaattatgagcttgagcgcggctaccccaaagcatctgaagtccatcggcctgttgagccccgacttccaggaggacaacgaaacagaaatcaactttctgctgaagcaggcccttacaattgtagggacactccctttcacatatatgctggaaaaatggaggtggatggtgtttaagggggagattcccaaggatcagtggatgaagaaatggtgggagatgaagcgagagatcgtgggggtggtcgaacccgtgcctcacgacgagacctattgcgatccagcctcgctcttccatgtgagtaatgactattcttttattagatattacacgcgaactctctatcaatttcaatttcaagaggctctctgccaggcagcgaagcacgaaggacccctgcataagtgcgacattagtaactccacagaggcaggccaaaaactgttcaacatgctcagactggggaagtcagaaccctggactctcgcattggagaacgtcgtaggggcgaagaatatgaacgttaggcctttgttaaattacttcgaaccactctttacgtggctgaaagatcagaacaagaattctttcgttggctggtcgaccgattggtccccctatgcagaccaatcaattaaagtacgtatttccctcaagagtgctttgggggacaaggcctacgaatggaacgacaatgagatgtatctgttccggagttccgttgcttacgccatgcgtcagtactttctaaaagtaaagaaccagatgatcttatttggggaggaagatgtgagagtcgctaatctgaagcctagaataagctttaacttcttcgtgaccgcgccaaaaaatgtgagcgacataattccccgaactgaggtcgaaaaggctattcgcatgagcagatcccggatcaatgatgcgtttcggctgaatgataatagcctggagttcctcggcattcagccaactctgggccctcctaatcagcccccagtgagcatttggctcattgtgtttggcgttgtgatgggggtgatcgtggtgggaatcgtgattttgatcttcaccggcatacgcgataggaagaagaaaaataaggcacgaagtggcgagaacccgtatgcatcaattgatatcagtaaaggcgaaaacaaccccggattccaaaataccgatgacgtgcagacatcattc

SEQ ID NO: 6248 - DNA, 2415 bp, synthetic construct
  misc_feature 1..2415: note = source = /note="Description of Artificial Sequence: Synthetic coding sequence"
  source 1..2415: mol_type = other DNA
atgagtagttcctcttggttattgctcagtctggtggctgtcaccgcagcccagtccacaattgaggagcaggccaagacattccttgacaagtttaaccacgaagcggaggacttgttttaccagtcttctctggcgtcctggaattataacacaaacatcactgaagagaacgtgcagaatatgaataacgccggcgataaatggagcgcattcctgaaagagcagtcgactctcgcccaaatgtatcccctgcaggagatccagaatctgacggtaaagctccagctgcaggccctgcagcagaacggctccagtgtgctgagcgaggacaagagcaagcgcctcaacacaatcctaaacaccatgtctaccatatattccacgggcaaggtgtgtaacccggataacccacaggagtgccttttgcttgaaccagggttaaatgaaatcatggctaacagtctcgattacaatgagaggttgtgggcctgggaatcgtggcgatccgaagtcggaaagcaactgaggccgctgtatgaagagtacgtcgtgctcaaaaatgagatggctagagccaaccactatgaagattatggagactattggcggggtgactacgaggtcaacggtgtggatggttacgactactcccgcgggcagctgatagaagacgtggaacatactttcgaggagatcaaacccctgtatgagcacctgcatgcctatgtccgcgccaaactcatgaacgcctacccatcctatatcagtccgattggctgtcttcctgcgcacctcctaggcgatatgtgggggagattctggactaacctgtactctctgaccgtgccctttggtcagaaacccaatatcgatgtaaccgacgctatggtcgatcaggcgtgggatgcgcagagaatttttaaagaagcagaaaagttcttcgtgagcgtcggactaccaaatatgacccaaggattctgggagaatagcatgttaaccgatcccggcaacgtgcagaaggcagtttgtcaccccaccgcttgggacctgggcaagggggactttcgtatattgatgtgcacgaaagtgaccatggatgacttcctgacagcccaccacgagatgggtcacatccaatacgatatggcctacgccgctcagccgtttcttctcagaaatggggctaatgagggctttcacgaggctgtgggggagatcatgagtttgtcagcagctacccccaaacatctaaagtcgatagggctgctctctcctgactttcaagaggacaacgagactgagattaatttcttactaaagcaagctctcaccatcgtgggaacgctccctttcacctatatgctggagaagtggcgatggatggtgtttaaaggcgagattccaaaagatcagtggatgaagaagtggtgggaaatgaagagagagattgttggcgtggttgagccagtcccgcacgatgagacctattgcgaccccgcatctctgtttcacgtgtcaaatgattactcctttatcaggtactatacacgaaccctatatcagttccagttccaagaggccctctgtcaggccgcaaagcatgaagggcctctgcataagtgtgacatcagcaacagcacagaggcaggacagaagctgttcaacatgctcagactgggaaaatcagaaccatggactctggcactcgaaaacgttgtcggtgcaaagaatatgaatgtccgcccccttcttaattattttgagcctctatttacatggttaaaggatcagaacaaaaactctttcgtggggtggtcaacggactggtcgccctatgcagatcagtcaattaaggttcgcattagtctgaagtcggctttaggagacaaggcatacgagtggaacgacaacgaaatgtatctttttaggagttcggttgcgtacgcgatgcgtcagtattttctaaaggtgaagaatcagatgattttgtttggggaggaagatgttagggtggctaatctgaagcccaggatctctttcaactttttcgtaacagccccaaaaaacgtgtctgatataatacccaggacggaggtcgaaaaagcaatccggatgtcccgcagccgtatcaatgatgcctttcggcttaatgacaattccctcgaatttctcgggatccagccaactctggggccccccaaccagcctcccgtgagtatctggctgatcgtctttggagtcgtgatgggtgtcatcgtggtcggcattgtgatcctcatctttactgggatccgagacaggaagaagaagaataaggctcgctctggagagaacccgtacgcctccattgatatatccaaaggggaaaataaccctggttttcagaacacggatgatgtgcaaacttccttt

SEQ ID NO: 6249 - DNA, 2415 bp, synthetic construct
  misc_feature 1..2415: note = source = /note="Description of Artificial Sequence: Synthetic coding sequence"
  source 1..2415: mol_type = other DNA
atgtcaagtagcagttggttgctgctttcactggtagctgtgactgcagcccaatcaactattgaagagcaggcaaagaccttcctggacaagttcaatcacgaagccgaagatctgttctaccagagctcattggcctcttggaattacaacaccaatataaccgaagaaaacgtgcagaacatgaataacgctggtgacaagtggagtgccttccttaaggagcagagtacactggcccaaatgtacccgctgcaagaaatccagaacctgacagtaaaattgcagctgcaggctctccaacaaaatggatcatcagtccttagtgaggataagtccaaacgcctcaacacgatcttgaacacaatgtcaacaatctactctacgggtaaagtctgcaaccctgacaacccccaggagtgtctcctgttggaacccggcctgaacgaaatcatggccaacagcctcgattataacgaaagattgtgggcttgggaaagctggcgcagcgaggttggaaagcagctcaggccactttatgaagaatacgtggtgctgaaaaacgaaatggccagggctaaccactacgaagactacggagattattggcgcggcgactatgaagtgaatggtgttgacggctatgattactccaggggccagttgatcgaggatgttgaacataccttcgaggagattaagccattgtacgaacatctgcacgcctacgttcgcgcaaagttgatgaatgcatatccgagttacatctctcccatcggatgcttgcctgcccatcttttgggagacatgtggggtcgcttctggactaatctgtactccctcactgttcccttcggacaaaagccaaacatcgacgtcaccgatgctatggtggaccaagcttgggacgcacagaggatcttcaaggaggccgagaaatttttcgtgtcagtgggcctgccaaatatgactcagggattttgggagaactcaatgcttacagatcctggcaatgtgcagaaagctgtttgtcaccccactgcttgggacctcggtaagggagactttcgcattctgatgtgcacgaaggttacgatggacgatttcctgaccgcgcatcacgaaatgggacacatccaatacgatatggcctacgccgcccaaccatttcttctcagaaacggcgccaacgaaggctttcacgaggcagtgggcgaaattatgtcactttccgctgctacccccaaacacctgaagagtattggactgctcagtcccgacttccaggaagataatgagaccgagatcaacttcttgctcaaacaggccttgacgatcgtgggaaccctcccatttacctacatgttggagaagtggaggtggatggtcttcaagggcgagatccctaaagaccagtggatgaaaaagtggtgggagatgaaaagggaaatcgtgggagtcgtggagcccgttccacatgatgagacgtattgcgatcccgcctctctctttcacgttagcaacgactatagcttcatcaggtactatactagaaccctgtaccagttccagtttcaggaggccctgtgtcaggccgctaagcatgaaggacccctgcacaaatgcgatatctctaatagcacggaagccggccagaagttgttcaacatgctgagactgggcaagtcagagccctggactctggctctggagaacgtggtcggtgccaagaacatgaacgtacgccccctcctgaactacttcgagccactttttacatggctgaaggatcagaacaaaaattccttcgtgggatggtcaacagattggagcccatacgccgatcagtccattaaggtgaggatctctctcaaaagtgccctcggtgacaaagcctacgagtggaacgacaatgagatgtatctgttccgcagttcagtagcttatgccatgaggcaatatttcctcaaagttaagaatcagatgatactctttggcgaggaggatgtgcgcgtagccaacctgaaacctcgcatatcattcaatttcttcgtaacagcgccgaagaatgtctcagatatcataccaagaactgaagttgaaaaagctataaggatgtctaggtccagaatcaacgatgcttttaggctgaacgacaacagcctggaattcctgggaattcagcctactctcggccctcctaaccaacccccagtgagcatctggttgattgtgttcggagtggtaatgggtgtgatcgtggtgggcattgtcattcttatcttcacaggaattagggatagaaagaagaagaacaaggctagatccggcgaaaacccctatgctagtatagacatatccaagggtgagaataatcctggcttccagaatacagacgatgtgcagacatctttt

SEQ ID NO: 6250 - DNA, 2415 bp, synthetic construct
  misc_feature 1..2415: note = source = /note="Description of Artificial Sequence: Synthetic coding sequence"
  source 1..2415: mol_type = other DNA
atgtcgtcgtcgtcgtggttattactatcgttagttgcggttacggcggcgcaatcgacgatagaagaacaagcgaaaacgtttctagataaatttaatcatgaagcggaagatttattttatcaatcgtcgttagcgtcgtggaattataatacgaatataacggaagaaaatgttcaaaatatgaataatgcgggtgataaatggtcggcgtttctaaaagaacaatcgacgctagcgcaaatgtatccgctacaagaaatacaaaatttaacggttaaattacaactacaagcgttacaacaaaatggttcgtcggttctatcggaagataaatcgaaacgattaaatacgatattaaatacgatgtcgacgatatattcgacgggtaaagtatgtaatccggataatccgcaagaatgtctattattagaaccgggtctaaatgaaataatggcgaattcgttagattataatgaacgattatgggcgtgggaatcgtggcgatcggaagttggtaaacaactacgaccgctatatgaagaatatgttgttctaaaaaatgaaatggcgcgagcgaatcattatgaagattatggtgattattggcgaggtgattatgaagttaatggtgttgatggttatgattattcgcgaggtcaactaatagaagatgtagaacatacgtttgaagaaataaaaccgttatatgaacatttacatgcgtatgtacgtgcgaaattaatgaatgcgtatccgtcgtatatatcgccgataggttgtttaccggcgcatttactaggtgatatgtggggtcgattttggacgaatctatattcgctaacggtaccgtttggtcaaaaaccgaatatagatgttacggatgcgatggtagatcaagcgtgggatgcgcaacgaatatttaaagaagcggaaaaattttttgtttcggtaggtttaccgaatatgacgcaaggtttttgggaaaattcgatgttaacggatccgggtaatgttcaaaaagcggtatgtcatccgacggcgtgggatctaggtaaaggtgattttcgtatactaatgtgtacgaaagtaacgatggatgattttttaacggcgcatcatgaaatgggtcatatacaatatgatatggcgtatgcggcgcaaccgtttctactacgaaatggtgcgaatgaaggttttcatgaagcggttggtgaaataatgtcgctatcggcggcgacgccgaaacatctaaaatcgataggtttactatcgccggattttcaagaagataatgaaacggaaataaattttttactaaaacaagcgttaacgatagtaggtacgctaccgtttacgtatatgttagaaaaatggcgttggatggtatttaaaggtgaaataccgaaagatcaatggatgaaaaaatggtgggaaatgaaacgtgaaatagtaggtgttgtagaaccggtaccgcatgatgaaacgtattgtgatccggcgtcgttatttcatgtatcgaatgattattcgtttatacgttattatacgcgaacgctatatcaatttcaatttcaagaagcgctatgtcaagcggcgaaacatgaaggtccgttacataaatgtgatatatcgaattcgacggaagcgggtcaaaaactatttaatatgttacgtctaggtaaatcggaaccgtggacgctagcgctagaaaatgtagtaggtgcgaaaaatatgaatgttcgtccgctattaaattattttgaaccgctatttacgtggttaaaagatcaaaataaaaattcgtttgtaggttggtcgacggattggtcgccgtatgcggatcaatcgataaaagtacgtatatcgctaaaatcggcgctaggtgataaagcgtatgaatggaatgataatgaaatgtatttatttcgatcgtcggtagcgtatgcgatgcgacaatattttttaaaagtaaaaaatcaaatgatactatttggtgaagaagatgtacgtgtagcgaatttaaaaccgcgaatatcgtttaatttttttgtaacggcgccgaaaaatgtttcggatataataccgcgtacggaagttgaaaaagcgatacgtatgtcgcgttcgcgaataaatgatgcgtttcgtctaaatgataattcgttagaatttctaggtatacaaccgacgttaggtccgccgaatcaaccgccggtatcgatatggctaatagtatttggtgtagtaatgggtgtaatagtagtaggtatagttatattaatatttacgggtatacgtgatcgaaaaaaaaaaaataaagcgcgatcgggtgaaaatccgtatgcgtcgatagatatatcgaaaggtgaaaataatccgggttttcaaaatacggatgatgtacaaacgtcgttt

SEQ ID NO: 6251 - DNA, 2415 bp, synthetic construct
  misc_feature 1..2415: note = source = /note="Description of Artificial Sequence: Synthetic coding sequence"
  source 1..2415: mol_type = other DNA
atgtccagcagctcttggctcctgctgagcctcgtcgcagttaccgccgcgcagtcgaccatcgaagaacaggcaaaaactttcctggataagtttaatcacgaggccgaagatcttttctaccaatcctctctggcgtcctggaattacaacaccaacatcaccgaagagaacgtccagaatatgaacaacgcgggagacaaatggtccgcatttctgaaggagcagtcaaccctggcacagatgtatcccttgcaggaaatacaaaacctgaccgtgaagctccagttgcaggcgttgcagcaaaacggctcctcagtcctgagcgaggacaagtccaagcgcctcaatacgatcttgaacaccatgtctactatctattcaaccggaaaggtttgcaatccggacaacccgcaagaatgtctcctgctggaaccgggacttaatgaaatcatggctaactcgttggactacaacgagaggttgtgggcttgggagtcatggaggagcgaggtgggaaagcagcttaggccgctgtatgaagaatatgtggtgctgaagaacgaaatggcccgcgccaaccactacgaggactacggagactactggcggggagactacgaggtcaatggagtcgacggatacgattacagccgggggcagctgatcgaagatgtggaacatactttcgaagagataaaacctctctacgaacacctgcatgcgtacgtccgcgccaaacttatgaacgcctacccgtcatacatctcaccaatcggatgccttccggcccatctgctcggcgatatgtggggtcggttttggaccaatctctactcgttgaccgtccccttcggacaaaagcccaacattgacgtgactgatgcaatggttgatcaggcgtgggacgcccagcggatattcaaagaggcagagaagtttttcgtctcagtgggcctgccaaacatgacccagggcttctgggaaaatagcatgctcactgacccagggaacgtgcaaaaggccgtgtgccacccaactgcgtgggatctgggaaagggagattttcgcatcctgatgtgcaccaaggtgacgatggacgacttcctgactgcccaccacgagatggggcacattcagtacgacatggcgtacgctgcgcaaccctttttgcttagaaacggagcaaacgaggggttccatgaagctgtaggagagattatgtccctgtcagccgcgactcccaagcatcttaagtctatcggactgctctcgccggactttcaggaggacaacgagacggaaatcaatttcctgctgaaacaggccctgactatcgtcggcactcttcctttcacttacatgctcgaaaaatggaggtggatggtgtttaagggagagatcccgaaggatcagtggatgaagaagtggtgggaaatgaaacgggaaatcgtcggagtcgtggagccagtgccacatgacgaaacttactgcgatccagcttccctgttccacgtgtcgaacgattactccttcatccgctactacactagaactctctaccagttccagttccaggaagcactttgtcaagccgcgaagcacgaagggccgcttcacaaatgcgacattagcaattcaaccgaggcagggcagaaacttttcaatatgttgaggctgggaaagtcggaaccgtggacgttggcccttgagaacgttgtgggcgccaaaaacatgaacgtgcgccctctcctcaattacttcgagcccctcttcacctggctcaaggatcagaataagaattcgttcgtcggctggtccactgactggagcccgtacgccgatcagtccattaaagtaaggatctccctcaagagcgctctgggggataaggcctatgagtggaacgacaatgagatgtacctgtttaggagctcggtggcgtacgcgatgcggcagtacttcctgaaggtgaagaatcaaatgatcctgtttggagaggaagatgtgcgggtggccaacctcaagcctcgcatctcatttaacttcttcgtcactgccccaaagaatgtctcggatatcattccacgtaccgaagtggaaaaggctatcagaatgtcgagatcccgcatcaacgacgcctttcggctcaatgacaattccctggaattcttgggcatccaaccaaccctcgggcctcccaaccagccgcctgtgtccatctggctgattgtgttcggcgtggtgatgggggtgatagtggtgggcatcgtgatcctcatcttcactggtattagagacagaaagaaaaagaacaaggcacgctcgggagaaaacccttacgcatccatcgacatctcgaaaggagagaacaatccaggcttccaaaatacggacgatgtccaaacctccttc

SEQ ID NO: 6252 - DNA, 2415 bp, synthetic construct
  misc_feature 1..2415: note = source = /note="Description of Artificial Sequence: Synthetic coding sequence"
  source 1..2415: mol_type = other DNA
atgagttctagttcatggttattgttatctttagtagcagtcactgcagcacaatctactatagaagaacaagctaaaacatttttagataagtttaatcacgaggctgaggatcttttttatcaatcaagtttagcttcttggaattataatacaaatattactgaagaaaatgttcaaaatatgaataatgctggagataaatggtcagcctttttaaaagaacaatctacgttagctcaaatgtatcctcttcaggaaatccaaaatcttactgttaaattacaattacaagctttacaacaaaatggatcttcagttttaagtgaagataaatcaaaaagacttaatactattttaaatactatgtcaactatttattctacaggaaaggtatgtaatccagacaatccacaagaatgtttattacttgaaccaggtttaaatgaaataatggcaaactctcttgattataatgaaagactttgggcatgggaatcatggagatcagaagttggaaaacaattaagacctttatatgaagaatatgtagtacttaaaaatgagatggcaagagcaaatcattacgaagattatggtgactattggagaggagattatgaagttaatggagttgatggttatgattacagtcgtggtcaattgattgaagatgtagaacatactttcgaagagattaaaccattatatgaacatttacatgcatatgttagagcaaagctaatgaatgcttatccatcttatatttctccaattggttgtcttccagctcatttattaggagatatgtggggtagattttggactaatttatatagtcttacagttccatttggacaaaaaccaaatattgatgttactgatgcaatggtagatcaagcatgggatgctcagagaatattcaaagaagcagaaaaattctttgtttcggttggattaccaaatatgactcaaggattttgggaaaattcaatgcttacagatccaggaaatgttcaaaaagcagtttgtcacccaacagcttgggatttaggaaaaggtgactttagaattcttatgtgtactaaagttacaatggatgattttttaacagctcatcatgaaatgggtcacatacagtatgacatggcatatgctgcacaacctttcctacttcgtaatggtgctaatgaaggatttcatgaagcagtcggagaaatcatgagtctaagtgctgctactccaaaacatttaaagtcaataggattattaagtccagacttccaagaagataatgaaacagaaattaattttttacttaaacaagctttgactattgtaggaacattaccatttacttatatgttagaaaagtggcgttggatggtattcaaaggagaaattccaaaagatcaatggatgaaaaagtggtgggaaatgaaaagagaaattgttggagttgtagaaccagttccacatgatgaaacatattgtgatccagcatcattatttcatgtaagtaatgattattcttttattcgttattatactagaacattatatcaatttcaatttcaagaagcactttgtcaagctgctaagcatgaaggaccattacataaatgtgatatttcaaatagtactgaagctggacaaaaattgttcaatatgcttagacttggaaaatcagaaccatggactttagcattagaaaatgtagttggagcaaaaaatatgaatgttagaccattattaaactattttgaaccactttttacttggttaaaagaccaaaataaaaattcctttgttggatggtctacagattggagtccatatgcagatcaaagtattaaagttagaatttcattgaaaagtgcattaggtgacaaagcatatgaatggaatgataatgagatgtatctttttagaagtagtgtagcttatgcaatgagacaatattttttaaaagtaaaaaatcaaatgatacttttcggtgaagaagacgtacgtgtagcaaatttgaaaccaagaataagtttcaattttttcgttacagctcctaaaaatgtttcggatataattccaagaacagaagttgaaaaagctatcagaatgtcaagatctaggattaatgacgcatttagattaaatgataattcattagaatttcttggaatacaaccaactttaggaccaccaaatcaaccaccagtttccatatggcttattgtatttggagtggttatgggtgttattgtagtaggtattgttattcttatatttactgggatacgagatagaaaaaaaaagaataaagctagatctggagaaaatccatatgcttctattgatatttcaaaaggagaaaacaatccaggttttcaaaacacagatgatgttcaaacttcattt

SEQ ID NO: 6253 - DNA, 2415 bp, synthetic construct
  misc_feature 1..2415: note = source = /note="Description of Artificial Sequence: Synthetic coding sequence"
  source 1..2415: mol_type = other DNA
atgtcttcctcaagttggctgttgctttctctggtggcagttactgctgctcagtctactatcgaagagcaggcaaagacattcctggataagtttaaccatgaggcagaggatctgttctaccagtcatcacttgcttcttggaattataatactaacattactgaagaaaacgtgcaaaatatgaataacgccggagataagtggtccgcttttcttaaagagcagtccaccctcgctcaaatgtacccacttcaggaaatccagaacctgaccgtgaagctgcagctgcaagctctccagcagaatggctcatctgttctgagcgaggataagagtaaacgtttgaacacaatactgaacaccatgtccaccatttatagcaccggcaaggtgtgcaaccctgacaacccacaggagtgcttgctgctcgaacccggcctgaacgagatcatggcaaactccctcgattacaacgaacgcctctgggcatgggagtcctggagatctgaggtgggaaagcagttgcgccccctttacgaggaatacgtggtgttgaagaatgagatggctcgtgctaaccattacgaagattacggtgattactggcgtggtgattatgaggtaaacggagttgacggatacgattactcacgtggacaactcatcgaagacgtcgagcacacctttgaagaaataaagcccctttacgagcatcttcacgcctatgtgagggctaaacttatgaacgcatacccctcctacatctcccccatcggttgcctccctgcccatctcttgggagacatgtggggtaggttttggaccaacctctactcccttacagtccctttcggtcagaagcccaatattgatgtaaccgacgcaatggtcgaccaagcttgggacgctcagagaattttcaaggaggccgaaaagtttttcgtgtccgttggactgcctaacatgactcagggtttctgggagaatagtatgctcaccgacccaggtaacgtccagaaggctgtttgccatccaacagcctgggacttgggcaagggcgacttccgtatcctcatgtgcaccaaagtcaccatggatgattttttgacagcacaccacgaaatgggccatatccagtatgacatggcctacgccgctcaaccatttctgctgcgtaacggcgccaatgagggctttcatgaggctgtgggagaaatcatgagtttgagtgccgctacccctaaacacctgaagagcatcggactgctgtccccagacttccaagaagataatgagacagagatcaactttctgctcaaacaagctctcactatagttggtactttgcctttcacttacatgctggagaagtggaggtggatggtgtttaagggtgagattcccaaggaccagtggatgaagaagtggtgggaaatgaaaagagagatcgttggtgtggtggagccagtccctcacgatgagacttactgcgaccccgcatccttgttccatgtgtcaaacgactacagtttcattagatactacacccgcacactgtaccagttccagtttcaggaagctttgtgtcaggcagccaaacacgagggcccacttcacaagtgcgatatctccaacagtaccgaagccggccagaagttgtttaatatgctcaggttgggcaaatccgagccctggacactggctctggagaatgttgtaggagccaagaacatgaatgttaggcctcttcttaactatttcgaacccctcttcacttggctgaaggatcaaaacaagaactccttcgtaggatggtctacagactggtccccatatgccgatcaaagtatcaaggtgcgcatctcactcaaaagtgccctcggcgataaggcctacgaatggaacgataacgaaatgtacctctttaggagttcagtggcatatgcaatgcgccaatacttccttaaggtgaagaaccagatgatcctgttcggtgaggaggacgtgagggtggccaacctgaagcctcgtatcagcttcaacttttttgttactgcacctaagaacgtgtccgatatcatccccaggactgaggttgagaaagcaatacgcatgagcagaagccgtatcaacgacgccttcagattgaacgacaactccctcgaattcctcggtatccaacccacattgggcccccctaatcaacctccagtaagtatctggcttatcgtttttggagttgtgatgggagtgattgtcgtcggtatcgtgatcctgatttttactggcattcgtgacaggaagaagaagaataaagccagaagtggtgaaaatccctacgcaagcattgacatttctaagggtgagaataaccccggatttcaaaatactgacgatgtgcagactagtttt

SEQ ID NO: 6254 - DNA, 2415 bp, synthetic construct
  misc_feature 1..2415: note = source = /note="Description of Artificial Sequence: Synthetic coding sequence"
  source 1..2415: mol_type = other DNA
atgtcttcaagctcatggctgctgctttctttagtggcagtcacggccgcccagagcacgatcgaggaacaagcgaagacattcctggacaagtttaaccatgaggcggaagacctgttctatcagagcagcctggcttcctggaattataataccaacataactgaggagaacgttcagaatatgaataacgcaggcgacaaatggtctgctttccttaaggaacagagtaccctcgctcagatgtaccctcttcaggagatacagaacctgaccgtcaagctgcagctacaggccctgcagcagaatggatcatccgtccttagcgaggacaagtccaagaggcttaacacaatcctcaacacaatgagcaccatctattcaaccggaaaagtatgtaatccagacaacccacaagagtgtttgttgcttgagccaggactcaatgagataatggccaactcgctggactacaatgagcgtctgtgggcctgggagagctggcgatcagaagtcggcaagcagctgcggccgctatacgaggagtacgtggtgttaaaaaatgaaatggcccgggccaatcactatgaggactacggggattactggagaggcgattacgaggtcaacggggttgatggctatgattactcgcgaggccagctgattgaggacgtggaacacaccttcgaggaaattaagccattatacgagcatcttcatgcctatgtccgggcgaaactcatgaacgcatatccgtcatatatatcccctattggatgtctgcctgctcatctcctgggtgatatgtggggccgcttctggacgaatctgtatagcctgacagtcccttttgggcagaaacccaacatcgacgtgaccgacgccatggtggaccaggcctgggacgctcaaaggatttttaaggaggcagaaaaatttttcgtctccgtgggcctgccaaacatgacacaggggttctgggaaaactcaatgctgactgaccccggcaatgtgcagaaagcagtatgccaccctaccgcctgggatctgggaaaaggagacttccgaatactaatgtgcaccaaagtgaccatggatgactttctgacggcgcaccatgaaatgggccacatacagtacgatatggcgtacgcagcccaaccatttcttctgcgcaacggcgcaaatgaaggcttccatgaggccgtgggggagataatgagcctgtcagcagcaacacctaaacatcttaaatccattggactcttgtcacccgatttccaagaggacaacgaaacggagattaattttctgttaaaacaggctctgacgatcgtaggcaccttgccatttacctacatgttggagaagtggcgatggatggtcttcaagggtgaaatcccaaaggaccagtggatgaagaaatggtgggagatgaagcgagagatcgttggcgtcgtcgagcctgtgccccatgacgaaacttattgtgatcctgcctcgctcttccacgttagtaacgactacagcttcatcaggtactacacccggactctgtatcagttccaatttcaggaagctctgtgccaggctgccaagcacgagggtcccctgcacaaatgcgatatcagcaattccactgaagcagggcaaaaactgttcaacatgcttagacttggcaaatctgagccctggaccttagcgttggagaatgtcgtaggggccaagaatatgaacgtaaggcccctgctcaactactttgagcccctgttcacctggctgaaggaccagaacaagaattccttcgtgggatggtcaactgattggagcccctatgcggaccagagcataaaggtgcgcatctctctgaaaagcgccttgggggataaggcctacgaatggaacgataacgaaatgtatctatttcgcagctcagtggcttacgcgatgcggcagtattttttaaaggtgaaaaaccagatgattcttttcggggaagaggatgtgcgggtcgcaaacttgaagcctaggatctctttcaacttctttgtgacagcacccaaaaacgtcagcgacataataccgcggaccgaggtagagaaggcaatcaggatgagccggtcccggatcaatgacgcctttagactgaatgacaatagtctggagtttctaggcatccagccaaccctgggaccccctaatcaaccacccgtttccatatggttgatcgtgttcggagtggtgatgggagtcatcgtggtcggtatagttattcttatatttacgggaatcagggaccgcaagaagaaaaataaggctaggagtggtgagaatccgtacgcgagcatcgatatttctaagggagaaaacaaccctggtttccagaacaccgatgacgttcagacctctttt

SEQ ID NO: 6255 - DNA, 2415 bp, synthetic construct
  misc_feature 1..2415: note = source = /note="Description of Artificial Sequence: Synthetic coding sequence"
  source 1..2415: mol_type = other DNA
atgagctctagcagctggctgctcctgtcactcgtggcagtcaccgcagcccagtccaccatcgaagaacaggctaagaccttcctcgataagttcaaccatgaagctgaggacctgttctaccagtcatccctcgcgagctggaactacaacactaacatcacggaagaaaacgtgcaaaacatgaacaacgctggggacaagtggtccgctttcctgaaagagcagtcgactctggctcagatgtacccactccaggagatccagaatctgaccgtgaaactgcagctccaagccctgcaacagaacgggtcctctgtgctctcagaggataagtccaagcgtctgaacactatccttaatactatgtcaactatctactcaactggaaaggtctgcaaccctgataacccgcaagaatgcctcttgctcgaaccaggactgaacgaaattatggcgaactccctcgactacaacgagcgcctgtgggcctgggaatcatggagatcagaagttggaaaacaactgcggccgttgtatgaggaatacgtggtgctgaagaatgagatggcccgcgcgaatcattacgaggattacggtgactactggcgcggagactacgaggtgaatggggtcgacggctacgactacagccgggggcagctgatcgaggacgtcgaacacacctttgaggaaatcaaacctctctacgaacatctgcatgcctatgtcagagccaaattgatgaatgcatacccatcgtacatcagcccgattggctgcctcccggcccacctgctgggagatatgtggggacgcttttggaccaacttgtactcgttgactgtgcccttcggacagaagccaaacatagatgtcactgacgctatggtggatcaggcctgggacgcacaaaggatctttaaggaagccgaaaaattcttcgtgagcgtcgggctgccaaatatgacccaaggattctgggaaaactcaatgctgactgatccggggaacgtgcagaaggctgtctgccaccctaccgcttgggacctcggtaagggcgacttccgcatcctcatgtgcaccaaggtgacgatggacgacttcttgaccgcgcaccatgagatgggacacatccaatacgacatggcctacgcagcacagccttttcttctgagaaatggcgccaacgagggattccatgaggcggtgggcgaaatcatgtccctgagcgcggcaacgccaaagcacctgaaaagcatcggactgctgtctcctgacttccaggaggacaacgaaactgagatcaattttctgctcaagcaagccctcacgattgtcggaaccctcccgttcacttatatgctggagaagtggaggtggatggtgttcaagggcgagatcccgaaggaccagtggatgaaaaagtggtgggaaatgaagagggaaatcgttggtgtggtggagcctgtgcctcacgatgaaacttactgtgatccagcctcgctgttccacgtatccaacgattacagcttcatccggtactacactcgcaccctgtatcaattccaattccaagaagcattgtgtcaggcggcgaagcacgagggaccgctccacaaatgcgatatctccaactccaccgaggccggccagaagctgttcaacatgcttcgcctgggtaagtccgagccctggaccctcgccctggaaaacgtggtgggcgcgaaaaatatgaacgtccgccccctgcttaactacttcgagccgctgttcacctggctgaaggatcagaataaaaattcgttcgtgggatggtcgactgattggtcgccatacgctgaccagtcgatcaaggtgcgcatttcactcaagtccgccctcggcgacaaggcgtacgagtggaacgacaatgaaatgtacctgttccggtcgtcggtggcgtacgcaatgagacaatacttcttgaaggttaagaatcagatgatcctctttggagaagaggatgtccgggtcgcgaacctgaagccgaggatttccttcaattttttcgtgaccgccccgaagaacgtgtccgacatcatcccgcgcacggaagtcgaaaaagccattagaatgagcagaagccgaattaatgatgccttccggctgaatgacaactcgcttgaatttcttggcatccagccaacccttggcccgccgaatcagccccccgtgtcgatctggctgatcgtgtttggagtggtgatgggagtgatcgtggtcggaattgtgatcctgatcttcaccggaatccgggaccggaaaaagaagaacaaagcccggtcgggagaaaacccgtacgcaagtatcgacatctcaaaaggtgaaaacaatccagggtttcaaaatactgacgatgtccagacctcgttt

SEQ ID NO: 6256 - DNA, 2415 bp, synthetic construct
  misc_feature 1..2415: note = source = /note="Description of Artificial Sequence: Synthetic coding sequence"
  source 1..2415: mol_type = other DNA
atgtcgtcgtcgagctggctgctgctgtcactcgtggctgtgactgccgcccagtccaccatcgaagagcaggccaagactttccttgataagttcaatcatgaagctgaggatctcttttaccaatcatcgctggcgtcatggaactacaacaccaacatcaccgaagaaaacgtgcagaacatgaacaatgcgggagacaagtggtccgctttcctcaaagagcagagcaccttggcccagatgtaccccctccaggaaatccagaatctgaccgtcaagctccaactgcaagccctgcaacagaatggatcgtccgtgctgtctgaggacaagtccaagcgcctcaacaccatcctgaacacgatgtccactatctattccacgggcaaagtgtgcaatccggacaaccctcaagaatgcctgctgctcgaaccgggtcttaacgaaatcatggccaattccttggactacaatgaaagactgtgggcgtgggagtcctggcggtcagaagtgggaaagcagctgcggccactttacgaagagtacgtcgtcctgaagaacgaaatggcccgtgccaaccactatgaggactacggagactactggcggggagattacgaagtgaatggagtggacggatacgactactcgcggggacagctgattgaggacgtggaacataccttcgaggaaatcaaaccactctatgagcacctccacgcgtacgtgcgcgcgaaactcatgaatgcctacccgagctacatttccccaattggatgccttccagcccatcttttgggagatatgtggggacggttctggactaatttgtactcgcttaccgtccctttcgggcagaagccaaacatcgatgtcactgacgcgatggtggaccaggcttgggatgcccagcgcatcttcaaggaggcggaaaagttcttcgtctcggtgggattgccgaacatgactcaaggattttgggaaaactcgatgctcactgatcctggaaatgtccagaaggcagtgtgtcacccgaccgcctgggaccttggaaagggagactttcggatactgatgtgtaccaaggtgactatggatgacttcctgaccgcccaccatgaaatggggcacatccagtacgatatggcctacgctgctcaacctttcctcctgcggaatggtgccaacgaaggttttcacgaggcggtgggtgagattatgtcgcttagcgccgctacgccgaaacacctcaagtccatcggcctgctgagccctgactttcaagaggataacgaaaccgagattaacttcctgctgaagcaagcattgaccatcgtcggaactctgccattcacctacatgttggagaagtggcggtggatggtctttaagggagaaatcccgaaggaccaatggatgaagaaatggtgggaaatgaagcgcgagattgtcggcgtcgtggagccagtgccgcacgacgaaacctactgcgatcctgcctcgctgttccacgtgtcgaacgattacagctttatccgctattacactcgcaccttgtaccaattccaatttcaggaagcactctgtcaggcggcgaaacacgagggccctctgcataagtgcgacatcagcaacagcactgaggctggccagaagttgttcaatatgctccggctgggcaagtcggagccgtggacccttgcgctggaaaatgtcgtgggagcgaaaaacatgaatgtaaggccgctgctcaattacttcgaaccgctctttacttggctgaaggatcagaacaaaaactcgttcgtgggctggtcaactgattggtccccttacgctgatcagagcatcaaagtgcggatatccttgaagtcagctctgggcgacaaggcttatgagtggaatgataatgagatgtacctctttcgctcctccgtggcatacgctatgcgccagtacttcctcaaggtgaaaaaccagatgatcctgttcggagaggaagatgtccgggtggcaaatctcaagccgcgcatctcctttaacttcttcgtgaccgccccgaaaaacgtgagcgacatcatccccaggaccgaagtggagaaggcaatcagaatgtcgcggtcgcggatcaacgacgccttccggctgaacgataactcgctcgagttcttgggaatccaaccgactctgggacctcccaatcagcctccggtgtccatctggctgatcgtgttcggagtggtgatgggagtgattgtggtcggcatcgtgatcctgatcttcaccggtatccgcgatagaaagaaaaagaataaggccagaagcggcgagaacccttacgcctccattgatatttccaagggcgagaataatccgggattccaaaacactgatgacgtgcaaacctcgttc

SEQ ID NO: 6257 - DNA, 2415 bp, synthetic construct
  misc_feature 1..2415: note = source = /note="Description of Artificial Sequence: Synthetic coding sequence"
  source 1..2415: mol_type = other DNA
atgtcttctagtagttggttgctgcttagtctcgttgccgtaactgcagcccagagcaccatagaagagcaggcaaagacttttctcgacaagttcaaccatgaggctgaggatcttttctatcaaagcagcttggcttcctggaactacaacaccaacattacagaagagaatgtgcagaatatgaataacgcaggggacaaatggagtgcgttcctaaaagagcaatcaacactggcacagatgtatcccttgcaagagatccagaatctgactgttaagctccaactgcaggccctgcagcagaacggaagctctgtgctcagtgaggataaaagtaagcgcttaaataccattctcaataccatgtccactatttactctaccgggaaggtctgcaatccagacaaccctcaggagtgcttgcttctcgagccaggcctgaacgagataatggccaactctctggattataatgagcgactgtgggcctgggagtcatggcgcagcgaggtggggaaacaactacgaccgctgtatgaagagtatgtggtcctgaagaatgagatggccagggccaaccactacgaggactatggagattactggcggggcgattacgaggtgaatggggtggacggatacgactactccaggggtcagcttattgaggacgtggaacataccttcgaggaaatcaagccactgtacgagcatcttcacgcctatgtgcgagcgaaactgatgaacgcttacccttcatacatcagtccaattggatgtttgcccgcgcacctccttggcgatatgtggggcaggttttggaccaatctgtattcattgacagtcccattcggacagaaaccgaacattgatgtgactgacgctatggtcgaccaggcctgggacgcccagaggatcttcaaagaggctgaaaagttcttcgtcagcgtgggcctacccaatatgacccagggcttctgggaaaacagtatgctgaccgaccccgggaacgtgcagaaggctgtgtgtcatccgaccgcatgggaccttggtaaaggagatttccgtatactgatgtgtaccaaggtgacgatggacgactttctgacagcgcaccacgaaatgggtcacattcagtacgacatggcttatgcggctcagcccttcctgctcagaaacggagcaaacgaaggcttccacgaggcagttggcgagatcatgagcctttctgctgcgaccccaaagcatctgaagtcaatcggcctgcttagccctgattttcaagaagataacgagaccgagatcaatttcctgctcaagcaggctcttacaattgtcggcacactgcctttcacatatatgttggaaaaatggcggtggatggtcttcaagggcgagataccaaaggatcaatggatgaagaaatggtgggagatgaaacgggagattgtgggagttgtggaaccagtgcctcatgatgagacatactgcgatccagccagcctctttcacgtaagcaatgactattccttcatccgctactatacacggactctctaccagtttcagttccaggaagccctgtgtcaagctgcaaaacacgaaggacccttgcataagtgcgatatctcgaattccaccgaggccggccagaagctgttcaatatgctgcggcttggaaagtccgaaccctggaccctggccttggagaacgtcgtgggcgccaaaaatatgaacgttcgaccccttctgaactactttgagccgcttttcacttggttgaaggatcagaacaagaactccttcgtggggtggtcaacagattggtctccctatgccgaccagagcattaaggtccggatcagtctgaagtccgctctcggcgacaaagcctacgagtggaacgataacgagatgtacttgtttcgaagctctgtggcctacgctatgcgacagtattttctcaaagtcaagaatcagatgattctgtttggtgaggaggatgtgcgtgtggctaacttgaagcccagaattagtttcaattttttcgtgaccgcccccaagaacgtgtctgatatcatccccaggaccgaagtcgaaaaggccattcgcatgagccggtccaggatcaacgacgctttcaggctgaacgacaactccctggagtttctcggtatccagcctacgcttggcccccctaatcagccaccagtgtccatctggctgatcgtgttcggtgtggtcatgggagttatagtggtgggtatcgtgattctgatcttcaccggtattcgcgatcgcaagaagaaaaataaggcacggtctggggagaatccttacgcctctatcgatataagcaaaggcgagaacaatcctgggtttcagaacaccgatgacgtgcagaccagtttc

SEQ ID NO: 6258 - DNA, 2415 bp, synthetic construct
  misc_feature 1..2415: note = source = /note="Description of Artificial Sequence: Synthetic coding sequence"
  source 1..2415: mol_type = other DNA
atgtctagttcctcctggctcctcctctccctggtggccgtgactgccgcacaaagcaccatcgaagagcaggcaaagacctttctggacaagttcaatcatgaggcggaagatctgttctaccagtcctccctggcctcctggaattacaacacgaatatcacggaggagaacgtgcagaatatgaataatgccggggataagtggtccgcctttctcaaggaacagtccactctggcccaaatgtacccgctccaagaaatccagaatttgaccgtgaagttgcaactgcaagcactccagcagaacggatcatcagtcttgagcgaggacaaatcaaagagactgaataccatcctgaacactatgtccaccatctacagcaccggaaaggtgtgtaacccagacaatccgcaggaatgcctcctgctggaaccgggcctgaacgaaatcatggcaaattcgctcgactacaatgagcggttgtgggcatgggaatcgtggcggtcggaagtgggcaagcaactgcgcccactctacgaagagtacgtggtgcttaagaacgaaatggcacgggcaaatcactacgaggactatggcgactactggagaggagattatgaggtgaacggggtggacggctacgactattctcggggccagctcatcgaggacgtggaacatactttcgaagaaatcaaaccattgtacgagcacctgcacgcgtacgtccgcgcgaagctgatgaacgcctacccttcctacatttcccccattggatgcctgccagcccacttgctgggagatatgtggggacggttctggactaacctctactccctgacggtgccgttcggccagaagccaaacatcgatgtgaccgatgcaatggtggaccaggcatgggatgcacaacgcatcttcaaggaagcagagaaattcttcgtgtcagtgggactccccaacatgacccaaggtttctgggaaaacagcatgctgaccgatccgggcaatgtccaaaaggctgtgtgccatccgaccgcctgggacctgggaaagggcgacttccgcatcctgatgtgcactaaagtgactatggacgacttcctgaccgctcatcacgagatggggcatatccagtacgacatggcatacgcggcacagcctttcctgcttcggaacggtgccaacgaaggcttccatgaggccgtcggggagatcatgtccttgtccgcggcaacccccaagcaccttaagtcgattggactcctgtcgccagacttccaggaggacaatgagactgaaatcaacttcctgctcaagcaggcgcttaccatcgttggaactctgccattcacctatatgctggaaaagtggcggtggatggtgttcaaaggagagattccaaaggatcaatggatgaagaagtggtgggaaatgaagagagagatcgtgggcgtcgtcgaaccagtgccccatgatgagacttactgcgatccggcctcgctttttcacgtgtcgaacgattacagcttcatcagatactacactaggactctgtaccagttccagttccaggaagctctgtgccaagctgccaagcacgagggtccactgcacaaatgcgacatctccaactcgactgaagccggccaaaagttgttcaacatgctcaggctgggaaaatctgagccgtggacccttgccctggagaacgtcgtgggcgcaaagaacatgaacgtccgaccgctgttgaattacttcgaaccgctgttcacttggttgaaggatcagaacaaaaactctttcgtggggtggtcaactgattggagcccgtacgccgatcagtcgatcaaagtgcgcatctcgctcaagtccgcactgggagataaggcatacgaatggaacgataatgagatgtacctctttcgctcgtccgtggcctacgctatgagacaatacttcctcaaagtcaaaaaccaaatgatcctctttggagaagaggacgtgcgcgtggccaacctgaagccgcggatctcatttaacttcttcgtgactgcgccaaagaatgtctcggacatcatcccgagaactgaggtggaaaaggctatcagaatgtcccgctcccggatcaacgacgccttccgcctcaatgataattccctcgagttcctggggatccaaccgactctgggaccgcctaatcagccaccagtctcaatctggctgatcgttttcggggtcgtcatgggtgttatcgtggtgggtattgtgattcttatcttcaccggaattagagacagaaagaagaaaaacaaggcacgctcaggcgaaaacccgtacgcgagcatcgatatctcgaagggagaaaacaacccgggattccagaacactgacgacgtgcagacttcgttc

SEQ ID NO: 6259 - DNA, 2415 bp, synthetic construct
  misc_feature 1..2415: note = source = /note="Description of Artificial Sequence: Synthetic coding sequence"
  source 1..2415: mol_type = other DNA
atgtcgtccagctcctggctgttgctcagcctcgtagctgtcacagcggcgcagagtaccatcgaggagcaggcaaagacatttctggacaagtttaatcatgaagccgaagacctgttctaccagtcttccttggcttcttggaattacaacacaaatatcaccgaggagaacgtgcaaaacatgaacaacgctggcgataaatggagcgcttttctgaaggaacagagtaccctagctcagatgtatcccctgcaggagattcagaatcttaccgtcaagctgcagttgcaggccctgcaacagaacggttccagcgtgctgtccgaagataaatctaaaagactaaacaccattctgaacactatgagcacaatttattctaccggcaaggtgtgtaacccagacaatccacaggagtgtctcctattggagcccggtttaaacgagatcatggctaacagtctggattacaatgagaggctgtgggcctgggaatcctggagaagcgaagtaggtaaacagttgaggccactctacgaagagtacgtggtactgaagaacgagatggctcgggccaaccactatgaagactatggggactattggagaggtgattacgaggtcaatggggtggacggctacgactactctcgggggcaattgatcgaggacgttgagcataccttcgaagagatcaaacctctgtacgaacatctgcatgcctacgtcagggctaagctgatgaacgcttacccctcgtacatctcccctattgggtgtcttccagcgcaccttcttggcgacatgtggggacgcttctggaccaatctgtatagcttaacagtgcctttcggccaaaaacccaatatagatgtcactgatgcaatggtggatcaggcatgggatgcacagagaattttcaaagaagcagaaaagttttttgtatctgtcggtctgcctaatatgacccagggtttctgggagaattccatgctgaccgaccctgggaatgtgcaaaaagctgtatgtcatcccaccgcttgggatctgggtaaaggggattttaggatactgatgtgcaccaaggtaaccatggacgatttcctaactgcacaccacgagatgggccacatacagtacgatatggcttacgcggcgcaaccatttctgttgagaaacggtgcaaatgaaggtttccacgaggctgtcggagagattatgtccctctctgctgccacgcctaaacacctgaagagtattggacttctctcccccgattttcaggaggataacgagacagagattaatttcttgctcaaacaggccttgactattgtggggacgctgccgttcacttacatgcttgagaagtggaggtggatggtattcaagggggaaattcctaaggatcagtggatgaagaaatggtgggagatgaagagggaaattgtgggcgtggtggaacccgtaccccatgatgagacatactgtgaccctgcaagcctcttccacgtgagcaacgattacagcttcatccgatactacactagaactttataccagttccagttccaggaagctctgtgtcaagccgcaaagcacgagggccccctgcacaagtgcgacatatcaaactccacagaggctggccagaaactttttaacatgctgaggttgggcaaatctgagccctggactttggcgctcgaaaatgtagtcggcgctaaaaacatgaacgttcgacccctgctaaactactttgagcccttattcacttggttgaaggatcaaaataaaaacagttttgtaggctggtcaaccgactggtctccttatgctgaccaaagtattaaagtgcgcatcagtttgaaatccgctctgggcgataaagcgtacgaatggaacgacaatgagatgtacctttttagaagttctgtggcttacgccatgcggcaatactttctaaaggtgaagaatcagatgattctgttcggcgaggaggacgtgcgtgtcgccaacctaaaacctcgaatctcctttaacttctttgtgactgccccaaaaaatgtgtcagacatcatcccgcgcaccgaggtggaaaaagctatacgcatgtccagatccaggattaacgatgcgtttaggcttaacgataattcactggaatttctcggaatccagccaacattgggacctcccaaccagcctccagtgagtatctggctgatagtgtttggagtggtgatgggtgtcattgtggtagggatagtcatcctgattttcactggtatacgcgacaggaagaaaaaaaacaaagctaggtccggtgagaacccctatgcctctatcgacatctcaaaaggcgagaacaatccaggatttcaaaacaccgatgacgtgcaaacttccttt

SEQ ID NO: 6260 - DNA, 2415 bp, synthetic construct
  misc_feature 1..2415: note = source = /note="Description of Artificial Sequence: Synthetic coding sequence"
  source 1..2415: mol_type = other DNA
atgagtagtagctcctggctcctgctgtctctggttgccgtgaccgcagcccagtccacgatcgaggaacaggccaaaaccttcctcgacaagtttaaccacgaggccgaggaccttttctaccagagcagtctggcctcctggaattataacaccaacataacggaggagaatgtccaaaacatgaacaacgctggcgacaagtggtccgctttcctgaaggaacagagcaccctcgcgcaaatgtaccctttgcaggagatccagaacctaaccgttaagctgcaacttcaggccctccagcagaacggttcgtccgtgttgagcgaggataagtcgaagcgtttgaatacaatcctgaacaccatgagtacaatctactccacgggtaaggtttgtaacccggacaaccctcaggagtgcttgctgcttgagcctgggctcaacgagatcatggccaactccctggactataacgagaggctgtgggcgtgggaaagctggcggtcggaggtgggcaagcagctgcgtcctctatacgaggagtatgttgtgctgaagaacgagatggctcgcgcgaaccactacgaagactatggtgactattggcgcggcgactacgaagtcaacggtgtcgacggatatgactattccagaggacaactaatcgaggatgtcgagcacaccttcgaggagatcaagccactttacgagcatcttcacgcttatgtgcgcgcaaagttgatgaacgcttacccttcctacatttctccgattgggtgtttgcccgctcacctgttgggcgatatgtggggacgcttttggacaaacctctattccctgaccgtccctttcggacaaaagcccaacatcgatgtcaccgatgccatggtcgatcaggcctgggatgcgcagaggatcttcaaggaagctgagaaattctttgtctcagtgggtctccccaacatgactcagggtttctgggagaactctatgctgaccgacccgggcaacgtccagaaggcggtttgccaccctaccgcttgggacttgggaaagggtgattttcgaattttgatgtgtaccaaggtcacgatggatgacttcctgaccgcccaccacgaaatggggcatatccagtatgacatggcctacgctgctcaacctttcctcctgaggaacggcgccaatgagggtttccacgaagccgtcggcgaaatcatgagcctctctgccgccacacccaagcatttgaagtctatcggtctgctgtctcccgattttcaggaggacaacgagaccgaaattaacttcctgctaaagcaggccttgaccattgtcggtacactcccgttcacctacatgctcgaaaagtggcgttggatggtgttcaagggggagattccgaaggaccagtggatgaaaaagtggtgggagatgaagcgcgagatcgtcggcgtcgtggagcccgtcccccatgatgaaacatactgtgatcctgccagtctcttccacgtatctaacgactacagcttcattcggtactacacgagaaccctgtaccagtttcagttccaggaagccctgtgccaggctgctaagcacgagggtccgctccacaagtgcgacatttcaaactccacggaggccggccagaagctgtttaacatgctgcgcctgggtaagtccgagccatggaccttggccctggagaacgttgtcggcgcgaagaacatgaacgtccggccgctgcttaactacttcgaacctttgtttacttggctcaaggatcagaacaagaattcgtttgtgggttggtctacggattggtccccctatgctgatcaaagcataaaagtccgtatctcactgaaatccgcgctgggagataaggcgtacgaatggaacgataacgagatgtatctgttccgtagctcggtggcatacgccatgcgtcagtacttcctgaaggtgaagaaccaaatgattctgtttggtgaggaggacgtgagggtcgcaaacctaaaaccccgtatcagctttaacttcttcgtcaccgcgcccaagaacgtttccgacatcataccacggaccgaggtggagaaagcaatccggatgagccgttcccgtatcaacgatgccttccggctgaacgacaacagcctcgagttcctggggatccagcccaccttaggaccgcccaatcagcccccggtctctatttggcttatcgtcttcggtgttgtcatgggtgtcatcgtggtcggtattgtaatcctgattttcaccggcatccgagaccgtaagaagaagaacaaggcccgctcaggtgagaacccgtacgcctcgattgacatttccaagggagaaaacaatcctggtttccagaacactgacgacgtccaaacttcattc

SEQ ID NO: 6261 - DNA, 2415 bp, synthetic construct; identical to SEQ ID NO: 6223
  misc_feature 1..2415: note = source = /note="Description of Artificial Sequence: Synthetic coding sequence"
  source 1..2415: mol_type = other DNA

SEQ ID NO: 6262 - DNA, 2415 bp, synthetic construct
  misc_feature 1..2415: note = source = /note="Description of Artificial Sequence: Synthetic coding sequence"
  source 1..2415: mol_type = other DNA
atgtcatcatcttcctggctgctgctgtcgctcgtcgctgtgactgccgctcagtcgaccatcgaggaacaggccaaaaccttcttggataagttcaaccatgaggcggaagatttgttctaccagagctccttggcaagctggaattacaacactaacattacggaagaaaacgtccaaaacatgaacaatgcgggcgataagtggtctgcgttccttaaagagcaatcgaccctcgcgcagatgtatccactccaggaaatccagaacttgactgtcaaattgcagctgcaggccctccagcagaacggctcgtcagttctgtccgaggacaaatcgaagcgcctcaacacgatcctgaatacgatgtcgaccatctactcgaccgggaaggtctgcaatccagataatccacaagagtgcctcctgcttgaaccggggcttaacgaaatcatggcaaactccctggattacaacgaacggctctgggcttgggagtcatggcgaagcgaagtgggaaaacagctccgccctttgtacgaagaatacgtggtcctcaagaatgaaatggctcgcgcaaatcattacgaggactacggagactactggcgcggcgactacgaagtgaacggagtcgacggctacgattacagcagaggtcagctgatcgaggatgtggaacatacctttgaggagatcaaaccactttacgaacacctgcatgcgtacgtgagagccaagctcatgaacgcgtacccatcatacatctccccgatcgggtgcctccctgcccacctgcttggggacatgtggggacgcttctggaccaatctttacagtcttaccgtgccgttcggtcagaagcctaatatcgacgtgacggacgcgatggtggaccaggcttgggatgcccagaggatcttcaaggaggccgagaaattctttgtgtcggtgggccttccaaatatgacccagggattttgggaaaactcaatgctgactgatccgggcaacgtgcagaaggcggtctgccacccgaccgcttgggaccttgggaaaggtgatttccggatcctgatgtgtactaaggtgactatggacgacttcctgacggctcaccacgagatgggtcacattcagtacgacatggcctacgccgcgcaaccgtttctcctccggaatggggcaaacgagggattccatgaggcggtcggcgagatcatgtccctgagcgccgccaccccgaagcacttgaaatcaatcggactgctgtccccagatttccaagaggacaatgagactgagatcaacttcctgctcaaacaagctcttaccattgtcggtacgctgccgtttacctacatgctggaaaagtggcggtggatggtctttaagggagaaatccccaaagaccaatggatgaagaagtggtgggagatgaagagggaaatcgtgggagtggtcgagccagtgccacacgatgagacgtactgcgatccggcgtcgctctttcacgtgtccaacgattactcgtttattcgctactatacccggactctgtaccaatttcagtttcaggaagctctttgccaagccgcgaagcacgagggacctcttcataagtgtgacatctcgaactccactgaggcaggacaaaaactgtttaacatgctcagactgggaaaatccgagccttggactctggccctggagaatgtggtcggggcgaagaatatgaacgtccggccactcctcaactactttgaaccgctgttcacttggctgaaagatcaaaacaagaactcgttcgtcggctggtctacggactggtcaccatacgctgaccaatcgatcaaggtgcgtatctcgctgaagagcgcgttgggagacaaggcttacgaatggaacgacaacgagatgtacctgttccggtcaagcgtggcatacgcaatgcggcagtacttcctgaaggtcaaaaaccagatgatcctgttcggggaggaggacgtgagggtggcgaacctgaagccgcgcatctcgttcaatttcttcgtgaccgctcccaagaacgtgagcgacattatcccgaggactgaagtcgaaaaagcgatcaggatgtctcggtcacgcatcaatgatgcgttccggctgaacgacaactcgctcgaattccttgggatccagccgaccctgggacctccgaaccagcctccggtgtccatctggttgatcgtctttggcgtggtgatgggagtgatcgtcgtggggatcgtcatcctgattttcaccggtatccgcgaccggaagaaaaagaataaggcgcgcagcggagaaaacccgtacgcctccatcgacatctccaaaggagagaacaatcccgggtttcagaacactgacgatgtgcaaacttccttt

SEQ ID NO: 6263 - DNA, 2415 bp, synthetic construct
  misc_feature 1..2415: note = source = /note="Description of Artificial Sequence: Synthetic coding sequence"
  source 1..2415: mol_type = other DNA
atgtcctcatcttcatggttgctgctgagcttggtggcagtgaccgcagcccagtccacaatcgaggagcaggcaaagactttcctcgataaatttaaccacgaggcggaggacttattctatcagtcatcactcgcgagctggaactacaacaccaacatcacggaggagaatgtccagaacatgaataatgcaggagataaatggagcgcatttctgaaagagcagtctaccctggcgcagatgtaccctctgcaggagattcagaacctgactgtgaaattacaactgcaggccctgcagcagaacggtagctcagtgctcagcgaggacaaaagcaagcgtctgaatacaattctcaataccatgagcactatctacagtacgggaaaggtgtgcaatccagacaaccctcaggaatgcctgttgttggagcctggactgaatgagattatggcaaatagtctggattacaacgagagactgtgggcttgggaatcctggagatccgaggtgggcaagcagttacgccctctgtatgaagagtacgtcgttctgaagaatgaaatggctagggccaatcattatgaagactacggggactattggcgtggagattatgaagtcaacggcgtggacggttacgattactctagagggcagctaattgaggacgtggaacacacattcgaggagattaagccactctacgagcacctgcacgcttatgtccgggctaaattgatgaatgcctatccaagctatatctccccaattggatgcctccctgctcatctgctcggagacatgtggggacgcttttggactaacctttatagtttaaccgtaccctttggccagaagccaaatattgatgtgacagacgccatggtagaccaggcttgggatgcacaaaggatctttaaggaagccgagaagtttttcgtgagcgtcggactgccaaatatgactcagggcttctgggaaaattctatgttgaccgatccaggaaacgtgcagaaggcagtctgccaccctactgcttgggacctaggaaaaggcgacttccggattttgatgtgcacaaaggttacaatggacgatttccttacagcacatcatgagatggggcatatccaatacgacatggcctatgccgctcagccatttctgctgagaaatggcgcaaacgaagggtttcacgaggccgtgggcgagattatgtctcttagtgcggccactccaaagcacctcaagagtattggactgctttcccccgatttccaggaggacaacgagactgaaatcaattttctactgaaacaggccttgacaattgtcggcacactcccctttacatacatgctggaaaagtggaggtggatggtattcaagggcgaaattcctaaagatcagtggatgaaaaagtggtgggaaatgaagagggagatcgtgggagtagtggagccagtcccccacgatgaaacttactgcgaccccgcaagtctgtttcacgtcagtaatgattactcgtttataagatactatacacggacattgtatcagtttcagtttcaggaggccctatgccaagcagctaagcacgaaggccctctacacaaatgcgacatatctaatagtacagaagccggccagaagcttttcaatatgctgagattagggaagtcagaaccctggacgctcgccctggaaaacgtggtgggggccaaaaacatgaacgtccgcccacttctaaactattttgaaccactgttcacgtggctgaaagatcagaataagaacagtttcgtgggatggagtacggattggtcaccatacgccgatcaatccattaaagtgcgcatctctttaaagtcagccctgggcgacaaagcttatgagtggaacgacaacgaaatgtacctgttccggagctctgtggcttatgcaatgcggcagtacttcctgaaggtgaagaaccaaatgatcctgtttggagaggaggacgtgagagttgctaaccttaaacctaggatttcatttaactttttcgttacagcacctaaaaacgtctcagatatcatccctaggaccgaggtcgagaaagccataaggatgtcccgctcccgcatcaatgatgctttccgactgaatgacaattcgctggagtttctgggaatccagcctactctaggcccccccaaccagccccctgtgtctatctggttaatcgtgtttggggtggtgatgggcgtgattgtcgtggggatcgtgatcctgatctttaccggcatcagggatagaaaaaagaaaaacaaggccaggtcaggcgaaaatccctatgctagtatcgatataagcaagggcgaaaacaatcccggctttcagaatacggacgatgtgcaaactagtttc

SEQ ID NO: 6264 - DNA, 2415 bp, synthetic construct
  misc_feature 1..2415: note = source = /note="Description of Artificial Sequence: Synthetic coding sequence"
  source 1..2415: mol_type = other DNA
atgagctcgtccagctggttacttctcagcctcgtcgctgtgacagcagcccagtctactatcgaggaacaggctaaaacgttcctggacaaatttaaccacgaagcggaggacttgttctatcagtcctccttagcaagttggaactataacactaacatcactgaagagaacgtccagaatatgaacaacgctggggacaaatggagcgctttcctgaaggaacagtctactctggctcaaatgtaccccctgcaagagattcagaatctcactgtcaagctccagctgcaggccttgcaacagaacggatcaagtgtgttgtctgaggacaaatcgaagcgtctcaatactatcctgaacactatgagcactatttattctacaggcaaagtatgcaatccagataatccacaggaatgtctcctgctagaaccaggccttaacgagatcatggccaatagcctggattataacgagcggctatgggcgtgggaatcgtggcgaagcgaagtcggcaagcagctacggcccctgtacgaggagtacgtcgtcctcaagaatgagatggcccgagccaatcactatgaggattacggtgactattggcgcggtgattatgaggtgaacggcgttgatggttacgattatagccggggtcagctgatcgaagacgtggaacatacattcgaagaaatcaaaccactttatgagcatctccatgcatacgtccgggccaaactgatgaatgcctacccctcttatatatctcccattggctgtctgcccgcacatctactcggcgacatgtggggacgcttttggaccaacctttacagcctgacggtgccctttggtcaaaagcctaatatcgatgtaactgacgcaatggtggaccaggcttgggatgctcagcggatctttaaggaagcagagaagttctttgtgagcgtcgggctacccaatatgacgcaggggttttgggaaaattccatgctgacagaccctggaaatgtgcagaaggccgtttgtcacccgaccgcatgggacctcgggaagggcgacttccgcattcttatgtgcaccaaggtgacaatggatgacttcctgactgcgcatcacgagatgggccacattcaatatgacatggcgtacgctgcccaaccatttctgctccggaatggcgcaaatgagggtttccacgaggctgtcggcgagattatgagtctgtctgcggcgactcccaagcacctaaagtcaatcgggttgcttagtccagactttcaggaggacaacgagacggagatcaactttctactcaaacaggcccttacaatcgtggggaccttgccgttcacatatatgctggaaaaatggcggtggatggtgttcaaaggcgagattcccaaggatcagtggatgaagaagtggtgggagatgaagagagagatcgtgggtgtcgtcgagcccgttccacacgacgagacctactgcgatccggcttccctgtttcacgtgtctaatgattactctttcatccgatactacacgcgcaccctataccagttccagtttcaggaggctctttgtcaggccgcaaaacatgaggggccactgcacaagtgtgacatcagcaattctacggaggcaggacagaagctgtttaacatgctaaggcttggtaagtctgagccctggacactcgctctggaaaacgtggtcggcgctaagaatatgaacgtgcgtcctcttctgaactacttcgagcccctgtttacctggttgaaggaccagaataagaactcatttgttggatggagtactgattggtcgccgtatgctgaccagtcaataaaggtcagaataagtcttaaatcggcgctgggcgacaaagcctacgagtggaatgacaacgagatgtatctctttaggtcatccgttgcgtacgcaatgagacaatactttttaaaagttaagaatcaaatgattttgtttggcgaagaggatgtccgcgtagcgaacctgaaaccgcgcatcagttttaatttttttgttacggcacccaaaaacgtgagtgatattatcccaaggacagaggtggaaaaagcaattaggatgagccgaagcagaatcaacgacgcttttagactaaacgataactctctagagtttcttggaatccagcccactctcgggccacctaatcagcctcccgtgtctatttggctgatcgttttcggtgttgtgatgggcgtgatcgttgtcggtatcgtcatccttatcttcaccggcatccgggatcggaaaaaaaaaaacaaagctcggtcaggcgagaacccatatgcttcaattgatatctcaaaaggcgagaataatccaggctttcagaataccgacgatgttcagactagtttt

SEQ ID NO: 6265 - DNA, 2415 bp, synthetic construct
  misc_feature 1..2415: note = source = /note="Description of Artificial Sequence: Synthetic coding sequence"
  source 1..2415: mol_type = other DNA
atgtcctcttcctcatggttattgttatcactggttgcagtgaccgcagcacagtcgaccatcgaggaacaagcgaaaactttcttggataaatttaatcatgaggcagaggacctattctatcaatcgtctttagcatcttggaattataatacaaatattacagaagagaatgtgcaaaatatgaacaatgctggggataagtggtcggcatttttaaaagaacaaagtacattggcccaaatgtatccattgcaagagatccaaaaccttactgtcaagcttcagcttcaagccctacagcaaaacggctctagtgtactttcagaagataaatcgaaaagactgaatacgattttaaatactatgtccactatatacagtacggggaaggtgtgtaacccggataatccacaagaatgtctcctactggaaccaggcctaaatgaaattatggcaaactcgctcgattataacgaacgactgtgggcttgggaatcttggcgctctgaagtaggcaagcaattgcgacccttgtatgaagaatatgtagttctaaaaaatgagatggcacgggccaatcattatgaggactacggggattattggcgcggggattacgaagtaaacggtgttgacggatacgactactcccgaggacagctgattgaagatgttgaacatacttttgaagagatcaaaccattgtatgagcacttacatgcctatgtaagagcgaagctgatgaatgcttacccgtcctatatctctccaattggttgtcttcccgcacatctcctcggtgatatgtggggccggttttggactaacctttactctttaacagttccgtttggccaaaagccaaacattgacgttactgatgctatggttgaccaagcgtgggacgcgcaaagaattttcaaagaggctgaaaagttttttgttagtgtgggtcttccaaacatgactcagggattctgggagaactctatgctcactgatccaggaaacgtgcaaaaggctgtttgtcatccgactgcatgggacttgggaaaaggtgattttagaattttgatgtgtactaaagtgaccatggacgacttcttaacagctcaccatgaaatgggccatattcagtatgatatggcatacgcagcgcagccatttcttttgcgaaacggagctaatgaaggatttcatgaagctgttggtgaaattatgtcactctctgcagccacccccaagcatctgaaatctattggacttttgagtccagacttccaagaagataatgaaacagaaattaattttttgctgaagcaagccttgacaatcgttggaacattaccatttacatatatgttagagaagtggcgatggatggttttcaagggagaaataccgaaagatcaatggatgaagaaatggtgggaaatgaaaagagagatcgttggagtcgtcgaaccggttccgcacgacgaaacatactgtgatccagcttctctttttcatgtatcaaacgactactcatttattagatactacacgagaactttgtaccaatttcaattccaagaagccctctgtcaagctgcaaagcatgaggggccgctccataagtgtgatatttcgaactcgactgaagcaggacaaaagcttttcaatatgttgcgccttggaaaatctgaaccatggacactggctctggagaatgttgttggagcaaagaatatgaatgtccggcctttgttaaactacttcgaaccactctttacttggctaaaggatcaaaataagaattcatttgttggatggagtacggattggtctccatatgcggaccaatcaatcaaagtccgaatttctttgaaaagtgctctaggagacaaagcttatgaatggaatgacaatgagatgtacctctttaggtcctcagtcgcatacgctatgagacaatacttccttaaagtcaaaaatcaaatgattctgtttggagaagaagatgtcagagttgctaacctgaaacccaggatttcttttaatttctttgtcaccgctccaaaaaatgtttccgacatcattccacgaactgaggtcgagaaagctatacgcatgagccgtagccgaatcaacgatgcatttagacttaacgataactctttagaattcttgggtattcagccaacactgggaccccctaaccagccaccggtctctatctggttaattgtctttggcgttgttatgggagttattgtggttgggatcgttatactgatttttacaggcattagggacagaaagaagaaaaataaggcccgtagtggcgagaatccgtatgcttcaattgacatctccaagggagaaaataatccgggatttcaaaataccgatgatgttcaaacatccttt

SEQ ID NO: 6266 - DNA, 2415 bp, synthetic construct
  misc_feature 1..2415: note = source = /note="Description of Artificial Sequence: Synthetic coding sequence"
  source 1..2415: mol_type = other DNA
atgtccagcagctcgtggcttttgctgagccttgtcgctgttacagctgcgcagtccacaatagaagagcaagcaaagacatttctggacaaatttaatcatgaagctgaagatttgttttatcagtcatctcttgcaagttggaactacaacacaaatattactgaagaaaatgttcaaaatatgaataatgcaggtgataagtggagcgcttttcttaaagaacagtctaccttggcacagatgtatccattacaagagattcaaaatcttacagtgaaacttcagttacaggcattgcagcagaatggctcgtccgtacttagcgaagataaaagcaaacgcttaaacacgattctgaatacgatgtctactatctactcaacgggaaaagtttgcaatccagataatcctcaagagtgtctcctccttgaaccgggcctgaatgaaattatggccaatagcctggactacaatgagcgcctctgggcttgggaatcatggcgaagcgaagtcggtaaacaacttcgtcctctgtatgaagagtacgttgtccttaaaaatgaaatggcacgggccaaccattatgaagactacggagattattggcgcggggactacgaagtaaatggtgtagacggatatgactatagcagaggacagttaatcgaagacgtggaacatacctttgaagaaatcaaaccgctctatgaacatttgcatgcttacgtgcgggcgaagctcatgaatgcatatccgtcatacatatctccgatcggatgccttccagcacatcttttgggggatatgtggggacggttttggacaaacttatattcattaactgtaccgtttggacaaaaaccgaacatagatgtaacggatgcgatggttgatcaagcatgggatgcacaacggatctttaaagaagcggagaagttttttgtaagtgttggacttcctaacatgactcagggattttgggagaattcaatgttgacagatcccggtaacgtacaaaaagcggtttgccatccgacagcgtgggatttaggcaaaggggattttcgtatcctcatgtgtacgaaagtaaccatggatgattttctgacggctcatcatgaaatgggacacatccagtatgatatggcctacgcggcgcagccgtttctgctgcgcaatggagccaatgaaggctttcatgaagcggttggagagataatgagcctttctgccgccactccaaaacatctcaaatcaattgggcttttaagccccgattttcaggaagataatgaaactgagattaattttcttcttaaacaagcattaacgatcgtaggcacactcccttttacatatatgcttgaaaagtggagatggatggtatttaaaggagagattccgaaggatcagtggatgaaaaaatggtgggaaatgaaaagagaaatcgttggtgtcgtggaaccggtacctcatgacgaaacatactgcgatccggcaagtctctttcatgtgtccaacgactattcgttcatccggtattatacacgcacgctgtaccaatttcaatttcaagaagctttatgccaggcagccaaacatgaaggaccgttacataagtgtgacatctctaacagcacagaagctggacaaaaactttttaatatgttgcgccttggcaaatcggaaccatggacgctggctctcgaaaacgtagtcggtgcgaaaaacatgaacgtgcgcccgctacttaattactttgaaccacttttcacttggctgaaagatcaaaataagaactcatttgtgggctggtccacagactggagcccgtacgcagaccagagtataaaagttcgaatctcccttaagagcgctctcggtgataaggcttacgagtggaacgataacgaaatgtacctctttagatcctctgtagcctatgcaatgcggcaatactttttaaaggtcaaaaaccaaatgatactctttggagaagaggatgtgcgtgtcgcaaaccttaaaccgcgtatatcatttaatttttttgtaacggccccgaaaaatgtgtccgatatcattccacgtacagaggttgagaaagccatccgcatgagtcgctcacgtattaatgacgcctttcgtttgaacgataatagcctagagtttctgggaattcagcctactttgggcccgcctaaccagccgcccgtttccatttggctaattgtcttcggggtggtcatgggcgtgatcgttgttgggatcgttatcctaatctttacggggatccgggatcgcaaaaaaaagaataaggcaaggtcgggagagaacccttacgcgtcaatcgatatctcaaaaggtgagaacaatccgggcttccaaaatacagatgacgtgcaaacgtcattt

SEQ ID NO: 6267 - DNA, 2415 bp, synthetic construct
  misc_feature 1..2415: note = source = /note="Description of Artificial Sequence: Synthetic coding sequence"
  source 1..2415: mol_type = other DNA
atgtcctcttcttcctggctgctgctgagtctcgtcgctgtgaccgcggctcagagcacaatcgaagagcaggccaagacttttctggacaagttcaatcacgaggccgaggacctgttctatcaatcctcactcgcctcctggaactataataccaatattacggaggagaatgtacaaaatatgaataatgcgggggataagtggtccgctttcctaaaggaacagtcgaccctggcccagatgtatcccctgcaggagattcagaacctcaccgtaaaactgcagttgcaagcgctgcagcagaatggtagctccgttctgtctgaggacaagtccaaacgcctaaatacaattctcaacaccatgtccacgatctactcaaccggaaaggtctgcaaccccgataaccctcaggagtgtctgctgctcgagcccgggctgaatgagatcatggcgaattctttggattataacgaacgtctctgggcctgggagtcttggcgcagtgaggtcggaaagcaactaaggcctttatacgaagagtacgtcgttttaaagaacgaaatggcaagggctaatcattacgaagactacggggattattggagaggagattatgaggtaaacggcgtagacggatatgattactctcggggccagctcatcgaagacgtcgagcacacctttgaggaaatcaaaccactatacgagcacctccatgcatacgtccgcgctaaattgatgaatgcatacccttcttacatcagtcctataggatgtctcccagcgcaccttctgggagatatgtgggggcgcttctggactaacttgtactcgcttaccgttcccttcggacaaaaacccaacatcgacgttacggacgctatggtcgaccaggcctgggacgctcaacggatctttaaggaggccgagaagttttttgtgtctgtgggtctaccaaatatgacgcaaggattctgggaaaattcaatgctgactgatccaggtaatgtccaaaaggccgtgtgtcatcctactgcctgggacctaggaaagggtgacttccgtattctgatgtgcacgaaggtgacaatggatgacttcctcactgctcatcacgagatgggtcatattcagtatgatatggcttatgccgctcaaccatttttacttcgcaatggagccaatgagggttttcatgaagccgtcggcgaaataatgtcactaagtgccgccactcccaaacacctaaagtccattggtctgctatcccctgattttcaggaggataatgagacagagatcaactttttgctaaagcaagccctgacgatagtcgggacattgccctttacctacatgctggagaagtggcgctggatggtgttcaaaggtgaaatcccaaaagatcagtggatgaagaagtggtgggagatgaagagagagatcgtgggagtggtggaaccagtcccgcacgatgagacgtattgcgaccccgccagtctcttccacgtgtccaacgattactccttcattagatattataccagaacactgtaccagtttcagtttcaggaggcactctgccaggccgcaaagcacgaaggtcccctgcataaatgcgatattagcaactccactgaagcaggacaaaagcttttcaacatgctaagattgggcaagtctgaaccgtggacactggccctggagaacgtagtcggagcaaagaatatgaacgttcggccactgctgaactattttgaacccctgttcacatggctcaaggatcagaataagaactccttcgtaggttggtctacggactggtccccctatgctgaccaatccataaaagtgagaatcagccttaagagcgcgctgggcgacaaagcatacgagtggaatgacaacgagatgtaccttttcagatcatccgtggcatacgcgatgcgccagtatttcctgaaagttaagaatcaaatgatactgttcggggaggaagatgtgcgagtagcgaatttgaagccacgcatcagcttcaatttcttcgtgacagccccaaagaacgtgagtgacattatcccgagaactgaagttgaaaaggccatcagaatgtcaaggagcaggattaacgacgccttccgcctaaatgataactccctggagtttctcgggattcaacccactctgggacccccaaatcagcccccagtttccatctggcttatcgtcttcggggttgtgatgggggtgatagttgttgggatagtaatactgatctttacaggtattagagaccgcaaaaagaagaataaagccaggtcgggtgagaatccttatgcatctattgacatctccaagggagagaataacccgggcttccagaacaccgacgacgtccagacttcgttc

SEQ ID NO: 6268 - DNA, 2415 bp, synthetic construct
  misc_feature 1..2415: note = source = /note="Description of Artificial Sequence: Synthetic coding sequence"
  source 1..2415: mol_type = other DNA
atgtcttcttcctcgtggctgctcctgtcacttgtggcagtgacagcggcgcagagcactatcgaggaacaggctaagacctttctcgacaaattcaaccatgaggccgaggatctgttctatcagagcagcctagcgtcctggaattacaacacaaacatcacggaggagaacgtgcagaacatgaacaacgctggcgataagtggtccgcttttctgaaggagcagtctaccctcgcccagatgtaccctctgcaagagatccagaacctgacagttaaactccaactgcaggcccttcaacagaacggatcatctgtgttgagtgaggacaaaagtaagaggctcaatacgatcctcaacaccatgtcgactatctattctaccggcaaggtgtgtaaccctgacaatcctcaggagtgtctgttgcttgagcccggacttaatgagatcatggcaaacagtctggactacaatgaacggctctgggcctgggagtcatggagaagtgaggtgggcaagcagctgagaccgctgtacgaagagtacgtggtcctcaagaatgagatggctcgagcaaaccactacgaggactacggggactattggcggggggactacgaggtgaatggagtcgatggctatgactattctagaggacagctgattgaagatgtcgaacacacgtttgaggagattaaacccttgtacgaacacctgcatgcttacgtgcgcgcgaaactgatgaacgcataccctagctatattagcccgatcgggtgcctacctgcacatttactcggcgatatgtgggggcgattttggaccaacttgtattctctgacagttcccttcggacaaaagccaaatatcgacgtcacagacgcaatggttgaccaggcttgggacgcccagcgcattttcaaggaagccgagaagttttttgtaagcgtgggcctgcccaacatgacccaggggttctgggaaaattcaatgttgaccgaccccgggaatgtgcagaaggccgtctgccaccctactgcatgggatctgggtaagggggatttccggattctgatgtgcactaaagtgactatggacgacttcctgaccgcccatcacgagatggggcatatccaatacgatatggcgtatgcagctcaaccgtttttactgcgaaacggcgctaatgagggcttccatgaggctgtgggcgagattatgagtcttagtgctgctaccccgaagcacctgaagagcatcggcttgctcagtcccgactttcaggaagataatgagaccgaaatcaacttccttctgaagcaggccctcactatagtggggacgctccctttcacttacatgctggagaaatggcgttggatggtcttcaagggcgagatacctaaagatcagtggatgaagaaatggtgggaaatgaagagagagatcgtgggggtggtagaacctgttccacacgatgaaacatattgcgatccagccagcctttttcatgtatccaacgattacagcttcatcagatactacacgagaacgctgtaccagtttcagtttcaagaggccttatgtcaggcagctaagcatgagggacctttacacaaatgtgatatatcaaacagcactgaagcaggacagaagctgttcaatatgctgcgcctcgggaagtctgagccatggacgctggcccttgagaatgtcgtgggggccaaaaatatgaacgttaggccactactgaactatttcgaaccactcttcacgtggttgaaagatcagaataaaaactcatttgtgggctggtccactgattggtctccttacgcagatcagtccattaaggtccggattagtttaaagagtgctctgggtgataaggcttatgagtggaacgacaacgaaatgtacctattccggtcctcagtggcctatgctatgcgccagtacttcttgaaggtgaagaatcagatgattctttttggggaggaggatgtccgcgtggccaacttaaagccccggatcagcttcaatttctttgtgacagctccgaagaatgtgtccgacattattccacgcactgaagtggagaaggccattcgaatgagtagaagcaggatcaacgacgcattccgcctgaatgataattccctggagtttttgggcattcagcctaccctcgggccacccaatcagccacccgtctctatctggctcatcgtgtttggcgtggtcatgggagttatcgttgtgggcatcgtaatcctcatcttcaccgggatcagggaccggaagaaaaaaaataaggcccgttcaggcgagaatccatacgcgtccatcgatatttctaagggcgaaaacaatccagggtttcagaacacagacgatgtgcagaccagtttc

SEQ ID NO: 6269 - DNA, 2415 bp, synthetic construct
  misc_feature 1..2415: note = source = /note="Description of Artificial Sequence: Synthetic coding sequence"
  source 1..2415: mol_type = other DNA
atgtcaagcagttcttggctgctgctctcccttgttgcggtgacggccgctcagagcactattgaagagcaggccaaaacgtttctcgataagtttaaccatgaagcggaagatcttttttaccagtcatccctggcatcttggaattataataccaacatcaccgaagaaaatgtccagaacatgaacaacgctggggataaatggtccgccttccttaaggaacagagcacgcttgcgcagatgtacccactccaggagatccaaaacctgactgtgaaactgcagctccaagctcttcaacagaacggaagcagcgttctgtctgaggataagtccaaacggctgaatacaattctaaacactatgtccacgatctactcaacaggaaaggtttgtaatcctgacaacccacaagagtgcttgctactggagccaggccttaatgaaatcatggccaactcattagactacaatgagcgcctgtgggcctgggagtcatggcgctctgaggtcggaaagcagctccgcccactatatgaggagtacgtggtgctgaagaacgaaatggccagggcaaaccactatgaggactatggagactactggaggggagattacgaggtgaacggcgtggacggctacgactattcgagaggacaactcattgaggatgtggagcacacatttgaggagattaaaccactatacgagcatcttcacgcctatgtgcgggcaaagctaatgaacgcctacccaagctacatttcccccatcggttgtctccctgcccacctcctgggtgacatgtggggacgattttggacaaacctatatagcctgacggtgccgttcgggcagaaacctaatatcgatgtaacagacgcaatggtggaccaggcatgggacgcacagaggatcttcaaggaagccgagaaatttttcgtttcagtgggcctgccgaatatgacacagggattctgggagaactctatgctcacagatccagggaacgtacaaaaagcggtctgccaccccaccgcctgggacctggggaagggagactttaggattcttatgtgcactaaggtgaccatggacgacttcctgaccgctcaccacgagatgggacacattcagtatgatatggcctacgccgcgcagccatttctgctgcggaatggggcgaatgagggcttccacgaggccgtgggggagatcatgtccctcagcgccgcaacaccaaagcacctgaagtccataggactgctctcgccagacttccaggaagataatgaaactgagataaactttttgttgaagcaggctctgacgatcgtcggaaccttaccatttacctatatgctggagaaatggaggtggatggtgttcaagggcgagattccgaaggatcagtggatgaaaaaatggtgggagatgaaacgggagatcgtcggggtggtggagcctgtgccacatgatgaaacctactgtgatccagcgagcctgttccacgtgtcaaacgattatagcttcattagatattacactcgaaccctgtaccagttccaatttcaggaagccctgtgtcaagctgccaagcatgagggccctttacataagtgtgacatttccaatagtacagaggccggacagaaactgtttaatatgctccggctagggaaatccgagccctggaccctggctctagaaaacgtagttggcgccaagaacatgaacgtgaggccactgctgaattatttcgagcccctgtttacttggctgaaagaccagaacaaaaactcatttgtcggatggagtacagactggtccccgtacgctgatcaaagcatcaaggttcggatctcgctgaaatcggcccttggggataaggcctatgaatggaatgataacgagatgtatttgtttcggtcatctgtggcttatgcaatgagacagtacttcctgaaagtcaagaatcagatgatcttgtttggagaagaagatgttagagttgcaaatctgaaacccagaatctcttttaattttttcgttacagcaccaaagaatgtgagcgatatcatccccagaacagaagtcgagaaagccataaggatgagccgctcccgcattaatgacgcctttagactcaacgataactcgctagaatttctcggcatccagcctactttgggtccacccaaccagccaccagtgagcatctggctgattgtgtttggagtggtgatgggagttattgtcgtgggtatagtgatcctgatctttaccggcatccgagacaggaagaagaagaacaaggccaggtctggggagaacccttatgctagcatagatatttccaagggggaaaacaacccaggtttccagaacaccgacgacgttcaaacatctttc

SEQ ID NO: 6270 - DNA, 2415 bp, synthetic construct
  misc_feature 1..2415: note = source = /note="Description of Artificial Sequence: Synthetic coding sequence"
  source 1..2415: mol_type = other DNA
atgagcagctcaagctggctgcttctgagccttgtggcagtgaccgcagcgcaatcgaccatagaggaacaagctaaaacctttctggataagtttaaccatgaagctgaagatctcttctaccaatcgtctctggcaagctggaactacaataccaacataaccgaagagaacgtgcagaatatgaataacgctggcgataagtggagcgcatttcttaaggaacaatcaactcttgcccagatgtacccactccaggagatccaaaacctcaccgtgaagttgcaattgcaggcactgcagcaaaacggatcatcggtgctttcggaagataagtccaagagacttaataccattctcaacactatgtcgactatttactccactggtaaggtgtgtaacccggacaatcctcaggaatgtctgcttcttgagcccgggctgaacgagattatggcaaactctttggattacaacgaacgactgtgggcatgggagtcgtggcgctccgaggtggggaagcaacttcgtccgctctatgaggagtacgtggtcctgaagaacgaaatggcacgggcaaaccactacgaagattacggagattattggagaggggattacgaagtgaatggagttgacggatacgactacagccgtggacaattgatcgaagatgttgaacacacctttgaagaaatcaagcctctctacgagcaccttcatgcttatgtgcgcgccaaacttatgaacgcatacccgtcgtacatcagccctattggttgtctgcctgcacacctgcttggagatatgtggggcaggttttggactaacctgtactcccttacggtgccatttggacaaaaaccgaatattgatgttaccgacgcaatggtcgatcaggcgtgggacgcccaaagaatattcaaggaggcagagaagtttttcgtgagcgtcggactccccaatatgactcagggcttttgggaaaacagcatgcttacggacccaggcaatgtgcaaaaggcagtgtgccacccaactgcatgggatcttggaaagggagacttcaggattctgatgtgcaccaaggtgaccatggatgacttcttgacggcacatcacgaaatgggccatatacagtacgatatggcttacgccgcgcagccttttctgctccgcaacggtgcaaacgaaggttttcatgaagccgtcggagagattatgtcactttcagccgccacccctaagcacctcaagtcgattggactgctttcgccggattttcaggaggataacgaaaccgagattaactttcttttgaagcaagcccttactattgtgggaaccttgccatttacctacatgctggaaaagtggaggtggatggtgttcaagggtgaaattcccaaggatcaatggatgaaaaagtggtgggagatgaagcgcgaaatagtgggagtggtcgaacctgtgcctcatgatgaaacctactgtgacccagcgtcacttttccatgtgtcaaacgattactcgtttattcggtactacactagaactctgtaccagtttcaatttcaagaggccctgtgccaggctgcgaagcatgaaggaccccttcataagtgtgacatctcgaattccactgaagcaggacagaaacttttcaatatgcttagacttgggaagagcgagccgtggactctggcactggaaaatgtggtgggtgcaaaaaacatgaacgtacgaccactgcttaactactttgagccgctttttacttggcttaaagatcaaaacaaaaactcgtttgtgggttggagcaccgattggtccccatacgcagaccagtccattaaagtcaggatatcacttaaatcagcacttggggataaggcgtacgaatggaacgacaatgaaatgtatctgtttagaagctcagtggcatacgcaatgcggcagtacttcctgaaagtgaagaatcagatgatcttgtttggggaggaagatgtcagagttgcaaacctgaagcctaggatttcatttaacttttttgtcaccgcgccgaaaaacgtgtcggatatcatacccagaacggaagtggaaaaggctatccgcatgtcgcgcagtcggatcaacgacgcctttagattgaatgataactcgcttgagttccttgggattcaaccaacccttggtccccctaaccaaccacctgtgtccatttggcttattgtctttggggtggtgatgggggtgattgtggtgggtattgtgatcctgatcttcactgggatccgggatcgcaagaaaaagaacaaggcgaggtcaggagagaatccttatgcaagcatcgatatcagcaaaggcgagaacaatccgggttttcaaaatactgatgatgtccagactagcttt

SEQ ID NO: 6271 - DNA, 2415 bp, synthetic construct
  misc_feature 1..2415: note = source = /note="Description of Artificial Sequence: Synthetic coding sequence"
  source 1..2415: mol_type = other DNA
atgtctagtagctcctggttgctgttgagtctcgtggctgtgaccgccgcccagtctactatcgaggagcaagctaaaacttttttggataagttcaaccatgaggccgaggatctgttttatcagagctctttagcgtcctggaactataacactaacatcactgaggaaaacgttcagaatatgaacaatgcaggggataagtggtccgctttcttaaaggaacaaagcactttagctcagatgtacccgttacaggagatacagaaccttaccgttaagctccagctccaggccctacaacagaatggctcttccgtcctgtcagaagacaaaagcaagaggcttaataccattctgaacactatgagtaccatatattccacaggcaaggtctgcaaccctgataacccccaggaatgtctgctcttggagcctggactgaatgagataatggctaattcccttgactacaacgagaggctgtgggcatgggagagctggcgatccgaagttgggaaacagctgaggcccctgtatgaggagtacgtcgtgctgaagaatgagatggcacgagccaaccactatgaggattacggggactactggagaggggactatgaagtcaacggagtggacgggtacgattattcccgagggcaactgattgaagatgtggagcatacctttgaagagatcaagccactttacgagcacttgcatgcatacgtgcgcgccaaattgatgaacgcctacccttcctacatctcacccatcgggtgcctgcccgcccacctactgggagacatgtggggcagattttggactaacctgtactctctcacggtcccatttggtcaaaagcctaacatcgatgtgactgacgccatggtggaccaggcctgggacgcacaaagaatctttaaagaggccgagaaattcttcgtgagcgttggtttaccaaacatgacccagggattttgggagaatagcatgctcacagacccaggtaacgtccagaaggccgtgtgtcatccgaccgcatgggacctaggaaagggagactttaggatactgatgtgtaccaaggttactatggacgacttcctcacagcacatcacgagatgggacatatccagtatgacatggcgtatgccgcgcagccgtttctcctccggaacggggctaacgaggggttccatgaagccgtaggcgaaatcatgagcctgtctgccgccacacctaagcaccttaagtctataggcctcttgtcgccggacttccaggaggacaacgaaacagaaatcaactttctgctgaagcaggcgctaaccattgttggaactctgccctttacatatatgctagagaagtggcgatggatggtgttcaagggagagattcccaaagaccagtggatgaagaagtggtgggagatgaagcgcgagatcgtgggggtcgtcgagcccgtgccacacgacgaaacgtactgtgacccagcctcactctttcacgtcagcaatgattactcattcatccggtactatacccgcacgctctaccaattccagttccaggaagcgctctgccaagccgctaagcacgagggaccactccataagtgcgacatatctaattcgactgaggcaggacagaagttgtttaacatgctgaggctgggaaaaagcgagccatggacgcttgctttggagaacgttgtgggcgctaagaacatgaacgtgcgccccctgttaaactacttcgaacccctgttcacgtggttgaaggaccagaataagaattcctttgtcggatggtctaccgactggtctccatacgccgaccagtccatcaaagtccgaatctcccttaaaagcgcactgggggataaggcctatgaatggaacgacaatgagatgtacctgttcaggtccagcgtggcttacgccatgagacaatactttttgaaggtgaaaaaccagatgatcctgtttggcgaggaagatgttcgagtggctaatttaaagccccgaataagtttcaatttctttgtcacggcaccaaaaaatgtgtcagacattatccccaggacagaggtcgaaaaggctatccggatgagtcggagccggatcaatgatgctttcagactgaatgacaacagcctagaattcctgggaattcagccaacgctgggcccacccaaccaacctccggttagcatttggcttatagtattcggggtggtcatgggcgtgatcgttgtaggtattgtgatcctgatcttcaccggcatacgggacagaaagaagaaaaacaaggcacggtctggagagaatccttacgccagtatagacatctctaagggagaaaacaatcctgggtttcagaatacagatgacgttcagacaagcttc

SEQ ID NO: 6272 - DNA, 2415 bp, synthetic construct
  misc_feature 1..2415: note = source = /note="Description of Artificial Sequence: Synthetic coding sequence"
  source 1..2415: mol_type = other DNA
atgagcagcagcagctggctgctgctctccctggttgctgtgaccgctgcacagagcactatcgaagaacaggccaagacttttttagataagtttaaccatgaggccgaagatctgttttaccagtccagcctggcgtcctggaactacaataccaacatcacagaagagaacgtgcaaaatatgaacaacgcaggagataaatggagcgctttcttaaaggagcagtccacactggctcagatgtacccgcttcaggaaattcaaaaccttacggttaagttgcaactgcaggcactgcagcagaacggctcctcagtattgagtgaggacaaatcaaaaaggcttaacacaatcctcaatacaatgagcaccatctactcaactggaaaagtgtgtaatcctgataacccacaggagtgcctgctgctggaaccaggtcttaatgaaatcatggccaactctctcgactataatgagaggctgtgggcctgggagtcctggaggagtgaggtcggtaagcagctcagaccactgtacgaggaatatgttgttttaaaaaacgaaatggctagagcaaaccactacgaggattatggagattactggcgaggggactacgaggtcaacggagtcgatgggtacgactattcacgcggacaactcattgaggatgtggagcatacttttgaagagatcaaacctctgtacgaacacttgcacgcatacgttagggcaaaactcatgaacgcttatcctagctacatcagtccgattggttgtttacccgcgcatctgctgggtgatatgtggggcaggttttggaccaatttgtacagcctcactgtgcccttcggccaaaaaccaaatatagatgtcaccgatgccatggtggatcaggcatgggacgctcagcgaatctttaaggaagcagagaaatttttcgtgtccgtaggcctgcctaacatgacacagggtttttgggaaaatagcatgctgactgatcccggcaatgtgcaaaaagctgtgtgccaccccactgcatgggaccttgggaaaggcgattttcgcattttaatgtgcactaaagttacaatggatgatttcctgaccgcccatcacgaaatgggacatatccaatacgatatggcctatgctgcgcaaccatttctgctgcggaatggcgcaaacgaggggttccacgaggctgtcggcgagataatgagtctgagtgcagcaactcctaaacacctgaaaagcattgggctcctctcaccggattttcaagaggataatgagaccgaaataaacttcctcctgaagcaagctctcacaattgtggggaccctaccctttacctacatgctggaaaagtggaggtggatggtgtttaaaggcgagatccctaaagatcaatggatgaagaagtggtgggaaatgaagcgcgaaatcgttggggtggtcgaacccgttccacacgacgaaacctactgcgatcccgcgtcactgttccatgtgagtaatgattacagctttatcagatactacacccggaccctttatcaattccagtttcaagaggccctttgccaggccgctaagcacgaaggccctttgcacaaatgtgatatcagcaacagtactgaggctggtcagaagttgttcaacatgctgaggctggggaagagtgaaccctggacccttgctctggaaaacgtggtgggagcaaagaacatgaatgtccgcccgctccttaactatttcgaacccctgtttacttggcttaaagatcagaataaaaactcatttgtcggctggtccaccgattggagcccatacgctgatcaatctatcaaagtgagaatttccctgaagtctgccctcggagacaaggcttacgaatggaacgataacgaaatgtatctgtttcgttctagcgtggcatacgcaatgagacagtactttctgaaggtgaagaatcaaatgatcttgttcggtgaggaagatgtaagagttgccaatttgaagcccagaatttcgtttaactttttcgtgaccgcccctaaaaacgtgagcgatatcattccaagaacagaggtagaaaaggctatacgcatgagtagatccagaattaacgacgcgttccgcctcaacgataacagtctggagtttcttggaatccagcctacactggggccccccaaccagcctcccgtgagcatctggctcatcgtctttggcgtggtgatgggcgtgatcgtggtggggattgtcatcctcatcttcacaggaataagagataggaagaaaaagaataaggccaggtccggggaaaacccgtacgcaagcattgacatcagtaagggggagaataacccaggctttcaaaacacagatgacgtgcaaactagcttt

SEQ ID NO: 6273 - DNA, 2415 bp, synthetic construct
  misc_feature 1..2415: note = source = /note="Description of Artificial Sequence: Synthetic coding sequence"
  source 1..2415: mol_type = other DNA
atgtcctcgagctcctggttgcttctgtcgctggtcgcagtgactgcagcccaaagtactatcgaagaacaagccaagacctttctcgacaagttcaaccatgaggcagaggatctcttctaccaatcgtccctggcttcgtggaactacaacactaacattactgaggagaatgtgcagaacatgaataacgcgggagacaagtggtcagcgttcctgaaagaacaatccactctcgcacagatgtaccccctgcaagaaattcaaaaccttaccgtgaaactgcaactgcaggctctgcagcaaaacggatcgtccgtgctgtctgaagataaatccaagcgacttaacaccattctcaacactatgtcgaccatatactcgactggtaaggtgtgtaacccagataaccctcaagaatgtctcctgcttgagcccggcttgaatgagataatggcaaactcattggattacaacgagagactgtgggcgtgggagtcatggcggtcggaagtcggaaagcagctcagaccactgtacgaggaatacgtggtgcttaagaacgagatggcacgggcgaaccattacgaagattatggagattactggcgcggcgactacgaagtgaacggcgtcgacgggtacgactactcccgcggtcagcttatcgaggacgtggaacacacttttgaagagataaaacccctctacgaacatttgcatgcatacgtccgtgcaaaacttatgaacgcctacccaagctacatttcgcctattggatgtctcccagcacatctcttgggagatatgtggggacgcttttggaccaacctttactcgctcacggttccatttggccagaagccgaacatcgatgtgactgatgcaatggtcgatcaggcatgggatgcacaacgaattttcaaggaggccgagaagttttttgtgtcagtgggtctgcctaacatgacccaagggttttgggaaaactcaatgctgaccgatcccggaaacgtgcaaaaggcagtgtgtcatccaactgcatgggatctgggtaaaggtgattttagaatcctgatgtgtactaaggtcactatggatgattttcttacggcacaccacgagatgggccatatccagtacgatatggcctacgccgcacaaccttttctgcttagaaatggtgcaaacgagggctttcatgaggcagtgggagaaatcatgtccctctcggcagcgacgcctaaacatcttaaaagcattgggctcctttcccccgattttcaagaggataacgaaactgaaatcaacttcctccttaagcaggcactcactattgtgggaaccctgcctttcacttacatgctggaaaaatggcgctggatggtgttcaagggagagattccaaaggatcaatggatgaagaagtggtgggagatgaagcgagaaattgtcggagtggtggaaccggtgcctcatgatgaaacctactgcgatcctgcatccctttttcatgtatcaaacgattattcattcattaggtactacactcgcactctgtatcagttccaattccaagaggccctttgtcaagccgcaaaacatgagggacctcttcacaagtgcgacattagcaacagcaccgaggcaggtcagaagttgttcaacatgctccgtctgggaaagtcagagccgtggactcttgctctcgaaaatgtcgtcggagcgaagaacatgaacgtgaggcctctgcttaactattttgagccgcttttcacgtggttgaaggatcagaacaagaactcgtttgtggggtggtcgacggactggtccccctacgcggatcagtcaattaaggtgcggatatccctgaagtccgcactgggtgacaaggcatacgaatggaacgataatgagatgtaccttttccgctcgagcgtcgcgtacgcaatgcggcagtactttctgaaggtcaaaaatcaaatgattctgttcggtgaagaagatgttcgcgtggcgaacttgaagcctcggatatccttcaatttctttgttactgctccaaagaatgtgagcgacattattcctagaaccgaggtggagaaggcaattcggatgtcccggagccgtataaacgatgcattccgcctgaacgacaacagccttgagttccttggtattcaacctactctgggcccgcccaaccaaccacctgtctctatttggctgatcgtctttggcgtcgtgatgggagttattgtcgtcggaattgtcatactgatctttaccgggatcagagacagaaagaagaagaataaggccaggtccggagaaaatccttatgcttccatcgatatttccaagggggaaaacaatcctggattccaaaacactgacgacgtccagacttcattt

SEQ ID NO: 6274 - DNA, 2415 bp, synthetic construct
  misc_feature 1..2415: note = source = /note="Description of Artificial Sequence: Synthetic coding sequence"
  source 1..2415: mol_type = other DNA
atgtcctcgtcctcctggctgcttcttagcctggttgcggtgactgcagcccaaagcaccatcgaagaacaggcaaagacttttctcgacaaattcaaccatgaggcagaagatctcttttaccagagctctcttgcttcatggaactacaacaccaatatcacggaggaaaacgtgcaaaacatgaataacgcaggcgacaagtggtctgcatttttgaaggagcaatcaactcttgcgcaaatgtacccactgcaggagatacagaatttgactgtgaagctgcaactgcaagcactccaacagaacggatcctcggtcctgtcggaagataaatcgaagcgccttaacacgattcttaacactatgagcaccatttactcaactggtaaggtgtgtaatcctgacaacccacaggaatgcctcctccttgaacccggactcaacgaaatcatggcaaacagccttgattacaacgaacgactctgggcatgggagtcgtggcgctccgaggtcggaaagcagctgcggcccctctacgaagaatacgtcgtgcttaagaacgaaatggcacgtgcaaaccactacgaagattacggagattactggagaggtgactacgaagtgaatggagtggatggttacgactactcgcgaggtcaactgatcgaggacgtcgaacacactttcgaggagataaagcctctctacgaacacctccatgcctacgtccgggcaaaacttatgaacgcgtatcctagctacatctcccctataggttgtctgccagcgcatcttctgggagatatgtggggacgcttctggacgaacctgtactcgcttactgtgccgtttggccagaaaccaaacatcgacgtgactgatgccatggtcgatcaggcctgggatgcacagcgtattttcaaggaagctgagaagttttttgtctcggtggggctgccaaacatgactcaaggtttctgggagaacagcatgctgacggaccctggcaatgtgcagaaggcggtatgtcaccctaccgcgtgggatctgggaaaaggtgactttagaatcctgatgtgtaccaaggtgaccatggacgatttccttaccgcacaccatgagatgggccacattcagtacgatatggcatacgccgcacagcccttcctgctgaggaacggtgcgaacgagggttttcatgaggccgtgggggagattatgtcgctttccgccgcaacgccaaaacatctgaagtcgattggacttctgtcgccagattttcaggaggataatgaaaccgagattaactttctccttaagcaagcactgaccattgtgggcactcttccattcacgtacatgctggaaaagtggagatggatggtgtttaaaggtgagatacctaaagatcagtggatgaagaagtggtgggaaatgaagagagaaatcgtcggagtcgtggaaccagtgcctcatgatgaaacgtactgtgatcccgcgagtctctttcatgtgagcaacgattactcattcataagatactacaccaggactctgtaccagttccagtttcaagaagcactgtgtcaagcagcgaagcacgaaggacccctccataagtgcgatataagcaactctaccgaagcaggacagaagctgtttaacatgctgcgactgggcaaaagcgaaccttggactctcgcacttgaaaacgtggtgggagcaaagaacatgaatgtgcgccccctgctgaactacttcgagcctctgttcacctggctgaaggatcaaaacaagaactcgtttgtgggctggtccactgattggtccccgtatgcagatcaatcgatcaaggtgcggatttccctgaaatcagccctgggtgataaggcttacgagtggaacgataatgaaatgtacctgttcagatcatctgtggcctacgctatgagacaatacttccttaaagtcaagaatcagatgattcttttcggtgaggaggacgtgagagtcgcaaacctgaagccacggatttcgtttaacttttttgtcaccgcacccaagaacgtcagcgatatcattccgcgcaccgaggtcgaaaaggcaatccgtatgtcaagaagcagaataaacgacgcctttcggctgaacgacaactctcttgaatttctgggtattcagcctaccctcggacccccgaatcaaccgcctgtgtcgatctggcttattgtgtttggagtcgtgatgggggttattgtcgtcggaattgtgatcctgatctttactggtatccgggatcgtaaaaagaagaataaagcccgcagcggtgagaacccttacgccagcattgatatctcgaaaggcgaaaacaatcctggtttccaaaacaccgatgatgtgcagacttcgttc

SEQ ID NO: 6275 - DNA, 2415 bp, synthetic construct
  misc_feature 1..2415: note = source = /note="Description of Artificial Sequence: Synthetic coding sequence"
  source 1..2415: mol_type = other DNA
atgtctagttcaagctggctgctcctgtccctggtggcagtgaccgccgcccaatcgactatcgaagagcaggctaaaactttcctggataagttcaatcatgaggcagaagatctgttctaccaatccagcctggccagctggaattacaatacgaacatcacggaagaaaatgtgcagaacatgaataacgctggagacaaatggtcggcctttctgaaagaacaatctaccctggcgcagatgtacccgcttcaggaaatccagaatctgaccgtgaaactccagctccaagcgctgcaacaaaacggcagcagcgtcctctccgaggataagtcaaagcgtcttaacaccatcctgaacactatgtcgacgatctactcaaccgggaaagtctgcaacccggataatccgcaggaatgcctgctgctcgagccgggactgaatgagattatggccaactccctggactacaacgaaagactctgggcgtgggagtcttggaggtcggaagtaggtaagcagctgcgcccactgtacgaggaatacgtggtcctgaaaaatgaaatggcgagagcaaaccactacgaggactacggagattactggcggggagactacgaggtgaacggagtggatgggtacgactacagtagagggcagttgatcgaagatgtcgaacataccttcgaagagatcaagccgctctacgagcacttgcacgcctacgttcgggcgaagctcatgaacgcttacccgtcatacatcagcccgatcggttgcctgcctgcccacctgctcggggatatgtggggtcgcttttggactaacttgtactcgcttactgtgcctttcgggcagaagcccaatattgacgtcaccgacgccatggtcgatcaggcctgggacgcccagcgaatcttcaaggaggccgaaaagttcttcgtgtccgttggactccctaatatgacccagggcttctgggaaaactcgatgctcactgacccgggcaatgtccagaaagcggtttgtcaccctacggcctgggatttgggcaagggagatttcagaatcctgatgtgcactaaggtgaccatggacgactttttgaccgcacaccatgaaatggggcacattcaatacgatatggcatatgctgcacagccattcctgttgcgcaatggcgctaacgaaggttttcacgaagccgtcggcgagataatgtcactttcggcagctactccaaagcatttgaaatcgatcggactgctctcacccgacttccaggaagataacgaaactgagatcaatttcctgctgaaacaagctctcactatcgtgggaaccctcccgtttacttatatgctggaaaagtggcgctggatggtgttcaaaggagagatcccgaaggatcaatggatgaagaaatggtgggagatgaagcgcgaaatcgtgggagttgtggagccggtcccgcacgacgaaacctattgtgaccctgcttctctcttccatgtgtcaaatgattattcgttcatccgctactacacccggaccctgtaccaattccaattccaagaggcactctgccaggcagccaagcacgaaggaccgcttcataagtgcgatatctcgaactccacggaggcaggccagaagttgttcaatatgctgagacttggaaagagcgaaccgtggaccctggccttggaaaatgttgtcggagcgaagaatatgaacgtgcggcctcttctgaattactttgaaccactgttcacctggctcaaggatcaaaacaaaaacagcttcgtcggatggtctactgactggagcccgtacgcagaccagagcatcaaggtgcgcatctcgctgaagagcgccttgggagacaaggcatacgagtggaacgataatgagatgtatttgttccgcagcagcgtagcttacgcgatgagacagtacttcctgaaggtcaagaaccagatgatcctctttggagaagaagatgtgcgcgtggcaaacctgaagcctcggatctccttcaacttttttgttaccgccccaaagaatgtgtcagacatcatcccgcgcaccgaagtcgaaaaggcgatccgaatgtcccgctcgagaatcaacgacgccttcagattgaacgacaactcgctggaattcttgggcattcagccaaccctgggaccgccaaaccagcctcctgtctccatttggttgattgtgttcggagtggtgatgggtgtgatcgtcgtcggcatcgtcattctgatcttcactggaatcagggatcggaagaagaagaacaaggcgcggtccggagagaatccgtacgcttcgatcgatatctctaagggagagaacaacccagggttccagaacaccgatgacgtgcaaacctcgttc

SEQ ID NO: 6276 - DNA, 2415 bp, synthetic construct
  misc_feature 1..2415: note = source = /note="Description of Artificial Sequence: Synthetic coding sequence"
  source 1..2415: mol_type = other DNA
atgagctccagctcgtggttgctgctgtctctcgtcgccgtgactgcagcgcagtccaccatcgaagagcaagcgaaaacgttcctggacaagttcaaccacgaagccgaggatctgttttaccagtccagcctggcgtcatggaattacaacaccaacatcacggaagagaatgtgcagaacatgaacaacgccggagataaatggtccgccttcctcaaagagcagtcaacccttgcacagatgtacccactgcaagaaattcagaacctcaccgtcaagctgcagttgcaagccctccagcaaaacggttcgtctgtcctgagcgaggacaagtcgaaacggttgaataccattttgaatactatgtccaccatctactcgaccgggaaggtgtgcaacccggacaatccccaagaatgtttgctcctcgagcctgggctgaatgaaatcatggccaattccctcgactataacgaaagactgtgggcatgggagtcgtggcgctcagaggtgggtaagcagctccggccactgtacgaggagtacgtcgtgctgaagaacgaaatggccagagctaaccactacgaggactacggagactactggcggggagactacgaggtgaacggcgtggacggatacgattacagccgcgggcagcttatcgaggatgtagaacatacctttgaggagatcaagcccctttacgagcatctccatgcctacgtgcgcgcaaagctgatgaacgcatacccttcgtacattagcccgatcggatgtctgcccgcccacttgctcggagatatgtggggacggttttggactaacctgtacagcttgactgtgccgttcgggcaaaaaccgaatatcgacgtgaccgatgcgatggtggaccaggcctgggacgcgcaacggatcttcaaggaagctgaaaagtttttcgtgtccgtcggactcccaaatatgacccaggggttctgggagaacagcatgctcaccgacccaggaaacgtccagaaggcagtgtgccatcctactgcgtgggacctgggaaaaggagacttccgtatcctgatgtgcacgaaagtgactatggatgatttcctgaccgcgcatcacgagatggggcacatccagtacgacatggcctacgccgcccaaccgtttctcctgcgaaacggtgcgaatgagggatttcacgaagctgtgggagagatcatgagcctgtcggcagcaacgccaaagcacctcaaatccattggcctgctttcgccagacttccaggaggataatgagactgagatcaacttcctgctcaaacaagcactgactatcgtcggaaccctccctttcacgtacatgctcgagaagtggagatggatggtgttcaaaggcgagatcccgaaggaccagtggatgaagaagtggtgggagatgaagagagagatcgtcggcgtggtggagcccgtcccacatgacgaaacctactgcgatccggcgtcgctcttccacgtgtcaaatgactactccttcatccgctactacacccggactctctaccagttccaattccaggaagctctgtgtcaagctgccaaacacgaaggacctctgcataaatgcgacattagcaactccactgaagccggacaaaagctcttcaacatgctgcggctggggaaatccgagccatggaccctggcgctggaaaatgtggtgggagcgaagaatatgaacgttagacccctgctcaattacttcgagccgctctttacttggttgaaggaccagaacaaaaacagcttcgtgggatggtcgaccgattggagcccgtacgcggatcagtcgatcaaggtccgcatctcgctgaagagcgccttgggagacaaggcctacgaatggaacgataacgaaatgtacttgttccgctcgagcgtggcttatgcaatgcgccagtacttccttaaggtgaaaaaccaaatgattctctttggagaggaggatgtcagagtcgccaacctgaaaccgagaatctcgttcaacttcttcgtcactgctcctaagaatgtgtcggacatcatcccacgcactgaggtggagaaggccattcgtatgtcgcgctcgcggatcaacgatgcatttcggctcaacgacaattccctggaattccttggaatccaaccaaccctcggacccccaaaccagccgccggtgtctatctggctgatcgtgttcggagtggtcatgggtgtgatcgtggtgggcatcgtcatcctgattttcaccggcatccgcgatagaaagaagaagaacaaagctagatcaggagagaatccgtacgcgagcatagatatatccaagggagaaaacaacccgggatttcagaataccgacgacgtgcagacgagcttt

SEQ ID NO: 6277 - DNA, 2415 bp, synthetic construct
  misc_feature 1..2415: note = source = /note="Description of Artificial Sequence: Synthetic coding sequence"
  source 1..2415: mol_type = other DNA
atgtcatcttcttcatggctgcttctgtcactggtggcagtgaccgcggcacagtctactattgaagaacaggctaaaaccttcctggacaagtttaatcacgaagccgaggacctcttttaccagtcgagcctcgcatcctggaattacaacaccaatatcactgaagaaaatgtgcaaaacatgaataatgcaggcgataagtggtcagcatttcttaaagaacaatccaccctcgctcaaatgtaccccctgcaagagatccagaacttgactgtcaaacttcaactgcaggcgctgcagcagaatggcagctccgtgctgtcagaggacaaatcgaagcggctgaacactatcctcaacaccatgtccactatctactccactggaaaagtgtgcaatcccgataaccctcaagaatgtctcctgttggagcccggcttgaacgagataatggctaatagcctggattacaatgaaaggctgtgggcctgggaatcgtggaggtcagaagttgggaagcaacttcggcccctgtacgaagagtacgtagtgcttaagaacgagatggcacgcgccaatcactacgaggactacggcgactattggagaggtgattacgaagtgaatggtgtggacggatacgattacagccgcggtcaacttatagaggacgtcgagcatacctttgaagagatcaaacctctttacgaacatctccatgcatacgttcgcgcaaagctcatgaacgcatatccatcctacatttcccctattggatgcttgcccgctcacctgctgggcgatatgtggggccgcttctggactaatctctactcactgaccgtgccttttggtcagaagccaaacatcgacgtgactgacgcaatggtggatcaagcatgggatgcacaaaggattttcaaagaagcagaaaagttctttgtgtccgttggactgcctaacatgacgcaggggttctgggaaaactccatgctgacggaccccgggaacgtgcaaaaggcggtctgtcatcctaccgcttgggatttgggaaaaggtgactttaggattctgatgtgcaccaaggtcaccatggacgatttcttgaccgcccaccacgaaatgggacatattcaatacgacatggcctacgccgcgcagccttttttgcttcgtaatggtgcaaatgagggcttccatgaggcagtgggtgagattatgtccctgtccgcggcaacccctaagcatcttaagagcattggcttgctttccccggattttcaagaagataacgaaactgagataaacttcctgctcaagcaagcgcttactattgtgggaacgttgcctttcacgtacatgctggaaaagtggagatggatggtctttaaaggcgaaatcccgaaggatcagtggatgaagaagtggtgggagatgaagcgggagatagtgggtgtcgtggaaccagtgccccacgatgaaacctactgcgatccagccagcctgtttcatgtgagtaatgattacagctttattcgttactacactcgtaccctgtaccagtttcagtttcaagaagccctctgtcaggctgccaagcatgagggtccactccataagtgtgatatatcgaatagcactgaagcagggcagaagctcttcaatatgctgcgtctgggcaagtcggaaccttggacgctggctcttgagaatgtcgtgggcgccaaaaacatgaacgtgcggcctctgctgaattactttgagccgctctttacctggctgaaggatcagaataagaactcttttgtgggatggtcgaccgactggtcaccttacgccgaccagtccatcaaggtgagaatttcccttaagtccgcactgggggataaggcatacgagtggaacgataacgaaatgtacctgttcaggtcatccgtggcatacgcaatgcgccagtactttctcaaagtgaagaatcaaatgatcctgtttggagaagaggacgtcagagtggcaaatcttaagccaagaatttcatttaactttttcgtcaccgccccaaagaatgtttcggacataatcccgcgaaccgaggtggagaaagcaatccgaatgtcgcgctcacggattaatgatgctttccgcctgaacgataattcgttggagttccttggaatccaaccaacccttggacctcccaaccagcctccagtcagcatttggctcatcgtgtttggtgtcgttatgggagtgattgttgtgggaattgtgatcttgatctttactggcattcgggatcgcaagaaaaagaacaaggctcgatcgggagaaaatccatacgcatcgattgatatttccaagggagaaaacaaccccggatttcagaatacggatgacgttcagacttcgttc

SEQ ID NO: 6278 - DNA, 2415 bp, synthetic construct
  misc_feature 1..2415: note = source = /note="Description of Artificial Sequence: Synthetic coding sequence"
  source 1..2415: mol_type = other DNA
atgtcatcatctagctggttgctgctgtcactcgtcgccgtgactgcagcgcaaagcaccatagaggagcaggccaaaaccttccttgataagttcaatcacgaagctgaggatctcttctaccagtcttccctcgcctcttggaactataacacaaacataaccgaggaaaatgtccagaacatgaacaatgccggggataagtggtcagccttcctgaaagagcagtccacactggcccagatgtacccactacaagaaattcaaaacctgactgtgaagctacagctgcaagcattacagcaaaatggttccagcgtgctgtcagaggacaaatcaaaacgacttaacactattctgaacacgatgtcaactatttattccacgggcaaagtctgtaacccggataatcctcaggagtgtttgctgttggagcctggccttaacgagattatggcaaactccttagactataatgagcggctgtgggcgtgggagtcctggcggtctgaagtcggaaaacagttaagacccctgtatgaagagtatgtggtcttgaagaacgagatggctcgtgccaaccactacgaagattatggggattattggcgcggggactacgaagtaaacggtgtcgacggctacgattatagccgcggccagttgatcgaagatgtggagcacacttttgaggaaatcaaacccttgtatgagcatctgcacgcctatgtacgagcgaagttgatgaacgcttatccgtcctacatttctccaatcggctgtctaccagcgcatttgctgggagacatgtgggggcgattctggacaaatctgtattctctgacggtgccttttggacagaagccgaacatcgacgtaaccgatgcaatggttgatcaggcgtgggacgcgcagcgcattttcaaggaggcggaaaaattctttgtcagcgttggactgccaaacatgactcaggggttttgggaaaactccatgctgaccgatccgggaaacgtgcagaaggcagtttgccaccccacagcatgggatttgggaaagggcgatttccggatcctgatgtgtactaaggttacaatggacgattttctgacagcccaccacgagatgggacatattcagtacgacatggcctatgccgcccaacctttcttgcttagaaatggagctaatgaggggttccatgaggctgtgggggagatcatgtcactgtctgccgctacacccaagcacctaaaaagcattggactgctgagcccggattttcaggaagataatgaaacagagatcaattttctcctgaagcaggccttgaccatagttggcacgctccccttcacgtatatgcttgaaaaatggcggtggatggtctttaagggagagatacccaaagatcagtggatgaaaaagtggtgggagatgaagcgggagattgtgggagtggtcgagccggtgccacatgacgagacttattgcgaccccgcatctctctttcacgtgtctaacgactactctttcatacgatactacactcggactctgtatcagttccaatttcaggaggcactgtgccaggccgctaagcatgaagggcctctgcacaaatgcgatatttccaattccacggaggccggacaaaagttgtttaatatgctccgccttggaaagtctgagccctggacactcgccctggaaaacgtggttggtgctaagaatatgaatgtaagacctcttcttaactatttcgagcctctgttcacctggctgaaggaccagaataaaaacagctttgtcgggtggtcaaccgattggtccccttatgccgatcagagcattaaggtgcgcatctcgctaaaatccgcactgggggataaggcgtatgaatggaacgacaacgagatgtacctcttccgaagttccgtggcctacgccatgcggcaatactttctcaaggtaaaaaatcagatgatcctgttcggggaggaagacgtccgagtcgctaacctgaaaccacggatttcctttaatttcttcgtgacagcacccaaaaacgtctccgatataatccctcgtaccgaggtggaaaaggcgatccgaatgtcccggagtaggataaatgacgccttccgccttaatgataactctctcgaattcctcggtattcagccaacactggggccgcctaatcagcctcctgtgtcaatttggctcatcgtatttggtgtagtgatgggggtaatcgtcgttggtatcgtgatactcatctttacagggatcagggaccgtaaaaaaaagaacaaagccagatcaggcgaaaacccctacgcaagtattgacattagcaaaggcgaaaacaacccaggttttcaaaacacagatgacgtccagacatccttc

SEQ ID NO: 6279 - DNA, 2415 bp, synthetic construct
  misc_feature 1..2415: note = source = /note="Description of Artificial Sequence: Synthetic coding sequence"
  source 1..2415: mol_type = other DNA
atgtcatcgtcgtcctggctgctgctgtcgctcgtcgccgtcaccgcagcccaatcgacgatcgaagaacaggctaagacttttctggataagtttaaccatgaagcagaagatttgttttaccagtctagcctggcctcgtggaactataacaccaacatcactgaggagaacgtgcaaaacatgaacaacgccggggacaagtggtccgcgttccttaaggagcaaagcacgctcgctcagatgtaccccctccaggagatccagaacctgactgtgaaactccagctccaggcgctgcagcagaacggttcgtccgtactctcagaagataaatcaaagcgtctcaatacgatccttaacactatgtcgacgatctactcaaccggcaaggtgtgtaaccctgataacccacaagaatgtctgctcctggaaccgggattgaacgaaatcatggcgaattccctggattacaacgaaagactttgggcgtgggagagctggcgcagcgaggtgggaaaacagctgcgcccgctgtacgaggaatacgtggtgctgaaaaacgaaatggcccgcgcgaaccactacgaggactacggagactactggcggggggactacgaagtcaatggcgtggacggatacgactactcaaggggccagctcatcgaagatgtcgaacataccttcgaagagataaagccgctctacgagcatttgcatgcctatgtccgggccaagctcatgaacgcatacccgtcctacatttcaccgatcggatgccttccggcgcacctgctgggagacatgtggggacggttttggactaacctctattccctgaccgtcccattcgggcaaaagcctaacatcgatgtgaccgacgcaatggttgaccaagcctgggacgctcagaggatcttcaaggaggccgagaaattctttgtctccgtgggactgcctaacatgactcaaggattctgggaaaactcgatgctcactgaccctggaaacgtgcagaaagcggtgtgccatcccaccgcctgggacctgggaaaaggcgatttccgaatcctgatgtgcaccaaggtcacgatggacgactttctcactgcacatcacgagatgggtcatatccagtacgacatggcatacgcggcccaaccattcctcctcagaaacggcgcaaacgaagggttccacgaagccgtgggcgaaatcatgtccttgtccgctgcaaccccgaagcatctgaagtccatcggcctgctgtccccggatttccaagaggataatgaaaccgaaatcaatttcctgctgaagcaggctttgactatcgtcggtactctcccgttcacttacatgctggaaaagtggcgatggatggtctttaagggagagattcccaaagatcagtggatgaaaaagtggtgggaaatgaagcgggaaatcgtgggcgtcgttgaaccagtgccgcacgacgaaacctattgtgacccggcgtcgctgttccacgtgtccaacgattactccttcatccgctactacaccagaactctttaccaattccaattccaggaagcgttgtgccaggcagccaagcacgagggaccccttcacaaatgcgacatctccaatagcactgaagctggccagaaattgttcaatatgcttcgcctcggaaagtcagaaccgtggacgctggcacttgagaacgtggtcggcgcgaagaatatgaatgtgcgccctctgctcaactacttcgaaccactctttacctggctgaaggatcagaacaagaactcctttgtggggtggtcaacggactggtccccgtacgccgaccagtccatcaaagtgaggatctcgctcaagtccgcgctcggagacaaggcttatgagtggaacgataacgaaatgtacctgtttcgctcgtcggtggcgtacgcgatgagacagtacttcctgaaggtcaaaaatcaaatgatcctgtttggcgaggaggacgtgcgcgtggcaaacctgaagccgcgcatcagttttaacttcttcgtgactgcgcccaagaacgtgtcagacattattcctaggaccgaagttgaaaaagcgatccgcatgtccagatcgcgaatcaacgatgcctttaggctcaatgacaacagccttgaattcctggggatccaaccgaccctgggcccaccaaaccagccgcccgtctccatctggctcatcgtctttggcgtggtgatgggcgtcatcgtcgtgggcatcgtgatactgattttcaccggtatccgcgacagaaagaagaagaacaaggctcggtccggagaaaacccatacgcatccatcgacatctctaaaggagaaaacaatcccggcttccagaatactgacgacgtgcagacctcgttt

SEQ ID NO: 6280 - DNA, 2415 bp, synthetic construct
  misc_feature 1..2415: note = source = /note="Description of Artificial Sequence: Synthetic coding sequence"
  source 1..2415: mol_type = other DNA
atgtcctcatcaagctggctcctcctctcgctggtggcagtcactgcagcacagtccaccatcgaggagcaggccaaaacctttctggacaagttcaaccacgaagcggaagatctgttctatcaatcatccttggcatcgtggaattacaacactaatatcaccgaagagaacgtacagaacatgaacaatgcgggtgataagtggagcgcatttcttaaagaacagagcactttggctcagatgtaccctctccaggaaattcagaacctgaccgtgaagctgcaactgcaggcacttcagcaaaacggatcctcagtcctgtccgaggacaagtcgaagagattgaataccatcctgaataccatgtcaactatctactcaaccggaaaagtctgtaaccctgataatccgcaggaatgcctcctcctggaacctggattgaatgaaatcatggcaaattccctggattacaacgagagactgtgggcgtgggagtcatggcggtctgaagtgggcaagcagctccgccctctgtatgaggaatatgtcgtcctgaagaacgagatggctcgggccaaccactacgaagattatggcgattactggcgcggagattacgaggtgaacggcgtggacggttacgactacagccgcggacaattgatcgaggacgtcgagcacaccttcgaggaaatcaaaccactgtatgaacatttgcatgcatacgtccgcgcgaagctgatgaacgcataccctagctacatatccccgatcggatgcttgccggcgcacctcttgggagacatgtggggccgcttctggacgaatctgtacagccttactgtgccattcggccaaaaacctaacattgatgtgaccgacgctatggtggaccaggcttgggacgcacagcggatctttaaggaagccgaaaagttctttgtgtcggtgggcctgcccaacatgactcaaggattctgggagaacagtatgctgaccgaccccggcaacgtccaaaaggccgtctgtcatccaaccgcatgggatctggggaagggtgattttcgcatactgatgtgcacgaaggttactatggacgactttttgacggctcaccatgagatgggccacattcaatacgacatggcctacgccgcgcaaccgttcctgctccgtaacggcgcgaatgaagggttccatgaagcggttggagagataatgtcgctgtctgcagccaccccgaaacatctcaagagcatcggcctcctttcccctgatttccaggaggacaatgaaacggaaatcaatttcctcctgaagcaggcacttacgatcgtgggaactcttccgtttacctacatgctggaaaagtggcgctggatggtctttaaaggagaaatccctaaggaccagtggatgaagaaatggtgggagatgaaacgggagatcgtgggagtggtcgaaccggtgccacacgatgagacgtactgcgatccggcatcgctcttccacgtgagcaacgactacagcttcatccggtactacaccagaactctctaccaattccagtttcaggaagctctctgtcaagctgccaagcacgaaggaccgttgcacaagtgcgacatctcgaattcaaccgaggccggacagaagctgtttaacatgcttcggttgggcaaatctgaaccgtggactctggcgctcgaaaacgtggtcggtgccaaaaacatgaacgtgcggccgttgcttaactattttgagccattgttcacttggctcaaagatcaaaacaagaactccttcgtgggatggagcactgactggagcccatacgccgatcagtcgatcaaagtccggatcagcctgaagagtgccttgggcgacaaggcatacgaatggaatgacaacgaaatgtacttgttcagatcctccgtggcttacgccatgagacagtactttctgaaggtgaagaaccagatgatcttgttcggagaagaggatgtgagggtcgccaacctgaagccacgcatcagcttcaacttcttcgttactgcgcccaagaatgtgtcggacatcattccaagaaccgaggtggaaaaagcgatcaggatgagcaggtcgaggattaacgacgctttccgtctcaatgataattcactggaattcctgggtatccaacccactctcggtccgccgaatcaacccccggtgtccatctggctgatcgtctttggggtggtgatgggagttattgtcgtgggtatcgtcatcctgatcttcaccggcattcgcgatcgaaagaagaaaaacaaggccaggtccggagagaacccatacgcctccatcgacattagcaagggagagaataatccgggattccagaacactgatgacgtccaaacgtctttc

SEQ ID NO: 6281 - DNA, 2415 bp, synthetic construct
  misc_feature 1..2415: note = source = /note="Description of Artificial Sequence: Synthetic coding sequence"
  source 1..2415: mol_type = other DNA
atgtcatcttctagttggttattactctctctggtggcagtgacagctgctcagtccacaatagaagaacaggcaaaaacatttttggacaaattcaatcacgaagccgaagatctcttttatcagtcttccttggcttcatggaattacaacacaaatatcacagaagaaaacgttcagaatatgaataatgctggggataagtggtccgctttccttaaagagcagagtactctggctcagatgtatcctttacaggaaatccagaatctcacagtaaaactccagcttcaggcccttcagcagaacggatcctcggtattatcagaagacaagagtaaaagacttaatactatactgaatactatgtccactatctactccactggaaaagtgtgcaatcccgataatcctcaggaatgtctgctgctcgagcccggactgaacgagatcatggctaattccttagattataatgaaaggctctgggcctgggaatcatggcgctccgaagttgggaagcagttacggcctttgtatgaggaatacgttgtcttgaaaaatgaaatggcaagggctaatcattatgaagattatggggattattggaggggggactatgaagttaacggggtagatgggtacgattattcacggggacaacttatcgaggatgttgaacatacattcgaagaaataaaacctctgtatgagcatttgcacgcttatgttagggcaaaactaatgaacgcctacccctcctacatatcgcccatcgggtgtctcccagcacatctgcttggggacatgtgggggcgtttctggacaaatctctactcgctcacggttccttttggacagaaaccaaacatcgatgtcactgacgccatggtagatcaggcctgggatgctcagaggatctttaaagaggccgaaaaattttttgtgtctgtggggcttcctaacatgactcagggattttgggaaaactctatgctcactgatcctgggaatgtccagaaagctgtgtgtcatcctacagcgtgggatcttggaaaaggagatttcagaattctaatgtgtactaaggtgacaatggatgattttctgacagctcatcatgaaatgggacatattcagtacgacatggcttacgccgctcaacccttcctacttcggaatggagctaacgaaggattccacgaggccgtgggagaaattatgagtctatctgcagcaactcccaagcatcttaaatccatcggactcttatctcctgactttcaagaagataacgaaactgagataaacttcttattaaaacaggccttaacaatagtggggactttgccttttacatatatgctcgaaaaatggcgctggatggtgtttaaaggggagatacctaaagatcagtggatgaaaaaatggtgggaaatgaaaagggaaattgtcggagtggtcgagcccgttccacacgatgaaacttattgtgaccctgcttcactgttccacgtttccaacgattattcgttcatcagatattacacgcgcactctgtatcagttccaattccaggaagctctgtgtcaggctgccaaacatgagggacctcttcataagtgtgatatttctaacagtacagaggctgggcagaaactcttcaacatgttgagattaggaaagagtgaaccctggacgttggccctagagaacgtagttggggctaaaaacatgaatgtaagaccattactgaactactttgaacctctcttcacttggctcaaagatcagaacaaaaactcttttgttggatggtctactgattggtccccttacgccgatcagtctatcaaagtcaggatctctctaaaatctgcccttggagataaagcatatgaatggaacgataatgaaatgtatctgtttcggtccagtgttgcctatgccatgaggcagtattttctgaaagtcaaaaatcagatgatactctttggggaagaggatgtgcgcgtggccaacctaaaaccacggatttcttttaatttctttgttacagcaccaaaaaacgtctcagatatcatcccacgaacagaagtcgaaaaagctataaggatgtccaggtcacgcatcaatgatgctttccgattaaacgataactcactcgaatttctagggatccagcctacattagggccgcccaatcagcctcccgtcagtatatggctcatagtattcggagtagtgatgggggtgatagtggtgggaatcgtcatcctgatattcacaggaatcagagatagaaaaaaaaaaaataaggcacggtcgggggaaaatccctacgcttctatagacatctccaaaggagaaaataacccaggattccagaatacagatgatgtgcagacatctttc

SEQ ID NO: 6282 - DNA, 2415 bp, synthetic construct
  misc_feature 1..2415: note = source = /note="Description of Artificial Sequence: Synthetic coding sequence"
  source 1..2415: mol_type = other DNA
atgtccagctcctcatggttacttctttcattggtggccgtgaccgcagcccagtccaccatcgaggaacaagccaagacgtttctcgataaattcaaccacgaggccgaagatcttttttaccagtccagcctggctagctggaactacaacaccaacatcacagaggagaatgtgcagaatatgaacaatgcaggagacaaatggtctgcattcttgaaggaacagtcgactctagcgcagatgtacccacttcaggaaatccagaaccttaccgttaaattgcagcttcaggcgttgcagcaaaatgggagctcagtgctttctgaggacaagtctaaaaggctgaatacaatcctcaacaccatgtccacgatttactccacagggaaggtatgcaatccagataatcctcaggaatgcctgctgcttgagcccgggctaaatgaaatcatggcaaatagcctcgactataacgaacgtctctgggcttgggagagttggcgctccgaagtgggaaagcagctccggcccctatatgaggagtacgttgtgctcaagaacgagatggcccgcgctaatcactatgaggactacggcgactattggaggggcgactacgaggtaaacggggtggacggctacgattacagtagagggcagcttatcgaggatgtggaacatacattcgaagagataaaacctctgtacgagcacctacacgcatacgtgcgcgcaaagttgatgaacgcctatcccagctatatttcccctatcggctgtctgcccgctcatctgctcggagatatgtgggggcgcttctggaccaacctttactctctgaccgtgccgttcggtcagaagcccaacatagatgtgaccgatgccatggtcgaccaggcttgggacgcacaaagaatctttaaagaagcagagaagttcttcgtgtcagtgggtcttcctaacatgacacagggtttttgggagaacagcatgctgactgacccaggaaatgttcagaaagctgtgtgtcacccaactgcttgggaccttggcaagggagatttcagaattctgatgtgcaccaaggtcacgatggatgatttcctgaccgcacatcatgagatggggcatattcagtatgacatggcatacgccgctcaacccttccttttgcggaacggggctaatgagggcttccatgaggctgtgggtgagatcatgagtctgtctgcagccacaccaaagcacttaaaatcaattggactgctgtctcctgatttccaggaggacaatgagaccgaaattaatttcctactgaaacaggccttaactattgtgggaacacttcctttcacttatatgctggaaaaatggcgctggatggtgttcaagggagagatccccaaggaccagtggatgaaaaagtggtgggaaatgaagagggagatcgttggcgtggttgagccagttccacatgatgagacctattgcgatcccgcttctctgttccatgtgagcaatgattattcctttatacgttattatacacgaaccctgtatcagtttcagtttcaggaggccctctgtcaggcagctaagcatgagggacccctccacaagtgtgatataagcaattccactgaggcaggccaaaagctgttcaatatgttgcgtttggggaaaagtgaaccctggactcttgctttagagaatgttgtgggagcaaaaaatatgaacgttaggcctcttctaaattactttgaacccctcttcacttggctgaaggaccagaacaaaaacagttttgtgggctggagtaccgactggagcccctacgccgaccagagcataaaggtgcgcatctctcttaaatcagcactgggcgacaaagcctacgaatggaatgataatgagatgtatttgtttagatcttcggtcgcctatgccatgcgacagtacttcctcaaggttaaaaatcagatgatcctcttcggagaggaagatgtacgcgttgccaatctcaaaccgcgtatctcattcaacttctttgtgaccgctcctaaaaatgtgtctgatataatacctcgcacggaagtcgaaaaggctatccgcatgtcacgttcccgaatcaatgacgcatttagactaaacgacaattcacttgaattcctgggaatccagcccacactaggacctccaaaccagccccccgtctcaatctggctgattgttttcggcgttgttatgggcgtaatagtcgttggcattgtgatactgatcttcacggggatccgagacagaaaaaagaagaacaaggcacgctctggggaaaacccctacgcttccatcgatatctctaaaggggagaacaatccggggtttcagaatacagacgacgtccaaacatcattc

SEQ ID NO: 6283 - DNA, 2415 bp, synthetic construct
  misc_feature 1..2415: note = source = /note="Description of Artificial Sequence: Synthetic coding sequence"
  source 1..2415: mol_type = other DNA
atgtcctcatcctcctggctgctgctttcactggttgccgtgactgctgcacaaagcaccatcgaggagcaagccaaaaccttcctggacaaatttaatcacgaagcagaggatttattctaccagtcttccctcgcctcctggaactacaacacgaatataaccgaggagaacgtgcagaacatgaataacgctggcgataagtggagcgcctttctgaaagaacagagcacgctggcgcaaatgtatccactgcaggaaatacagaacctcacagtaaagctacagctgcaggcgttgcaacagaatggttcttctgttttgagtgaggacaaaagtaagcgcctgaacactatcctgaacactatgagcacaatctactctactggaaaagtctgtaatcccgataatccacaagagtgcctcctcctcgagccaggcctcaatgagatcatggccaacagcctggattacaatgagcggctctgggcctgggagtcatggcgttcggaggttggcaagcaactcagaccactgtatgaggagtacgtggttctgaagaatgagatggccagggctaatcactacgaggattatggagactactggcgcggagattacgaagtgaacggcgtggatggctacgactactcccggggtcagctgatagaagatgttgagcacacgtttgaggagatcaagcccttgtacgagcatctgcacgcttacgtccgcgcgaagttaatgaatgcgtacccatcctatatctcccccataggatgtcttcccgcgcacctactaggagacatgtggggtagattttggacaaatctctactccctgaccgttcctttcggacagaaaccgaatatcgacgttactgacgctatggtggatcaagcctgggacgcccaacgcatttttaaggaagctgagaagttctttgtttctgtgggcctgcctaatatgacacagggattctgggaaaatagtatgctcacggatccgggaaatgtacagaaagcagtgtgtcatcccaccgcctgggatctaggtaaaggggattttcggatcctgatgtgcacaaaagtcaccatggatgattttctcaccgctcaccacgaaatgggacacattcagtacgacatggcctatgccgcccagccatttctgctccgtaatggcgcgaatgaaggatttcacgaggccgttggagagataatgtctctttccgccgccacaccgaagcatctgaaatcaatcggactgctgtctcccgatttccaggaggataatgaaactgagattaacttccttctgaaacaggccctcacaattgttggaaccctgccattcacatatatgctggagaaatggaggtggatggtgtttaagggggagatcccaaaggatcagtggatgaagaaatggtgggaaatgaagagagaaatcgtgggtgttgtagagcctgtgccccacgatgaaacctactgtgacccggccagcctattccacgtgagcaatgactacagtttcattcgttattataccagaaccctgtaccagttccagtttcaggaagccctgtgtcaggctgcaaagcacgagggtccattacacaagtgcgacatcagcaattctacagaagcaggtcagaagctctttaatatgcttcggctgggcaagtccgagccttggaccctcgcattggaaaatgtggtgggagcaaagaatatgaacgtccggccactactgaactactttgagcccctttttacgtggcttaaggaccagaataagaacagctttgtgggctggtcaaccgattggagcccatacgctgaccagagcattaaggtgcggataagcctaaagtcagctttaggtgataaagcttacgagtggaatgacaacgagatgtacttgttcaggtcgtccgttgcctatgcaatgagacagtacttcctgaaagttaagaaccaaatgatactctttggagaggaagacgtgcgggtcgctaatctgaagcccagaatatcttttaattttttcgtgacggcccccaaaaacgtgagcgacatcatccccagaaccgaggtggagaaagccatacgcatgtccaggtccaggatcaatgatgcctttagattgaatgataattcactggaatttcttggtattcagcccaccctcggtcccccaaaccagccaccagtctctatttggctgattgtttttggtgtggtcatgggggttattgtggtggggatcgtgattctgatattcacaggtatccgtgaccggaagaaaaaaaataaggcccgcagtggagaaaatccatacgctagcatcgatatctctaagggcgaaaacaatcctggttttcagaatactgatgatgtccagacatctttt

SEQ ID NO: 6284 - DNA, 2415 bp, synthetic construct
  misc_feature 1..2415: note = source = /note="Description of Artificial Sequence: Synthetic coding sequence"
  source 1..2415: mol_type = other DNA
atgtcgtcgtcctcgtggctcctgctttcattggtcgcagtgaccgctgcacagtccacgattgaggaacaagcaaaaacgtttctggataagtttaaccacgaggccgaggacctgttctaccagagctcccttgcatcctggaattacaacaccaacattaccgaggaaaatgtgcagaatatgaataatgcgggagataagtggtccgcgtttcttaaggaacagagcacgctcgcacaaatgtaccctctgcaagagattcagaatctgactgtgaaactccagcttcaggctctgcagcagaatggttcaagcgtactgtccgaagataagtcgaagagactcaacactattctcaacactatgtcgactatatactcaactgggaaggtgtgtaatcctgataacccgcaggagtgcctgctgctcgaacctggacttaacgagattatggccaactcgcttgactacaacgaacgattgtgggcatgggaatcctggcgctccgaagtgggcaaacagctgcggcctttgtatgaagaatacgtggtgctgaagaacgaaatggcccgggcaaaccactatgaagattacggagattactggcggggtgattacgaagtgaacggtgtggacggttacgattacagccgaggtcaactgattgaggatgtggaacacactttcgaagagatcaaaccactgtacgaacatctccatgcctacgtgagggcgaagctcatgaacgcctacccatcctacatctccccaataggatgtttgcccgcacacctgcttggagatatgtggggaagattttggactaacctgtactcgctcaccgtccctttcgggcaaaagcccaacatagatgtcaccgacgcgatggtggatcaagcatgggatgcacaacgcatattcaaagaagccgaaaagttttttgtgtcagtgggccttcccaatatgactcaaggtttttgggaaaactcaatgctgaccgatccaggaaacgtccagaaagcggtctgccaccctactgcatgggaccttgggaagggtgatttcagaattctcatgtgtaccaaggtgactatggatgattttctgactgcacatcatgaaatgggtcacattcagtacgacatggcttacgccgcacaaccatttctccttcgaaacggggcaaacgaaggatttcatgaagcagtaggggaaatcatgtctctttcagccgcaactcctaagcacctcaagagcattggccttttgagccctgatttccaagaggataatgaaacggagatcaacttcctgctgaagcaggctctgacgatcgtcggtactcttccttttacttacatgctcgaaaagtggagatggatggttttcaagggagagattcctaaggaccagtggatgaagaaatggtgggaaatgaagagagaaattgtgggtgtggtcgagcctgtgccacatgatgaaacctactgcgatcctgcatcgctgttccacgtgtcaaacgactactcgtttattcgctactacaccagaaccctgtaccaattccagtttcaggaagcgctttgtcaagctgcaaagcatgaaggacctcttcacaagtgcgatatatcaaactcaactgaagccggacaaaaactgtttaacatgctgagactgggtaagtctgaaccatggaccctggcgcttgaaaacgtggtcggagccaagaatatgaacgtccggccactgctcaactacttcgaacctctttttacctggctgaaggaccaaaacaagaattcgtttgtgggatggtcgactgattggtccccttacgcagatcagagcatcaaggttcgcatttcacttaagtcggcccttggcgacaaggcgtacgaatggaacgacaacgaaatgtaccttttcaggtcatcggtggcctacgcaatgaggcaatactttctgaaggtgaaaaatcaaatgattcttttcggggaagaggacgtccgggtggctaacctgaagcctcgtattagctttaactttttcgtgaccgcccccaaaaacgtgtcggatatcatcccaagaaccgaagtggagaaggcaattagaatgagccggtcccgcatcaacgacgcttttcgccttaacgataatagcctggaatttctgggtatccagcccacccttgggcctccgaaccaaccgccggtgtcgatctggcttatcgttttcggagtcgtcatgggagtgatagtcgttggaattgtgatccttatcttcactggaattcgtgacagaaagaaaaagaacaaggccagatcgggcgaaaatccatacgcgtcaatcgacatctcgaaaggcgagaataaccccgggtttcagaataccgacgatgtgcaaacctccttt

SEQ ID NO: 6285 - DNA, 2415 bp, synthetic construct
  misc_feature 1..2415: note = source = /note="Description of Artificial Sequence: Synthetic coding sequence"
  source 1..2415: mol_type = other DNA
atgagcagctcttcctggcttcttttgagtctggtggctgtgacagctgcccagtctacgatagaagagcaggccaaaactttcctggataagtttaaccacgaggctgaggatttgttctatcagtcctcgctggccagttggaattacaacaccaacattacagaagagaacgttcagaacatgaacaatgccggggataaatggagtgcgttcctaaaagagcaaagtacactcgcacagatgtaccctttgcaggagattcagaacttaacggttaagctacagctgcaagccctgcagcaaaacggcagttcagtattgtctgaagacaagagcaagagattgaacacaattctgaacaccatgtcaacaatttactcaactggcaaagtgtgtaaccctgacaacccgcaagagtgtctgttattggagcctggtctgaatgaaatcatggctaatagtctggactacaacgagcgcctgtgggcatgggaaagctggcgatctgaggtgggaaagcagctacggcccttatatgaggaatatgtggtattgaagaacgagatggccagggccaaccattatgaagattacggcgactactggagaggggactatgaggtaaacggggtagacggatatgattattctcgcggacagttgatcgaagacgtggagcacacgtttgaagagatcaaaccattatatgagcatctccacgcatacgttagggcaaaactgatgaatgcctacccgtcatacatatcccccattgggtgtttgcccgcccatttgctgggagatatgtgggggaggttctggaccaacctgtatagcctcactgtccctttcggtcagaaacccaatatagatgttacagacgcgatggtggaccaggcttgggatgcgcagcgcatatttaaggaggcagagaagttcttcgtatccgtggggttgcctaacatgacccaaggattctgggagaattctatgcttaccgaccctggcaatgtacagaaagcagtctgccatcccaccgcgtgggacctgggcaagggcgactttcgcattctgatgtgtactaaggtaaccatggatgactttcttaccgcccaccacgagatgggacatatccagtatgatatggcatacgctgcgcagcctttcctgctgcgaaatggcgcaaatgaaggattccacgaagcagtgggcgagattatgtcactgtctgctgctacacccaaacatctcaaatctatcggcctcttaagccccgattttcaggaagacaacgagactgagatcaattttcttctgaagcaagcattgaccatagttggcactctgccctttacatatatgctggagaagtggcgctggatggtcttcaaaggggagatacctaaagatcagtggatgaaaaaatggtgggagatgaaacgtgagatagtgggagtggttgagcccgtgccgcacgatgaaacgtactgcgacccggccagtctgtttcacgtttctaacgactatagcttcatccgctactacacccgaacattgtatcaattccagtttcaggaggctctttgccaggcggccaaacacgaagggcccctccataaatgcgacatttcaaacagtactgaggccggacaaaaactgtttaacatgctccggctgggaaagagcgaaccatggactttggcattggagaacgtggttggggctaaaaacatgaacgtgaggccgttgttgaattactttgaacctctcttcacctggctaaaagaccagaataagaattcatttgtgggatggagcaccgattggagcccctatgcggaccagtccatcaaggtcagaatctccctgaaaagtgcacttggagataaggcctatgagtggaacgacaacgaaatgtacctcttccgcagtagcgtggcatatgctatgcgacaatattttctcaaagtgaagaaccagatgattctttttggtgaggaggacgtgcgtgttgcgaatttaaagcccaggatttccttcaatttcttcgtcacagctccgaaaaacgtgtctgacatcatacctagaaccgaggtggagaaagcaatacggatgtcccgttcgcggattaatgatgcgtttcggctcaatgacaactccctggagtttttgggcatccagcccacgctggggcccccaaaccagccacccgtttcgatatggcttattgtttttggcgtggtgatgggcgtgattgtggtgggcatcgtgattctcatttttactgggatcagagacaggaagaagaagaataaggccaggagtggtgaaaacccctatgcctcgattgatatatcgaagggggagaataatcctggcttccagaacactgacgatgttcagactagcttt

SEQ ID NO: 6286 - DNA, 2415 bp, synthetic construct
  misc_feature 1..2415: note = source = /note="Description of Artificial Sequence: Synthetic coding sequence"
  source 1..2415: mol_type = other DNA
atgagttcttcctcatggctcctcttatcactcgttgccgtaaccgccgctcaatccaccatcgaggagcaggcgaagacgttcctggacaagtttaatcacgaagccgaggacttgttttaccagagtagtttggcgtcatggaactacaacaccaacatcaccgaggagaatgtgcagaacatgaataatgctggggacaaatggagcgcttttctgaaggagcagtctacgttagcccagatgtatccactgcaggaaatccagaacctcacagtcaagttgcagttgcaggccctccagcaaaatggcagcagcgttctctctgaagataagtccaaaaggcttaatactatcctgaatactatgagcaccatctatagtacaggaaaggtctgcaacccagacaacccccaggagtgtctgctgttggaacctggattgaacgaaattatggcaaactctctggactacaacgagcgcttgtgggcatgggaaagttggcggtctgaggtaggtaagcaattacggcccttatacgaagaatacgtcgtgctgaagaacgagatggcgcgtgctaatcattacgaggactacggggattactggaggggggactatgaggttaacggcgtggacggttacgactactcacgggggcagctaatcgaggatgtcgagcatacttttgaggagattaagcccctttatgagcatcttcacgcctacgtgcgcgccaaactaatgaacgcttatccaagctacatcagccccatcggctgcctcccggcgcacctgttgggagacatgtggggtcggttttggacaaatctttactctctcaccgtgcctttcggccagaaaccaaacattgatgtgacggatgcaatggtggatcaggcttgggatgctcagagaatcttcaaggaggcagagaagttcttcgtcagtgtcgggctccccaacatgactcagggattctgggaaaactccatgctcaccgatcccggcaacgtccagaaggccgtgtgtcatcctacagcctgggacctggggaaaggcgatttccgcatcctcatgtgtaccaaggtcactatggatgacttccttactgcgcatcatgagatgggacacatccagtatgatatggcttacgccgctcaaccatttctgctcaggaatggggctaatgagggatttcacgaggctgtgggggaaattatgtctctgtcagccgccactccgaaacacctcaagtctatcggtctcttaagccctgatttccaagaagataacgagacagagattaattttctcctgaagcaggcactaacgattgttggcacactgccatttacatatatgctcgagaaatggagatggatggtctttaagggagagatcccaaaggaccagtggatgaaaaaatggtgggagatgaagcgggagatagtgggggtcgtagagccagtccctcatgatgagacttattgtgatcccgcttctcttttccatgtgtcgaacgactactcatttatccgttactacactcggacactgtaccaattccagttccaggaagcactgtgccaggcagcaaagcacgagggaccgctgcacaagtgcgacatttcgaattccacagaagctgggcagaaactctttaacatgttacgactcggcaaaagcgaaccctggacactggcattggagaacgtagtgggagctaagaatatgaatgttaggcctttgctcaattattttgagccgctgttcacttggctgaaagatcagaacaagaactctttcgtgggatggtcaacagactggagcccatacgctgatcagtcaattaaggtccgcatctcactcaaaagtgccttgggggacaaggcatacgaatggaatgacaacgagatgtacctgttccggtcctctgtcgcttacgcgatgcggcagtatttcctaaaggtcaaaaatcagatgatcctgttcggcgaagaagatgttcgggtggcaaacctgaaacctcggatcagttttaactttttcgtgacagcacctaaaaatgtctcagacatcatcccacgcactgaggtagagaaggctatcaggatgagccgctcacgaattaatgacgcctttagactcaatgataatagtctagaattcctggggattcaaccgacactcggaccgccgaatcaacctcccgtgtcaatttggttaatcgtctttggagtggtcatgggagttatcgtagtagggattgtgattcttatctttactggaatccgcgaccgtaagaaaaaaaataaggctcggtccggagaaaatccctacgcttctatcgacataagtaaaggagaaaataatcccggatttcagaacaccgatgatgtccagactagcttt

SEQ ID NO: 6287 - DNA, 2415 bp, synthetic construct
  misc_feature 1..2415: note = source = /note="Description of Artificial Sequence: Synthetic coding sequence"
  source 1..2415: mol_type = other DNA
atgagcagtagctcctggctattgctgtccttagtggcagtgactgcggcccagagcaccatcgaggaacaggctaagactttcctcgacaaatttaatcacgaggctgaggatctattttatcagagctcacttgcttcttggaattataacacgaatattacagaagagaatgttcaaaatatgaataatgccggggataaatggtccgcttttttgaaagagcaatcgaccctcgcccagatgtatccgctccaggaaatccagaacctgactgtgaaattgcagctgcaagccctacaacagaacggaagttcagtattatcggaagataagagtaaaaggctcaacaccatcctaaataccatgagcaccatttattctacagggaaggtgtgtaacccagataacccccaggagtgccttctcctcgaaccaggcttgaacgagatcatggccaatagccttgactacaacgaaaggctgtgggcctgggagtcttggaggtcagaggtcggaaaacagctgcggccactttacgaggaatacgtggttttaaagaacgaaatggcccgggccaatcactacgaggactatggcgactattggcgtggagattacgaggtcaacggcgtggacggttatgactatagtcgtggacagctcatcgaggatgttgagcatacatttgaggagatcaaacccctctatgagcacctgcatgcatacgtgcgcgccaaactaatgaatgcctatccttcatatataagtccaataggatgtctgccagctcacctgttaggcgatatgtggggacggttttggactaacctgtattcgctcaccgtgccttttggccagaaaccaaatattgatgtcactgacgctatggtcgatcaggcttgggatgctcagagaattttcaaagaggcagaaaagttctttgtgagtgtcggcctgcctaatatgacgcaggggttctgggagaatagtatgctgactgacccgggaaacgttcagaaggccgtgtgtcatcccaccgcctgggatttaggtaagggggatttcaggatcttaatgtgcacgaaggtaactatggacgacttcttaacggcccaccacgagatggggcatatccagtacgacatggcctacgctgcacaaccttttctgctgagaaatggagccaacgagggctttcacgaggccgtgggggaaattatgtctctgtccgcggctacgcctaaacacctcaagtccattggtctgctaagccccgatttccaggaggataatgagacagagatcaatttcctgctaaagcaggctctgaccatagttggcacactaccctttacgtatatgttggaaaagtggcgatggatggtgtttaaaggcgagattcccaaagatcagtggatgaagaaatggtgggagatgaagcgggagattgtcggagtggttgagcctgttccacatgatgaaacatactgcgatcctgctagtctctttcacgtttccaatgactatagtttcatacgctactacactagaacactgtatcagtttcagttccaagaggccttgtgtcaggccgccaaacacgaaggacctctgcacaagtgcgacatctccaattcaacggaggcaggccagaagttgttcaatatgctaaggttagggaagagtgaaccttggacattagctctcgaaaatgtggttggtgcgaaaaacatgaacgtaaggccactgctcaactatttcgaacctttgtttacttggctcaaggatcagaacaagaactcttttgtgggttggtcaactgactggagcccgtatgcggaccagtcgataaaggtgcgcatcagcttgaagtccgcactgggtgacaaggcctatgagtggaacgacaatgagatgtacctgtttaggtcaagtgttgcatatgccatgaggcaatatttcctcaaagttaagaatcagatgatcctatttggggaggaggacgtgcgggtagctaatctgaagcccagaatttccttcaactttttcgtgacagctccaaaaaatgtgtcagacataatacccagaacagaggtggagaaggcgatccggatgagtaggtctcggatcaatgatgctttcagattgaatgacaacagcttggagtttcttggaattcagcctactttgggaccgccaaaccaacctccggtcagcatttggctcatcgttttcggggtagtgatgggcgttattgtcgtgggcatcgtcatcctgattttcacagggatcagggatcgcaaaaagaagaataaggcacgctccggcgagaacccatacgcctctatcgatataagcaagggggagaataaccccgggtttcagaacaccgatgatgtccagacatccttc

SEQ ID NO: 6288 - DNA, 2415 bp, synthetic construct
  misc_feature 1..2415: note = source = /note="Description of Artificial Sequence: Synthetic coding sequence"
  source 1..2415: mol_type = other DNA
atgagttccagttcttggctcctgttgtccttagtcgccgtgacagcagcacagtctacaatagaagaacaagctaagaccttcttggataaatttaaccatgaggccgaagacctgttttaccagtcttctctggcttcctggaactacaataccaacataacagaagaaaacgtgcagaacatgaacaacgcgggagacaaatggtcagcgttcctgaaagagcagtcaactttagctcagatgtaccccctccaggagattcagaatttgaccgtgaagctgcagttacaggcacttcagcagaatgggtctagcgtcctgtcagaagacaaatctaagaggctcaacacaattttaaacacaatgtcaacaatctattcaaccggcaaagtctgcaatccagacaacccccaagagtgccttctcttggaacccggactgaatgagattatggccaacagtctggactataacgaaagactttgggcatgggaaagctggcggagtgaggtgggtaaacagttgcgacccctctatgaggagtacgttgtgctcaaaaacgaaatggcccgagccaaccactatgaggactacggcgactactggcgaggggattatgaggtgaatggtgtggacggctacgactactcccgcggacagctgatagaagacgtagagcacacctttgaggaaatcaaaccactttacgagcacttacacgcatatgttagggccaagcttatgaatgcttatccttcttatattagcccaatcgggtgtttgccagctcacctgcttggtgatatgtggggcaggttttggacaaacctgtattccctcaccgttcctttcggccaaaaacccaacattgatgttaccgacgccatggtcgaccaggcgtgggacgcccagcggatcttcaaagaagccgagaagttctttgtgtccgtgggtctccccaacatgacccaggggttttgggaaaactcaatgctgacggacccggggaatgtccagaaggccgtctgtcaccctacagcttgggatttaggaaagggagatttcaggatcttaatgtgtactaaggtcaccatggatgatttcctgacggcccatcatgagatgggacacatccagtatgatatggcatatgccgcgcagccttttctcctcagaaacggggccaacgagggattccatgaggcagtcggtgagattatgtcgctgagtgcagccacacctaaacaccttaagagtatcggtctgttgtcacccgacttccaggaggacaacgagaccgagataaacttcttactgaaacaggcgctaacaattgtaggcaccctgccctttacatacatgctcgagaagtggcgatggatggtttttaagggggagatccccaaggatcagtggatgaagaagtggtgggagatgaagcgagaaatcgtcggagtcgtagagcccgtgccccacgatgagacttactgcgatcctgcctccttattccatgtgagtaacgactactcctttataaggtactacacgcgaaccctctaccagttccagttccaagaggctctgtgccaggcagctaaacacgaaggtcccttgcataaatgtgacattagtaatagcaccgaagcaggacagaaactattcaacatgctccgactgggaaagtctgagccctggaccctcgccttggagaacgtggtgggagcaaagaacatgaatgtaagacctctgttgaactattttgagccgctgtttacgtggctgaaggatcagaataaaaactccttcgttgggtggtccaccgattggagtccgtacgcagaccaatctatcaaagtacgaattagcctaaagagcgctttgggggacaaggcatatgaatggaatgataatgaaatgtacttgttccgcagcagtgtggcgtacgccatgcgacagtatttcctgaaggttaagaatcagatgattctatttggcgaagaagacgtccgtgtagctaacctaaagcctaggatttctttcaattttttcgtcaccgcaccaaaaaatgtcagtgacatcatcccgcgaaccgaggttgaaaaggctatccgcatgagtaggtccaggataaacgacgccttccgccttaacgataactcgctggaattccttggaatacagccaactcttggtccccctaaccagcctcctgtgtctatctggctcattgtctttggggtggttatgggagtaatcgtcgtcgggatcgtcatcctgatttttacgggtatccgagaccgtaagaaaaaaaataaggccagatcaggggaaaatccctacgctagtatcgacattagtaagggagaaaataacccgggattccaaaacacagacgacgttcagacctcattt

SEQ ID NO: 6289 - DNA, 2415 bp, synthetic construct
  misc_feature 1..2415: note = source = /note="Description of Artificial Sequence: Synthetic coding sequence"
  source 1..2415: mol_type = other DNA
atgtcgtcctcctcatggctgctcctgtccctcgtggcagtgaccgccgcccaatcgactatcgaagaacaagcaaagactttcctcgataagttcaaccatgaagcggaggaccttttctaccaatcgtcattggcctcctggaactacaacactaacatcactgaagaaaatgtgcagaatatgaataatgccggcgacaagtggtccgcgtttctgaaagaacaatcaaccctggcacaaatgtaccccctccaagagattcaaaaccttactgtgaagctccagctgcaagctctgcagcagaatggaagcagcgtgctctccgaagataagtcgaagcgactgaatactatccttaacactatgtccactatttactcaaccggtaaggtgtgcaacccagataaccctcaagaatgtctgctcctcgaacctggtcttaacgagattatggccaactcgcttgattacaatgaacggctttgggcatgggaaagctggcgttccgaagtcggaaaacaactgcgccctctctacgaagaatacgtggtgcttaagaacgagatggccagagcgaatcattacgaagattacggggactactggagaggtgattacgaggtgaacggggtggacggatatgactactctcgcggacagcttatagaagatgtggagcatacttttgaggagatcaagccactgtacgaacacctccatgcgtacgtgagagcaaaactgatgaatgcatatccttcgtacatttccccgattggttgcctgccagcacatctcttgggagatatgtggggccgattctggactaacctttactctctgaccgtgccgttcggccaaaagccaaacattgatgtgacggatgctatggtcgatcaagcctgggatgcacagcgcattttcaaagaggccgaaaagtttttcgtgtcggtgggcctgcctaatatgactcagggtttctgggaaaacagtatgctgaccgatccgggtaacgtacagaaagcggtctgccaccctaccgcctgggacctggggaagggagattttcggattctgatgtgtactaaggtgactatggatgactttctcactgcacaccatgaaatggggcacatccaatacgatatggcctacgcagcccaaccatttctccttcgcaacggagccaatgaaggatttcacgaggcggtgggcgagattatgtcactgtcagcagcaaccccaaagcatcttaagtctatcgggctgctctccccagactttcaagaagataatgaaaccgaaatcaattttctgctcaaacaagctctgactatcgtcgggaccctcccctttacctatatgcttgaaaagtggagatggatggtgtttaaaggagaaatacccaaggatcaatggatgaagaaatggtgggaaatgaaacgggagatcgtcggagtcgtggagcctgtcccacatgatgagacttactgtgacccggcatccctcttccatgtctccaatgattactcgttcattaggtactacaccagaaccctttaccaatttcagtttcaagaggccctgtgtcaagccgccaaacatgaaggtccgcttcacaagtgtgacatttccaactcaaccgaggcaggacagaaacttttcaatatgctgaggctgggaaagtcagagccttggaccctggcactggagaacgtggtcggcgctaaaaacatgaatgtccgccctctcctgaattactttgagccattgttcacgtggctgaaagatcagaacaaaaactcgtttgtgggttggtccacggactggtccccatatgctgaccagtccattaaggtgcgcatttcgctgaagtcagcactgggtgacaaggcatacgaatggaacgacaacgaaatgtacctcttcagatcctcggtggcgtacgcaatgcgtcagtactttcttaaagtcaagaaccaaatgatactgtttggtgaagaggacgtcagggtcgctaacctcaaacctcgaatctcctttaacttttttgtgactgctccgaagaatgtgtccgatatcatcccgaggaccgaagtggagaaggcaattagaatgtcgcggtcgaggattaacgatgcctttcggctgaacgataactccctcgagtttctgggaatacagccaaccctcggtcctcccaatcagcctccggtgtcgatttggctgatagtctttggagttgtcatgggagtcattgtggtgggtattgtcatcctgattttcactggaattcgcgaccgtaaaaagaaaaacaaagctcggagcggagagaacccttatgcctccatcgacatctcgaagggagaaaacaacccaggctttcagaacaccgatgatgtgcagacctccttc

SEQ ID NO: 6290 - DNA, 2415 bp, synthetic construct
  misc_feature 1..2415: note = source = /note="Description of Artificial Sequence: Synthetic coding sequence"
  source 1..2415: mol_type = other DNA
atgagcagctcaagctggctgctcttgtctctggtggctgtgacagctgcacagagcacgatagaggagcaggccaagacctttttggataagtttaaccatgaagccgaagatctcttttatcagagctcactggctagctggaattacaacacgaacatcacagaggaaaatgtacagaacatgaataacgcgggtgacaaatggtctgccttccttaaggaacagtctaccttggcccagatgtaccccctgcaggaaatccaaaaccttaccgtgaagctgcagctccaggccctgcaacagaatggttccagcgtattgagtgaggataaatctaagagattgaacaccatccttaatacaatgtccacgatctacagcaccggtaaagtatgtaaccccgacaatccccaagagtgtctcctgttggagccgggcctgaacgagattatggctaatagcttggattacaatgaaaggctctgggcctgggaatcttggaggagcgaggtggggaagcagttgcggcctttgtacgaggagtatgtcgtacttaaaaatgagatggctagagctaatcattatgaggactatggagactattggcgcggggactatgaagtgaatggtgttgacggttacgactactcccgcgggcagctgatcgaggacgtggaacacacattcgaagaaatcaaacccctctacgagcacttgcatgcctatgtccgagccaaacttatgaacgcctatccttcctacatttcccccatcggttgtctgcccgcacatctcctgggcgatatgtgggggagattctggacaaacttgtatagcctgacagtacctttcggccagaaacctaatatcgatgttaccgatgccatggtggatcaggcatgggacgcccagaggatcttcaaggaagccgaaaaattcttcgttagcgtgggcctccctaacatgacccaggggttttgggagaactccatgctcacggaccctggcaacgttcagaaggctgtctgccatccaaccgcgtgggacttgggtaagggagatttcaggattctcatgtgcactaaagtgaccatggatgacttcctgacggcccaccatgagatgggccacatacagtatgacatggcctatgccgcgcagccattccttctgcgaaacggtgctaacgagggcttccatgaagccgtgggagagattatgtcactgtccgccgcgacaccgaagcacctgaagagcattggactgctttcccctgattttcaggaagacaacgagactgaaatcaacttcctgcttaagcaggccctgaccatagttggcacattgcctttcacatacatgcttgaaaaatggcgatggatggtctttaagggggagattcctaaagaccagtggatgaagaagtggtgggagatgaagagggaaatagtcggggtggtagaacccgtgccacacgacgaaacctactgcgaccctgcgtctttgtttcatgtaagcaacgactactcttttatcaggtattacacccggaccctgtaccagttccagtttcaggaagcgttgtgccaggcggccaaacacgaggggccactccacaagtgtgatatatccaattcaacagaagctggccagaaactgtttaatatgctgcggctgggaaagtctgaaccatggacactggcactggagaacgtcgtgggagctaagaatatgaacgtccggcccttgctgaactatttcgaaccattgtttacatggctcaaagatcaaaacaaaaactccttcgtcggctggtccacagattggtctccctacgcagatcagagcattaaggttagaattagtctcaagtccgcattgggtgataaggcctacgaatggaacgacaacgagatgtatctgttcagaagcagtgtcgcttatgcaatgcggcaatacttcttgaaggttaagaaccagatgattctcttcggtgaggaggacgtgcgcgttgccaatctgaaaccgagaatcagcttcaacttttttgtcacagccccaaaaaacgtctccgatattattcctaggacagaagtcgagaaagccattaggatgagccgcagtcgaattaacgacgcattccggctcaatgataacagcttggagttcctgggcatacagcctacgcttggaccgcccaatcagcctccagtatcaatctggctgatcgtctttggagtggttatgggcgtgattgtggttggaatcgttatcctcatatttacaggcatccgggatcgaaaaaagaagaataaggcacgcagcggagaaaacccttatgcttctatagacatatccaagggtgaaaataaccctgggttccagaacacagatgacgtgcagacctctttc

SEQ ID NO: 6291 - DNA, 2415 bp, synthetic construct
  misc_feature 1..2415: note = source = /note="Description of Artificial Sequence: Synthetic coding sequence"
  source 1..2415: mol_type = other DNA
atgtcatcttcatcctggctgctgctgtcattggttgcagtcactgctgctcagtccaccatcgaagaacaagcgaaaacttttctcgacaagttcaaccacgaagcagaggacctgttttaccaaagctccctggcttcctggaattacaatacgaacatcactgaggaaaacgtgcagaacatgaacaacgcgggagacaaatggtcggccttcttgaaagaacagtcaactctcgctcagatgtaccctctccaggaaatccaaaacttgacggtgaagctccagctccaagcacttcagcaaaacggatcatcagtgctgtcggaggacaaatccaagagactcaacaccattcttaacaccatgtcaactatctactcaaccggtaaggtgtgcaacccggataatccacaggagtgtctcctgctcgagcctggactgaacgaaatcatggcgaacagccttgattacaacgagagactctgggcttgggagtcctggcgatcggaggtcggtaagcagcttagacccctgtacgaggagtatgtggtgctgaagaatgaaatggcacgcgctaaccattacgaggactacggcgactattggagaggcgattacgaagtcaacggagtggatggctatgattacagccgcggacagctgatcgaggacgtcgaacacactttcgaagaaatcaagcctctctacgaacacctgcacgcatacgtccgcgccaaactgatgaacgcgtacccgtcctacatctctcctatcggatgcctgccggcacatctgctcggagacatgtggggcagattctggaccaatttgtactccctcaccgtgcccttcggacagaaacccaatatcgacgttaccgacgccatggtcgatcaagcctgggatgcacagcgcatattcaaggaagccgagaaattcttcgtgagcgtggggcttccgaacatgactcaaggcttttgggaaaattccatgctgactgacccgggtaacgtgcagaaggcggtgtgtcatccaaccgcctgggatctgggaaagggcgacttccggatcctgatgtgtactaaagtcaccatggacgatttccttaccgcccaccacgaaatggggcatatccaatacgacatggcctatgccgcccagccgttcttgctccgcaacggcgccaacgagggctttcatgaagccgtgggggagatcatgtccctgtctgccgctaccccgaaacaccttaagagcatcggactgctgagcccagatttccaggaggataacgaaacggaaatcaacttcttgttgaagcaagccctcaccattgtcggaaccctcccgtttacttacatgctcgagaagtggcgctggatggtgttcaagggtgaaattccgaaagaccagtggatgaaaaagtggtgggagatgaagcgcgaaatcgtgggagtggtggagcccgtgccacacgatgaaacctactgcgatccggcgagcctctttcacgtgtctaacgactattcctttatccgatactacaccaggactctttaccagtttcagtttcaagaagcactgtgccaggcggctaagcacgaaggacccctccacaagtgtgacattagcaactccactgaggccggacagaaactctttaacatgctgaggctcggaaagtcagagccatggacccttgcactggagaacgtcgtgggagccaagaacatgaatgtgaggccgctgctcaactactttgaaccgctgtttacgtggctgaaggatcagaacaaaaactcgttcgttggctggtcgactgactggtcaccttacgcggaccagagcattaaggtgcgcatcagcctcaagagcgccctcggagacaaggcgtacgaatggaacgataacgaaatgtacctgttcagatcatccgtggcctacgcaatgcgacaatacttcctgaaggtgaagaaccagatgatcctcttcggagaggaagatgtgcgcgtggcgaacctgaagccgagaatctcctttaacttcttcgtcaccgccccgaaaaatgtatctgacatcattccacgcactgaggttgaaaaggccatcagaatgagcagaagccggattaacgacgcctttcgcctgaacgacaattcgttggagttcctcggcatccagcccaccctgggtccgccgaaccaacccccggtcagcatttggctgatcgtgttcggggtcgtgatgggggtgatcgtggtgggaattgtcatcctgatcttcaccggaatccgcgatcgcaaaaagaagaataaggcgcggtccggtgaaaatccctacgcaagcatagacatctccaagggagagaacaatccgggatttcaaaacactgacgacgtgcagacttcgttc

SEQ ID NO: 6292 - DNA, 2415 bp, synthetic construct
  misc_feature 1..2415: note = source = /note="Description of Artificial Sequence: Synthetic coding sequence"
  source 1..2415: mol_type = other DNA
atgtcgtcatcgagctggctgcttcttagccttgtggcagtgacggccgcacagagcactatcgaggaacaggcaaagacttttctggataagttcaaccatgaagccgaagatcttttctaccaatcctcccttgcatcgtggaactacaataccaacattacggaagaaaatgtccagaacatgaataacgccggagacaagtggtcggcttttctgaaggagcagtcgaccctcgctcaaatgtatcctctccaggagatccaaaatctcaccgtgaagctgcagctgcaagcacttcagcaaaatggatcctcggtgctttcggaagataagtcaaagcgcttgaatacgatacttaacaccatgtcaaccatatactccacgggtaaggtgtgtaatccagataatccgcaagagtgcctgctgcttgaacctggattgaacgagataatggcaaactcactggattacaacgaacggctttgggcatgggaatcatggcgttcagaagtcggaaagcaactcagacccctgtacgaggaatacgtggtgctcaagaacgagatggcacgagccaaccattacgaagattacggcgattactggcgcggagactacgaagttaatggagtggacggttacgattacagccgggggcaactgatagaagatgtagaacacactttcgaagagattaagccgctctatgaacacttgcatgcatacgtccgggcaaagctcatgaacgcgtacccgtcctacatctccccgattggctgccttcctgcacacctgcttggtgatatgtggggccgcttttggaccaatctgtactccctgaccgttccatttggacagaagcctaacatcgacgtgaccgacgctatggtggaccaagcgtgggatgcccaacgtatctttaaggaagcggagaaattctttgtaagcgtgggactccctaatatgactcaagggttttgggagaattccatgctcaccgacccgggtaacgtccagaaggcagtgtgtcacccaaccgcgtgggatctcggcaagggagactttcgaatactgatgtgtactaaagtgaccatggatgacttccttacggcccaccacgaaatgggacatattcagtacgatatggcatacgcagcacaaccgtttcttcttcggaatggggccaacgaaggattccatgaggcagtcggagagattatgtcgctctcagcagcgacgccaaaacacttgaagtcaattggcctgctgtcgcctgactttcaagaggataacgagactgagatcaactttcttcttaagcaggcgctcactattgtgggtaccctgccattcacctacatgcttgagaagtggagatggatggtgtttaaaggagagatcccaaaagatcaatggatgaagaagtggtgggagatgaaaagagaaattgtcggggtggtggaacccgtgccccatgatgaaacctactgtgacccagcctccctgtttcacgtgtccaacgattacagctttattcgatactacactcgtaccctgtaccaattccaattccaggaagccctttgtcaagcagccaagcatgaagggcctcttcacaagtgcgacattagcaacagcactgaggcaggtcaaaagctcttcaacatgcttcgccttgggaaatccgaaccctggactcttgcattggaaaacgtcgtcggggcgaagaatatgaacgtgcggcctctgcttaactactttgaacccctctttacttggttgaaagaccagaacaaaaactcttttgttggttggtcgaccgattggtccccttatgccgatcaatcaatcaaagtcagaatttccctgaaatctgctttgggcgacaaggcatacgaatggaatgacaacgaaatgtacctctttagaagctccgtggcatacgcaatgaggcaatactttcttaaggtcaaaaatcaaatgattctgtttggtgaagaggatgtgcgcgtggcaaacctgaagccacgtatttcgtttaactttttcgtgaccgccccgaagaacgtgtcggatatcatcccacggactgaagtggagaaggccattcgtatgtcgcgtagccgcattaacgatgcgttccggctcaacgataattcgctggaattcctcgggattcagcctaccctgggtccacccaatcagcctcccgtgtccatttggcttattgtgtttggagtggtcatgggagtgatcgtggtggggatcgtgattctgatattcaccggcataagagatagaaagaagaagaataaagcccggtccggagaaaatccttacgcatcgattgatatcagcaagggggagaacaacccaggatttcagaacactgatgacgtgcagacctcgttc

SEQ ID NO: 6293 - DNA, 2415 bp, synthetic construct
  misc_feature 1..2415: note = source = /note="Description of Artificial Sequence: Synthetic coding sequence"
  source 1..2415: mol_type = other DNA
atgtcgagcagctcgtggttgctgctttcgctcgtggctgtgaccgcggctcagtcaacgattgaagaacaagcgaaaaccttccttgataagtttaaccacgaggccgaggatctgttttatcaatcgtccctcgcatcatggaattacaacaccaacatcactgaagaaaacgtgcagaacatgaacaacgccggtgacaagtggtcggcctttcttaaagagcaatcgaccctggcccaaatgtaccccctccaagaaatccagaaccttactgtgaagttgcaactgcaagctctccagcagaatggatcttcagttttgtcggaagataaatcgaagagactgaacactattctgaataccatgtcaaccatatactcgaccggaaaggtctgtaatccggataacccacaagaatgtctcctgctcgaacctggtcttaacgagattatggctaactccctggattacaacgaacgactctgggcatgggagtcgtggcgatccgaagtcggcaaacagcttagaccactgtacgaggaatacgtcgttctgaaaaacgaaatggctagagctaatcactacgaggattacggtgactactggcgcggtgattacgaagtgaacggcgtggacggttacgactactcaagggggcagcttattgaggacgtggaacatacttttgaagagattaagcctctttacgagcatcttcatgcctacgtgcgggcaaaacttatgaatgcatacccatcatacatttctccaatcggatgcttgccagcacatctgctgggtgatatgtggggacgcttttggaccaatttgtactccttgaccgtgccctttggacagaagcccaatatcgatgtgaccgacgcgatggttgatcaagcctgggatgcacaacgtatctttaaagaagcagagaaattctttgtgtctgtggggcttcctaatatgactcagggcttttgggaaaattcaatgctgacggacccggggaacgtgcaaaaagccgtttgtcatcctaccgcatgggatcttggaaagggtgatttccgaatcctgatgtgcaccaaggtcactatggatgactttcttactgcccatcatgaaatgggtcatatccaatatgatatggcttatgccgcgcaaccctttcttctccggaatggagcaaacgaaggctttcatgaagcagtcggagagatcatgtcgctctccgcggcaactccaaagcacctgaagtccatcggacttctctcgcctgattttcaagaggacaacgaaactgagatcaatttccttctcaaacaagcactcactattgtgggcaccctcccttttacctacatgcttgaaaagtggagatggatggttttcaagggtgaaatcccgaaggaccaatggatgaagaaatggtgggagatgaaaagagagatcgtcggagtggtggaacctgtgccccacgacgaaacttactgtgaccccgcatctttgtttcacgtgtcaaatgattactccttcatcagatactacacccgtactctttaccagtttcagtttcaggaggcactttgtcaagccgcaaagcacgaaggtcctctgcataagtgcgatattagcaactccacggaggcgggccaaaagctcttcaatatgctgcgtctcggcaagtccgaaccgtggacccttgcccttgagaacgtggtgggtgccaagaatatgaacgtccggcccctgctgaattacttcgaacctctcttcacgtggttgaaagaccagaataagaactcgttcgttggctggagcactgattggtcgccatacgcagaccaatccattaaggtgagaatttcccttaaaagcgcattgggagataaggcttacgagtggaatgataacgaaatgtacctctttagaagctccgtggcctacgctatgagacagtactttcttaaggtcaagaaccagatgatccttttcggagaagaggacgtccgtgtggcaaacttgaagccgaggatctcatttaactttttcgtcacggcaccaaagaacgtgtccgacattattccaaggaccgaggtcgaaaaggcaatccggatgagcaggtcacggattaacgatgcatttcgccttaacgataactcgcttgaatttctggggattcagccaactttgggaccacccaatcagcctcctgtctccatatggcttattgtgttcggagtggtgatgggagtgattgtggttggaatagtgattttgatattcactgggattagagatcgcaagaaaaagaacaaggcacgtagcggcgaaaatccatacgcatccattgatatatccaagggcgaaaacaaccctggatttcagaacactgatgacgtccaaacctcgttc

SEQ ID NO: 6294 - DNA, 2415 bp, synthetic construct
  misc_feature 1..2415: note = source = /note="Description of Artificial Sequence: Synthetic coding sequence"
  source 1..2415: mol_type = other DNA
atgtcctcaagcagctggctgctgctctcacttgtggcggtgaccgcggctcagagcaccatcgaagagcaagcaaagacgttcctggacaaattcaatcatgaagccgaagatctcttctaccagagctcacttgctagttggaattataacactaacatcactgaagagaacgttcagaacatgaataatgcaggagataaatggagcgccttcctcaaggaacaaagcaccctggcacagatgtatccactgcaggagattcagaacctcaccgtaaaacttcagcttcaagccctgcagcagaacggctcaagcgtcctctcagaagacaagagcaaaagactgaataccatcttgaacaccatgtccaccatctactctacaggcaaggtctgcaacccggacaaccctcaagaatgtctcctgctcgagcccggtctgaacgagattatggccaactctctggactataatgagaggctgtgggcatgggaatcttggaggtccgaagtcggaaagcagttgaggccactgtatgaagaatatgtggtccttaaaaacgaaatggcgcgggcgaaccattacgaggattatggagactattggagaggagattacgaggtcaatggcgtagatggctacgactactctagaggacagcttatagaggatgtagagcatacgtttgaggagattaaacctttgtatgagcacttgcacgcctacgtgagagctaagttgatgaacgcatatccgtcgtacatcagccccataggatgccttcctgcccacctcctcggtgacatgtggggaaggttctggaccaacctttatagtctcactgtccccttcggacagaagccaaacatcgatgtgactgatgccatggtggaccaagcatgggacgctcagcggatcttcaaagaagctgaaaagttcttcgtgagcgtggggctcccaaacatgacccagggcttttgggagaattcaatgctgactgaccctggcaacgttcagaaggctgtgtgtcacccaacagcctgggatctcggaaaaggggactttaggatacttatgtgtaccaaggttacaatggacgatttcctgacagctcaccacgaaatgggtcacatacagtacgacatggcatacgctgcgcaaccatttctgctccgcaacggcgctaacgagggatttcacgaggctgtcggcgaaattatgtctctgagcgctgccacacctaagcatctcaagagcataggcctgctgagcccagatttccaggaagacaacgagacagaaattaactttttactgaagcaggctctgacaatcgtgggcaccctgccgtttacttacatgctggagaaatggcgatggatggtctttaaaggcgaaatccctaaggatcaatggatgaagaagtggtgggagatgaaacgcgagattgttggcgtagtggagccggtgccacatgatgaaacttattgcgaccccgcctctcttttccatgtgtcaaacgattactctttcatccggtattatacccgcactctttatcaatttcagtttcaggaggcactctgtcaggccgctaagcacgagggtcctctccacaagtgtgatatctccaactccactgaggccgggcaaaagctgttcaatatgctccgccttgggaagagcgaaccatggacacttgccctggaaaacgttgtgggcgcaaagaatatgaacgtgcgcccactgttgaactattttgagccactttttacctggctcaaggaccaaaacaaaaacagcttcgtaggatggagcaccgactggtctccgtacgccgaccagtcaatcaaggttaggatcagtctgaagtcagctttgggagacaaagcctacgaatggaatgacaacgagatgtacctgttcaggagcagcgtcgcatacgctatgcggcaatactttttgaaggtcaagaaccagatgatactgtttggagaggaggatgtgagggtcgctaacctgaagcctagaatctcttttaatttctttgtgactgcacccaaaaacgtgtcggatatcatcccacgcacagaagtggaaaaagctattaggatgtcacgctcacgaattaacgatgcctttcgcttgaacgacaactcattggaatttcttggcatacaaccaacccttggcccacccaaccaacctcctgtgagcatctggttgattgtctttggagtggtcatgggagtgatcgttgtgggtatcgtcatactgatttttacaggcattcgcgacaggaagaagaaaaacaaggccaggagcggcgaaaacccctacgcttctatagacattagcaagggagaaaacaacccgggcttccagaacactgatgatgtgcaaaccagtttc

SEQ ID NO: 6295 - DNA, 2415 bp, synthetic construct
  misc_feature 1..2415: note = source = /note="Description of Artificial Sequence: Synthetic coding sequence"
  source 1..2415: mol_type = other DNA
atgtcctcgtcgagctggcttttgcttagccttgtcgcagtcactgccgctcagagcaccattgaagagcaagcgaaaacctttctcgataagtttaaccatgaagcagaggacctgttctaccaatcgtcgctcgcatcctggaactacaacactaacatcaccgaagagaacgtgcagaatatgaacaacgcaggtgataagtggtcggcgttccttaaagagcaatcgactctggcacagatgtaccccctgcaagaaattcaaaacctgacggtgaagctgcaactgcaagccctgcaacagaatggttcgtcggtgttgtcggaagataagtcaaagcgcctgaacactattttgaatactatgtccacgatttactccacgggaaaagtgtgtaacccagacaatccacaagaatgtctgttgttggagcctggactgaacgagataatggcaaactcccttgattacaatgaaagactctgggcatgggaatcttggcgatccgaagttggaaagcagcttaggcctctctacgaagagtacgtggtcctgaagaatgagatggcaagagccaaccattacgaggactatggagattactggcgcggagactacgaagtgaatggcgtggacggttacgactacagcagaggacagctcattgaggacgtggaacataccttcgaagagataaaaccactttacgaacacttgcatgcgtacgtgcgggccaaactcatgaatgcctacccttcatacataagcccgataggttgcctcccagcacatctcctcggtgatatgtggggccgcttttggactaacctgtacagcctgaccgtccctttcggtcaaaaacctaatatcgatgtgactgacgcgatggttgatcaggcgtgggacgcacagcgcatctttaaggaggcagaaaagttttttgtctccgtggggctgcctaacatgacccaaggtttttgggaaaacagcatgctcactgatccaggtaatgtgcagaaagctgtgtgtcaccccaccgcatgggaccttggcaagggcgactttaggattctcatgtgtacgaaagtgaccatggacgatttcctcaccgcgcatcatgagatgggacacattcagtacgatatggcttatgcggcacaaccgtttcttcttagaaatggggccaacgagggatttcatgaagcggtgggcgaaatcatgtctctgtcggctgcaacgccaaagcacctgaagagcattggactcctctcccctgatttccaagaggacaacgaaaccgagattaactttttgctgaagcaagcacttaccatcgtggggactctgccgtttacttacatgctggaaaagtggaggtggatggtgttcaaaggagaaattcctaaggaccagtggatgaaaaagtggtgggaaatgaaaagagagattgtgggagtcgtggaacctgtgccacacgatgaaacctactgcgatcctgcgtccctcttccatgtgtcaaatgattattcctttatccggtactacacgaggactttgtaccagttccagtttcaagaggcactctgccaagcagcaaagcatgaaggccccctccacaaatgtgatattagcaacagcaccgaagcgggacaaaagttgtttaacatgcttaggctcggcaagtcggaaccatggaccctggcacttgaaaacgtcgttggggccaaaaacatgaacgtaagacctttgctgaactacttcgagccccttttcacctggctcaaggatcagaataagaattcatttgtcggctggtccactgattggtcgccctatgccgatcagtcgattaaggtccgaatctcgcttaagtcagcactcggtgataaggcatacgagtggaatgacaatgaaatgtacctgtttaggtcatcagtcgcctacgcaatgcgtcaatactttcttaaggtgaagaatcaaatgatcctctttggtgaggaggacgtgagagtggcaaacctgaagcctcgaatatcctttaacttcttcgtcaccgctcccaagaacgtgtcggacataattccacgtactgaagtagagaaggcaatccggatgtcgaggtccagaattaacgatgcattccggcttaacgataactccctcgaatttctcggcattcagccgacccttggacctccgaaccaaccacctgtgagtatatggctcattgtgtttggagtggtcatgggtgtgattgtcgttggcatagtcatcctgattttcaccggaattcgcgaccgcaaaaagaagaataaggcacgatcaggagagaatccgtacgcctcgattgatatctcgaagggagagaacaacccgggattccagaacaccgacgatgtacaaacgtccttt

SEQ ID NO: 6296 - DNA, 2415 bp, synthetic construct
  misc_feature 1..2415: note = source = /note="Description of Artificial Sequence: Synthetic coding sequence"
  source 1..2415: mol_type = other DNA
atgtcttcctcctcgtggcttctgcttagcttggtcgccgtgaccgccgctcagtcaacaatagaggagcaggcgaaaacctttctggacaaatttaatcacgaagccgaagacctgttctatcagtcatcgctggcgtcctggaactacaatacaaacatcaccgaggagaatgtgcaaaatatgaataatgccggggacaaatggtcagcgttcctgaaggagcagagcacgctggcccagatgtaccccctgcaggagatccaaaacctgaccgttaagctgcaattgcaggccttgcaacagaacggatcctcagtcctgtccgaagataagtcaaaacgactgaacacaattttgaatacaatgagtactatttactccaccggaaaggtgtgcaaccccgacaacccgcaggagtgtctcctcctggagccaggcctgaacgaaatcatggccaactcccttgactataacgaacggctatgggcatgggagtcttggcggagcgaggtgggcaagcagctgagaccactgtatgaagaatacgtggtgttaaagaacgagatggcacgggccaatcactatgaggattacggggactactggcgaggtgattatgaagtcaacggcgtcgacgggtatgactattcgcgtggccagttgatcgaggatgttgagcacacatttgaggagattaaaccactatatgaacacttacatgcatacgttagggccaaactcatgaacgcatatccaagctacatcagccctattgggtgcctcccagctcacctgcttggagacatgtggggcaggttttggactaacctttactctctgacagtgcccttcgggcaaaaacccaatatcgacgtcacagatgccatggtggaccaggcctgggacgctcagcgtattttcaaagaagctgagaagttcttcgtctcagtgggcctaccgaacatgacgcagggcttctgggagaattccatgctgacagaccctggaaacgtccagaaagcggtgtgtcatcctacagcttgggacctgggaaagggggatttccgtattctaatgtgtacaaaagtcaccatggatgactttctgacagcacaccacgagatgggacacattcagtatgatatggcttacgccgcacaaccattcctgctgcgtaacggggctaacgaaggtttccatgaggcagtgggagagataatgagtctatccgcagcgacgcctaaacaccttaagtcaattggactgcttagcccagactttcaggaggacaacgagaccgagattaattttttgttgaaacaggctctgactatcgtgggcaccctgccattcacttacatgttggagaagtggcggtggatggtcttcaaaggggagatccccaaggaccagtggatgaaaaaatggtgggagatgaagagagaaatcgttggagttgttgagcctgttccacatgatgagacttattgcgacccagcctctctttttcacgtgtccaacgattattctttcatcagatactacacgagaacgctctatcagtttcagtttcaggaggcgctgtgtcaggcagccaagcatgaagggcctttgcacaaatgcgacatcagcaactcaacagaagcaggccaaaagttgtttaacatgttgaggctcggtaagtctgagccctggaccctggcactggagaatgtcgtcggagcaaaaaatatgaatgtgcgtccactgctgaactattttgaaccactattcacatggttaaaagatcaaaataagaattcattcgtgggatggtctaccgactggtcaccatacgccgaccaaagcatcaaggtaaggatatccttgaagtcggcacttggcgacaaggcttatgagtggaatgataatgaaatgtacctgtttcgatcgagcgtcgcctacgcgatgaggcagtatttcctgaaggtgaaaaaccaaatgattctgttcggtgaggaagacgtcagggtggcaaacctgaagcctcgcatcagctttaactttttcgttaccgcccccaaaaacgtgtcagacataattccccgcacagaagtcgaaaaggccatacggatgagcaggtccaggataaatgacgccttcaggctaaacgacaattctttggagtttctggggatccagcctacccttggcccccccaatcagccccccgtgagtatatggctcattgtgtttggcgtagtaatgggagtgatcgtcgtgggtattgtcattctgatcttcacaggcatcagggatagaaagaaaaaaaataaggctagaagcggcgagaatccttacgcgtccatcgacatatcaaagggtgaaaataacccaggttttcaaaataccgacgacgtgcagacttctttc

SEQ ID NO: 6297 - DNA, 2415 bp, synthetic construct
  misc_feature 1..2415: note = source = /note="Description of Artificial Sequence: Synthetic coding sequence"
  source 1..2415: mol_type = other DNA
atgtcctccagtagttggctgctgctgagtctagtagcagtaaccgcggcccagtccaccatagaggagcaagccaaaacatttctcgacaagtttaaccatgaggctgaagatctgttctaccagtcatctttggccagttggaactacaataccaatatcaccgaagagaatgtacagaacatgaataatgcgggcgacaagtggtccgctttccttaaggagcagtccacactcgcgcagatgtatccattgcaagagattcagaatcttaccgtaaagctgcagctgcaggctctccagcagaacggcagctccgttctgtctgaggacaaatccaagcggttgaacaccatcttaaacacaatgtctactatttattctaccggcaaagtctgtaaccctgataaccctcaagaatgcttgcttctggaaccaggcctgaatgaaataatggccaactcactagattacaatgagcgtttatgggcctgggaatcgtggagatcggaggtgggaaagcagttgaggcctttatacgaggagtatgttgtgctgaagaatgaaatggctcgcgccaatcattacgaggactacggcgattactggaggggtgattacgaagtgaacggagtggacgggtatgattacagccgggggcaacttatcgaggacgttgagcataccttcgaagaaattaagcccctgtatgaacacttgcatgcctatgtgcgtgccaagctaatgaacgcataccccagttatatttcacctatcggatgcctcccggctcacctgctgggcgacatgtggggtagattctggactaatttgtactccttaaccgtcccctttggacaaaaacccaacatagatgtgacagacgcgatggtggaccaagcatgggacgctcaaaggatattcaaagaggccgagaagttctttgtgagtgttggcctgcctaatatgacacaagggttctgggagaacagcatgctgacggatcccgggaatgtacagaaggccgtgtgtcatcctaccgcttgggacctcggcaaaggggacttccggattctgatgtgcacgaaggtgaccatggacgacttcctgaccgcacatcacgagatgggccatatccagtacgatatggcgtacgcagctcaacccttcctgttgcgcaatggggccaacgaggggtttcacgaggctgtgggcgagatcatgtcactgtcagctgctacacccaagcacctcaagtctattgggcttctcagccctgatttccaggaggacaacgagaccgagataaattttctcttgaagcaggccctgacaattgtcggaacactgccattcacgtatatgctagaaaagtggcgttggatggtgttcaaaggagaaattcccaaggaccaatggatgaagaagtggtgggaaatgaaaagagaaatcgtcggagtggtggaacccgtaccccacgatgaaacgtactgcgatccagcgtctcttttccacgtatccaacgactactcttttatcaggtactacactagaacactatatcagttccagtttcaggaagccctctgtcaggccgcaaagcacgaggggccgctgcacaaatgcgatatttcgaactcgaccgaggctggtcagaagttgttcaatatgctgagacttggaaagtctgaaccttggacactggcacttgaaaacgtggtcggggccaaaaacatgaatgttcgccctctcctgaactacttcgaaccactctttacctggttaaaggaccagaataaaaactcttttgtaggctggtcaaccgactggagtccttatgcagaccagtctatcaaagttcgcatcagtcttaaatctgctctgggagataaggcatacgagtggaatgataatgagatgtacctgtttcgctcctctgtggcctacgccatgcggcagtatttcctcaaggtgaaaaatcaaatgatccttttcggtgaagaggacgtgagggtggcaaatctgaagcctcgcataagcttcaatttctttgttacagctccaaaaaacgttagcgatatcattccacgcactgaggtggaaaaagcaatccgaatgtctcgctctaggatcaatgacgcctttcggctgaatgataattccctagaattcctggggatacagcccactctcggcccacctaatcagcccccagtgagcatctggcttattgtcttcggcgtggtcatgggggtgatcgtagtcgggatcgtgattctcatcttcacaggaattagagataggaaaaagaagaacaaggctaggagtggggagaacccttacgcctcgatcgacatctccaagggtgagaataacccgggctttcagaacaccgacgacgtccagacttccttc

SEQ ID NO: 6298 - DNA, 2415 bp, synthetic construct
  misc_feature 1..2415: note = source = /note="Description of Artificial Sequence: Synthetic coding sequence"
  source 1..2415: mol_type = other DNA
atgtctagttcgtcctggctcctgctttcgctcgtggcagttaccgcagcacagtccaccattgaagaacaagctaagacgtttctcgataagttcaaccatgaagccgaggacctcttttatcagtcgtcgctcgcttcgtggaactacaacaccaacatcactgaagagaacgtgcaaaacatgaataacgcgggtgataaatggagcgcatttttgaaagaacaatccaccttggcccagatgtaccctctccaggaaattcagaaccttactgtcaagctccagcttcaagctcttcagcaaaacggctcctcggttctgtccgaggacaagtcaaagcgcctgaacaccatactgaatacgatgtccactatatactcaacgggcaaggtttgtaacccagataatccacaggagtgcctcctgctcgaacctggtcttaatgaaatcatggcaaactcactcgactacaacgagagactctgggcatgggaatcatggcggtccgaagtcggtaagcagctgcgtccactttacgaagaatacgtggtgttgaaaaacgaaatggcgagagcaaatcattacgaggactacggggattactggcgcggtgactatgaagtaaacggcgtggacggatatgattactcaagaggacagctgatcgaggacgtcgaacatacttttgaagagataaagcctctgtacgagcacctgcatgcctacgtccgggctaaacttatgaacgcatacccatcatacatcagccccatcggctgcctgcctgcccacctgctgggcgacatgtggggtcggttttggacgaacctttactctctgactgtgcccttcgggcagaagccaaacattgatgtgactgatgccatggtggaccaggcctgggatgcacaaagaatattcaaagaagcagaaaagttctttgtcagcgtcggtctgccgaacatgactcagggattctgggaaaattcaatgcttaccgaccctggaaacgtccagaaggcagtgtgtcatccaaccgcatgggatctcgggaagggggattttcggatccttatgtgcaccaaggtcactatggatgattttcttacggcgcatcatgagatgggacacattcaatacgatatggcatacgcagcccaaccgttccttcttcgcaacggagcaaacgaaggctttcacgaagctgtgggagagatcatgtcactgtcggcggcaacccccaaacatcttaagtccattgggctgctgtcgcctgactttcaagaagataacgaaactgagattaactttctgctgaagcaggcacttactattgtgggaacgttgcctttcacctatatgctggagaagtggcgctggatggtattcaagggagagatccctaaggatcaatggatgaagaaatggtgggaaatgaagcgggaaattgtgggagtcgtggagcccgtccctcacgatgaaacctactgtgatccagcatccctgtttcatgtgtccaatgactactcattcatccgctactatactcggaccctttaccagtttcagtttcaagaggcattgtgtcaagccgccaagcacgaaggcccccttcacaagtgtgatatctcgaacagcacggaggcaggtcaaaagttgtttaacatgcttcgactgggaaaaagcgaaccctggaccctcgcgttggagaatgtggtaggcgcaaaaaacatgaacgtgaggcccctgttgaattactttgaacctctctttacttggctcaaggatcagaataagaattcgtttgtgggttggtcaactgactggagcccttacgccgatcagtccattaaggtgcggatttccctgaagtcggctctgggtgataaggcatacgagtggaatgataatgaaatgtacttgtttagatcgagcgtcgcatacgcgatgcgacagtactttttgaaggtgaaaaaccaaatgattctttttggggaagaggacgtgcgtgtcgcgaacctgaaacctcggattagcttcaacttctttgtgactgcgccaaaaaacgtgagcgacattatccctagaaccgaagtggagaaggctatcagaatgtcccgtagcagaatcaatgacgcgtttcgcctgaacgataactctcttgagtttcttggaatccaaccgacgctgggcccaccaaaccagcccccagttagcatctggctgattgtgttcggggtggtgatgggagtgattgtggtcggaattgtcattcttatctttaccggcatcagggaccgtaagaagaagaacaaggccaggtcaggagaaaacccttacgcgtcgatcgatatctcaaagggagaaaacaaccccgggtttcaaaacactgatgacgtgcagacttcgttc

SEQ ID NO: 6299 - DNA, 2415 bp, synthetic construct
  misc_feature 1..2415: note = source = /note="Description of Artificial Sequence: Synthetic coding sequence"
  source 1..2415: mol_type = other DNA
atgtccagctcatcctggctccttctctcactcgtggccgtgactgcagcccaatcaaccattgaagagcaagctaaaacgtttttggataagtttaaccatgaggccgaggatctgttttaccaatcctccctggcgtcttggaactacaatacgaacataacggaggaaaacgtccagaatatgaacaatgctggggataaatggtcggcattcctgaaagagcaatcgacgttggcacaaatgtatcctctgcaggagatccagaacctgaccgtgaaactgcagcttcaggctctgcaacaaaacggatcgagcgtgctgtccgaggataaatcgaagcgccttaacactattcttaacaccatgagcaccatatactcgacgggaaaggtgtgtaacccagataacccacaagaatgtctgctgctcgaaccgggccttaatgagattatggcaaactctctcgactacaacgagaggttgtgggcctgggagagctggaggtcagaggtcggtaagcagctcagacctctgtacgaagagtacgtggtgctgaaaaatgagatggcccgggcaaatcattacgaagattacggtgactactggagaggtgattacgaagtcaatggagtcgatggttacgattactccagaggacaactgatcgaagatgtggaacatacctttgaggagattaaaccgctttacgaacatctgcacgcatacgtgagggcaaagctgatgaacgcgtatccttcgtacatttccccaataggatgtctgcccgcacacctgctcggggatatgtggggcaggttctggaccaacctttacagcctcactgtcccatttggccaaaagccaaacattgatgtgaccgatgccatggtcgatcaagcatgggacgcacaacgcattttcaaggaggccgaaaagttttttgtgtcggtgggtctgccaaatatgactcaggggttttgggagaattcaatgctcaccgacccaggaaatgtccaaaaggcggtctgtcatcccaccgcatgggatttgggtaaaggagacttcagaattctcatgtgtaccaaagtcactatggatgacttccttacggcccaccatgaaatgggccacattcaatacgatatggcctacgccgcacagccatttttgctgaggaatggggccaacgaaggattccatgaggcagtgggcgagattatgagcctgagcgcagcaaccccaaagcatctgaaatcaattgggctgctttcgcccgactttcaagaggacaacgaaaccgagataaactttctgctgaagcaggctcttaccattgtcggaactcttcctttcacctacatgctcgagaagtggaggtggatggtgttcaagggagaaattccgaaggaccaatggatgaaaaagtggtgggagatgaagcgagaaatagtgggggtggtcgaacctgtcccgcacgatgagacttactgcgatccggcctcgttgtttcacgtgtccaacgattactcgttcatccggtactacactagaactttgtaccaattccaattccaggaggcactctgccaggcagcgaaacacgaaggcccactgcataagtgcgacatctcgaattccaccgaggcaggacaaaagctgtttaacatgcttcgcctgggcaagtccgaaccctggactctggcacttgaaaatgtcgtgggagcaaagaacatgaatgtgcggccgcttctcaactactttgaaccccttttcacgtggcttaaggatcagaataagaacagctttgttggctggtccactgactggagcccctacgcagatcaatcaattaaggtgagaatctctcttaagagcgcactgggagacaaggcgtatgagtggaacgataatgaaatgtacctctttcgttcgtcagtcgcatacgcaatgcgtcagtacttcctgaaggtgaagaaccaaatgattctgtttggggaagaagatgtgcgtgtcgcgaaccttaagccccgtatctcgtttaacttctttgtcactgcgccaaagaatgtgtcggatatcatacctcgaactgaggtggagaaggcaattcggatgagcagaagcagaatcaacgatgcatttcgtcttaatgataattcgctggaattcttgggaattcaacctactctcggaccaccaaaccagccacctgtgtccatttggctgattgtgttcggagtggtgatgggagtgatcgtggtgggaattgtgattctcatcttcactggtatccgcgacagaaagaaaaagaataaagcgaggtccggcgaaaacccttacgcatcgattgatataagcaagggagaaaacaacccaggtttccagaatactgatgatgtgcaaacctcgttt

SEQ ID NO: 6300 - DNA, 2415 bp, synthetic construct
  misc_feature 1..2415: note = source = /note="Description of Artificial Sequence: Synthetic coding sequence"
  source 1..2415: mol_type = other DNA
atgagcagctcaagctggctgctcctgagcctggtggcggtgactgcggcacaatcgactatcgaggagcaggccaagactttcctggacaagttcaaccacgaagccgaagatctgttctaccaaagctctcttgcctcgtggaactacaacactaatatcactgaagaaaatgtgcagaatatgaacaatgccggcgacaagtggagcgcattcctgaaggaacagagcaccctcgcccagatgtaccctctccaggaaatccagaacctgaccgtgaagctccaacttcaggcactgcaacagaacgggtcgtcagtgctctctgaggataagtccaaacggctgaatactattctgaacaccatgagcacgatctactcaactgggaaggtgtgtaacccggataacccacaggagtgcctcctgctggaacctgggctgaacgagatcatggccaatagcctcgactacaacgagcgcctttgggcttgggaatcatggagatcggaagtcggcaagcagttgaggccactgtacgaagagtatgtggtgctcaaaaacgaaatggctcgggctaatcactacgaggattacggagactactggagaggagactacgaagtgaatggagttgacggatacgactactccagggggcagctcatcgaggacgtggaacacactttcgaagagatcaagccgctctacgagcacctgcacgcctacgtgcgcgcaaaactcatgaatgcttatccgagctatatctcgcccatcggatgcttgccagctcatttgctgggagatatgtggggacggttctggactaacctctactcgcttaccgtccctttcggacaaaagcccaatatcgacgtgactgacgctatggtggaccaagcctgggacgcacagcggatctttaaggaggccgaaaagttcttcgtgtcggtggggctcccaaacatgacccagggcttttgggagaactcgatgctgaccgacccgggcaatgtgcagaaagccgtctgccatcctaccgcctgggatcttgggaagggagatttccgcatcctcatgtgcactaaggtgaccatggacgacttcctgactgcccatcacgaaatgggccatatccaatacgatatggcctacgcagcgcagccttttctgctccgcaacggggcgaacgagggattccatgaggcggtaggagagattatgtccctgagcgcagctacgccgaaacacctcaagtcaataggactcctctcaccggacttccaagaggacaatgaaactgagatcaatttccttcttaagcaagccctcaccatcgtgggtaccctccccttcacctacatgctcgaaaagtggcgctggatggtctttaagggtgagatccctaaggaccagtggatgaagaaatggtgggagatgaagagggagattgtcggagtggtggaaccagtcccgcacgatgaaacgtactgtgacccggcttcgctgttccacgtgtccaacgattacagctttattcggtactacacgcggactctttaccagtttcagttccaagaggctctttgccaggctgcgaaacacgaaggccccctgcataagtgtgacatcagcaactcaactgaggcaggacaaaagctgttcaacatgctccggttgggaaaatccgagccttggaccctggcgctcgagaacgtcgtcggcgctaaaaacatgaatgtgaggccgcttctgaattactttgaaccgctgttcacttggctcaaggatcagaataagaattctttcgtgggttggtcgactgactggagtccgtacgcagaccaatcaatcaaggtacgcatctcgctgaaatccgcattgggcgataaagcgtacgagtggaatgataacgaaatgtatctttttagatccagcgtggcttacgctatgcgccaatacttcctgaaggtgaagaaccagatgatcctcttcggcgaggaggatgtccgtgtggcaaacttgaagcctcgcatcagcttcaatttcttcgtgactgcaccgaaaaatgtgagcgacatcatcccgcgcactgaggtcgaaaaagcgatcagaatgtcccgctcccggattaacgacgccttcagactgaacgacaacagcctggaatttctcggcatccagccgaccctgggacctcctaaccagccgccggtgtccatctggcttatcgtgttcggtgtggtcatgggagtgatcgtggtcggcatcgtgatcctgatctttactggaatccgggatcggaaaaagaaaaacaaggcgcgcagcggggaaaacccctacgcctcgatagacatctcgaagggagagaacaatccaggttttcaaaatactgatgacgtgcagacttccttt

SEQ ID NO: 6301 - DNA, 2415 bp, synthetic construct
  misc_feature 1..2415: note = source = /note="Description of Artificial Sequence: Synthetic coding sequence"
  source 1..2415: mol_type = other DNA
atgtcgagttctagttggctgctgctttcactggttgctgtgactgctgcacagagcaccattgaggaacaggccaaaaccttcctggacaaatttaatcacgaagccgaagacctgttttatcagagtagtctcgcctcctggaactacaacaccaatataactgaggagaatgtgcagaatatgaataatgctggcgataaatggtcagcttttctgaaagagcagtccaccttggcccagatgtatcctctgcaggaaatccagaacctgaccgtcaagctgcagttgcaggccctgcagcagaatgggtcttccgtgctcagtgaggacaaaagtaagagattgaacactatcctgaatacgatgagtactatttactctactggaaaggtgtgtaacccagataacccccaggagtgcctgttgcttgagccgggtctgaatgagattatggcaaactcactcgattacaacgaacgcctgtgggcctgggagtcgtggcgctctgaagtgggcaagcagctccgccccctatatgaggagtatgtggtccttaagaatgagatggctcgagccaaccattacgaggactatggtgattactggagaggtgactacgaggtgaatggcgtcgacggctatgactattcgcgtggccaactaatcgaggatgtggagcacacatttgaggaaatcaagccactatacgagcatcttcacgcctatgtgcgcgcaaagctgatgaatgcatacccctcatatatttcccccattgggtgcctgcctgctcacttactgggcgatatgtggggcaggttctggacaaacctgtattctttgactgtaccgttcggtcaaaagcctaacattgatgtgacagacgcgatggtcgatcaggcttgggacgcccagcgaatatttaaggaagcagaaaagttctttgtctcggtagggcttccaaatatgacccagggtttctgggaaaacagcatgctgacagaccccggcaatgttcagaaggcagtttgccatcctacagcatgggacctgggaaagggcgattttcggatcctcatgtgtaccaaggtgactatggacgattttctgaccgctcaccacgagatgggccacatacagtatgacatggcatacgctgcacagcccttcctgttgagaaacggtgctaatgaggggtttcatgaggcagtgggcgagatcatgtctctgtccgccgctactccaaaacaccttaagagcataggacttctatctcctgatttccaggaagacaacgagacagagattaacttcttgctcaagcaggccttgactatcgtcggaaccttgcccttcacttacatgttggagaaatggcgctggatggtctttaagggagagatccctaaggatcagtggatgaagaagtggtgggagatgaagagggagattgtgggagtcgtggaaccagtgcctcacgatgaaacttattgcgaccccgcgtctctgttccacgtatccaacgactacagcttcatccgatattacaccagaacactgtatcagtttcaattccaggaggctctgtgtcaggcggcgaaacatgaaggtcctcttcacaaatgtgacatctccaactctacggaggccggccaaaagctctttaatatgctgcggctcggtaaatccgaaccgtggacactggccctggagaacgtcgtgggcgctaagaatatgaacgtgcgtcccctgttgaactattttgaaccattatttacctggctgaaagatcagaataaaaatagcttcgtgggctggagcacagattggagcccctacgccgaccagtcaatcaaggtgcgcatttcactgaaaagtgcgctgggggataaagcctacgaatggaacgataacgagatgtacctatttaggagttcggtagcgtacgcaatgaggcagtactttttaaaggtcaagaatcagatgatcctgttcggagaggaggacgtgcgcgtggccaatctcaaacctcgtatttctttcaactttttcgtaacggctcctaagaacgtgtccgacatcatcccacgaacagaagtggaaaaggccattcggatgagccggagcaggattaatgatgcttttaggttaaatgacaacagcttggaattcctagggatccagcccactctcggcccgccaaaccagccccctgtgtctatctggctcatagtattcggcgtagtgatgggcgttatagtggtcggcatcgtgattctcatttttaccggaattcgtgataggaagaagaaaaacaaggcccgaagcggcgagaatccctatgcgagcatcgatataagtaagggagagaataaccctggatttcaaaacactgatgatgtgcagacttcattt

SEQ ID NO: 6302 - DNA, 2415 bp, synthetic construct
  misc_feature 1..2415: note = source = /note="Description of Artificial Sequence: Synthetic coding sequence"
  source 1..2415: mol_type = other DNA
atgagctccagctcgtggcttcttctctcgcttgtggcggtgactgcagcacagtcgacgattgaggagcaagcaaagactttcctggataagtttaatcatgaggcggaagatctcttttaccagtcgtcacttgcttcatggaactacaacaccaacatcaccgaagaaaatgtgcagaatatgaacaacgccggagataagtggtctgcattcctgaaagaacaatctacccttgcacaaatgtaccctttgcaagaaatccaaaacctgactgtgaaactccagctgcaggcattgcagcagaacggatcctcagtcctctcggaagataaatccaagagactgaacactattcttaacacgatgagcactatttactcaactggtaaggtgtgtaacccagataaccctcaagagtgcctgctgttggaaccaggactcaatgagataatggcaaactccctggactacaatgagcgcctttgggcatgggagtcctggcgatcggaagtgggtaagcagcttcgaccactctacgaggaatacgtggtgctgaagaacgaaatggcccgggcaaaccattacgaagattatggagactactggcgcggagactacgaggtgaacggcgtggacggttacgactattctcggggacagcttattgaagatgtggaacacacttttgaagaaatcaagcccctgtacgagcatctgcatgcctacgtgagagccaaactgatgaacgcgtacccctcctacatatcgccaatcggctgtctgcccgcacacctcctcggtgatatgtggggccgattttggaccaacctttactcccttaccgtcccatttggacaaaagccaaacattgatgtcaccgacgccatggtcgatcaagcatgggatgcacaacgcatctttaaggaagcagaaaagttttttgtgagcgtgggacttccaaacatgactcaaggattctgggaaaattccatgctgactgatccaggaaatgtgcaaaaggccgtgtgccatcccaccgcatgggatctgggaaagggagattttcgaattttgatgtgcactaaggtcactatggacgattttctgaccgcccatcacgaaatgggacatatccagtacgacatggcatacgcagcgcaaccatttttgctgaggaatggagcaaacgaaggttttcatgaggcagttggggagatcatgtcattgagcgcagctacccctaagcatctcaagtccattggactgctgtcccctgacttccaagaggataacgaaaccgagataaactttcttctcaagcaggcgctgactatcgtgggtactctccctttcacttacatgcttgaaaagtggagatggatggtgtttaagggtgaaatccctaaggaccaatggatgaagaaatggtgggaaatgaagcgggaaattgtgggtgtcgtcgaacccgtgccacatgacgaaacgtactgtgaccctgcatcgctgttccatgtgtcgaacgactactcctttatccgttactacactcgtaccctctaccaatttcagttccaggaagccctctgccaggctgccaagcatgaaggacctttgcacaagtgtgatatatcgaactccaccgaagcagggcagaaacttttcaatatgctgaggctgggaaagtccgaaccttggaccctggcacttgagaacgtggtcggagctaagaatatgaacgtaagaccgctgctgaattactttgaacccctgttcacttggcttaaagatcaaaacaagaatagcttcgtgggctggtcaaccgactggtcgccctacgcggatcagagcattaaggttcggattagccttaagtcggcactgggagacaaagcatatgaatggaatgataatgaaatgtacctctttaggtcatccgtggcatacgccatgcggcaatactttcttaaagtgaagaaccagatgatactctttggtgaagaggacgtccgggtggccaaccttaaacctcgcatatcgtttaacttcttcgtgactgcaccaaaaaacgtgtcggacattatccctcggaccgaagtggaaaaggcaattcgcatgtcgagaagcagaattaacgatgcatttcgacttaacgacaattctctggagttcttggggattcaaccaaccctgggaccgccgaatcaaccaccagtcagcatctggctgatcgtctttggagtggtcatgggggtgatcgtggtggggatcgtgattctgattttcacgggaattagagatcgtaaaaagaagaataaagcgcgttccggagaaaacccatacgcttccatagatatctccaaaggagagaacaaccctggttttcaaaataccgatgacgtgcagacctcattt

SEQ ID NO: 6303 - DNA, 801 bp, synthetic construct
  misc_feature 1..801: note = source = /note="Description of Artificial Sequence: Synthetic coding sequence"
  source 1..801: mol_type = other DNA
atgaaggccgccgtgctgactttggcagtcctgtttttaactggctcccaggcccggcacttttggcagcaggatgagccaccccagagtccctgggatcgcgtgaaggaccttgcgaccgtgtacgttgacgtgttgaaggattctggacgcgattacgttagccagtttgagggatccgctcttggcaaacagctcaacctgaagctgctcgataactgggatagcgtaactagtactttcagtaagctgagggaacaattgggccccgtcacacaggagttctgggacaatctggagaaggaaacagaggggctgcggcaggaaatgagcaaggatcttgaggaggtaaaggcaaaagttcagccttatctggacgattttcagaagaagtggcaggaggagatggaactctacagacaaaaggtcgaacctttacgcgcggaattgcaggaaggagccagacagaagctgcacgaattgcaagagaagctgagtccgctcggcgaggagatgagggattgcgcccgggcccacgtagatgccttgcgcactcaccttgccccatactctgatgaactcaggcaacggctcgccgctaggttggaggcgctgaaagagaatggcggagctcggctggctgagtaccatgccaaggcaactgagcacttgagtactctctcggaaaaggccaagcccgcccttgaagacctccgacaaggactcctccctgtactggaaagttttaaagtgtcctttctatccgccctcgaggaatacaccaaaaaactgaacacacag

SEQ ID NO: 6304 - DNA, 801 bp, synthetic construct
  misc_feature 1..801: note = source = /note="Description of Artificial Sequence: Synthetic coding sequence"
  source 1..801: mol_type = other DNA
atgaaagccgctgtgctaacccttgccgttctattcttgactggttcccaggctagacacttttggcagcaggacgagccaccccagtccccttgggaccgtgtcaaggacctggccaccgtttacgtagatgtgcttaaggatagcggccgggattacgtctcccagttcgaaggaagcgcacttggcaagcaactcaacctgaagctgttggacaattgggattccgtgacaagcacgttcagcaagcttcgtgagcagctcggaccagttacccaggagttctgggataacttggagaaagagacggaaggactacggcaagaaatgagtaaagatcttgaggaagtgaaggctaaggtgcagccataccttgacgactttcagaaaaagtggcaggaagaaatggagctgtaccggcaaaaagtagaacccctcagggccgaattacaggaaggcgccagacagaagttgcacgaactgcaggaaaagctctcccctttgggagaggagatgcgcgactgcgcacgcgctcatgtggatgcccttaggacccatcttgcgccctacagcgacgaacttcgtcaaaggctagccgcaagactagaggctctaaaagagaacggcggggctaggctggcagagtaccacgctaaggccacagaacacctgtcaactctgagcgagaaagccaagcccgccttagaggatctacgtcagggcttgctgcctgtgctggaaagtttcaaagtgagtttcctgtctgcgctggaggaatatacaaaaaaactcaacacacag

SEQ ID NO: 6305 - DNA, 801 bp, synthetic construct
  misc_feature 1..801: note = source = /note="Description of Artificial Sequence: Synthetic coding sequence"
  source 1..801: mol_type = other DNA
atgaaggcagcagtgcttactcttgcagtgctgtttctgaccgggtcccaggcaagacatttttggcagcaggacgaacctccccagtctccatgggatcgggtgaaggatctggcgactgtctacgtggatgtgctgaaggattcgggtagggattacgtgagccaattcgaaggatcggcactgggtaagcaactcaatctgaagctcctggataactgggactcagtgacctcgacgttttcgaagctgagagagcaactgggacccgtgactcaggagttttgggacaacctcgaaaaggaaaccgaagggctgcgtcaggaaatgtcgaaggatctggaagaagtcaaggccaaagtccaaccttacctggacgactttcagaagaaatggcaagaagaaatggagctctaccgccaaaaggtggaacctctgagggcagaattgcaggaaggagccagacagaaacttcatgagctccaagagaagctgtcccctctgggagaagaaatgagagattgcgctagggcacatgttgatgccctccgaacccacctggcaccatacagcgatgaactccgacagcgtctggcggcaaggctcgaagcactcaaagagaatggaggggcacgcttggctgaataccatgcgaaggcaaccgaacatctctcaactctttccgaaaaagcgaagcccgcactggaggacctgcgccagggactcctcccagtgctggagagctttaaggtgtccttcctctccgcattggaagaatacaccaagaaactgaatacccag

SEQ ID NO: 6306 - DNA, 801 bp, synthetic construct
  misc_feature 1..801: note = source = /note="Description of Artificial Sequence: Synthetic coding sequence"
  source 1..801: mol_type = other DNA
atgaaggccgccgtcctcaccctggctgtgctgtttctgacggggtcgcaagcaagacatttctggcagcaggatgaaccacctcagtccccatgggaccgggtgaaggatctcgccactgtatatgtagatgtgctgaaagattctgggagagactacgtcagccaatttgaaggatccgcccttggcaagcagctgaaccttaagttactggataactgggattctgtgacgagcacattctccaagctccgcgaacagctggggccagtgacccaggagttttgggacaacctcgagaaggagactgagggcctgcgccaggagatgtctaaagacctggaggaggtcaaagctaaagtgcagccttatttggacgatttccagaagaaatggcaggaggaaatggagctgtaccgccagaaagtggaacccctacgagcagaactacaggagggggcaaggcagaagctccatgagctgcaggagaaactgagcccgctgggcgaagagatgagggattgtgctcgagctcatgtcgatgccttgcggacgcatctggcaccgtattcagacgagctgaggcaaaggctcgcagctcggctcgaagcactcaaggagaacgggggtgccaggctagctgaatatcacgcgaaagccacggagcatttaagcactttgtccgaaaaggcgaagcctgctttagaggacctacgtcagggactgcttcctgttctggaatcttttaaagtgagctttctctccgcactggaggagtacacaaagaaacttaatacacag

SEQ ID NO: 6307 - DNA, 801 bp, synthetic construct
  misc_feature 1..801: note = source = /note="Description of Artificial Sequence: Synthetic coding sequence"
  source 1..801: mol_type = other DNA
atgaaagccgcggtgctcactctcgctgtgctgtttctgactggatcccaggccagacatttctggcagcaggatgaaccaccgcaaagcccttgggaccgggtgaaagacctggcgacggtgtacgtggacgtgctgaaagattcgggtcgcgattacgtgtcccaatttgagggttcagcccttggaaaacagctcaacctgaaacttctggataactgggactctgtgacttccaccttctcgaagttgagggaacaactgggtcctgtcacccaggaattttgggacaacctggaaaaggagactgagggacttcgccaagaaatgtccaaagatcttgaggaagtgaaagccaaagtgcaaccgtacctcgacgatttccagaagaaatggcaagaagaaatggagctgtatcgtcagaaggtcgaaccactgcgcgctgaactgcaggaaggagcgcgccagaagctgcacgagctccaggagaagctgtcgcctctcggagaagaaatgcgcgactgtgcacgggctcatgtggacgcgctgcggacccatcttgccccttactcggacgagctgcggcagagattggcggcgcggctggaggccctcaaggagaatggaggggccagactggccgaataccatgctaaggccacggagcacctgagcactctgtccgaaaaggccaagcccgccctggaagatcttcgccagggactcctgccggtgctggagtccttcaaagtctcatttctgagcgcgcttgaggaatacaccaagaagctcaacactcag

SEQ ID NO: 6308 - DNA, 801 bp, synthetic construct
  misc_feature 1..801: note = source = /note="Description of Artificial Sequence: Synthetic coding sequence"
  source 1..801: mol_type = other DNA
atgaaagctgctgtattgaccttggctgttcttttcctgaccggttcccaagctcgccacttctggcagcaagacgaaccccctcaaagcccctgggacagagtgaaggacctcgctactgtctatgtcgacgtcctgaaggacagcggccgcgactatgtctcccagttcgaaggttctgctctgggtaagcaactcaacctgaagctgttggataactgggattctgtcactagcacattctccaagctcagggaacagttgggtcccgttacccaggaattctgggacaacttggagaaggaaaccgagggcttgcgtcaagagatgtcaaaggacctggaagaggtcaaggccaaggtgcagccctacctggacgacttccaaaagaagtggcaggaggagatggaactgtacaggcagaaagtcgagcccctgcgcgctgagctgcaggagggagccaggcagaagttgcacgagctccaggagaaattgtctccactgggagaggagatgcgtgactgcgctcgtgcacacgtggacgcactgaggacccatctggccccatatagcgatgagctccgtcagagactggccgctagactggaggcactcaaggagaacggaggcgcccgcttggccgaatatcacgctaaggctacagagcatctgtctaccctgtccgagaaagccaagcctgctctggaggatttgaggcagggcctgttgccagtgctcgagtcctttaaggtctctttcctgtccgcacttgaagagtacaccaagaagttgaacacccag

SEQ ID NO: 6309 - DNA, 801 bp, synthetic construct
  misc_feature 1..801: note = source = /note="Description of Artificial Sequence: Synthetic coding sequence"
  source 1..801: mol_type = other DNA
atgaaagcggccgtcctaaccttagccgtcctctttctaaccgggtctcaagcgcgacatttttggcagcaggatgaacccccccaaagcccttgggaccgggtcaaagacctcgcaacagtgtacgtagacgtccttaaggattcgggaagggattacgtctctcagttcgagggatctgcccttggcaagcagctcaatctaaagctgttggataattgggatagcgtgactagcaccttctcaaaactcagggagcagttgggacctgtgacccaggagttttgggataacttggaaaaggagaccgaggggctgaggcaggagatgagcaaggatcttgaggaagtgaaggcaaaggtgcaaccataccttgatgactttcagaaaaagtggcaggaagagatggagctgtaccggcagaaggtggaaccactaagggccgagctgcaagaaggcgcccggcagaaactgcacgagctacaggaaaagctgagtcctctgggcgaggagatgagggactgtgccagagcacacgtggacgctctgagaacccacctcgccccctactcagacgagttgcgacagcggctggcggccaggctggaagcccttaaagagaacgggggcgctaggctggctgagtaccacgccaaagccactgagcacctgtccacactgagcgagaaggcgaagccagcactggaggacctccgtcagggtctcctacctgtgctcgagagctttaaagtcagctttctttccgccttagaggaatacacaaaaaagttgaacacccag

SEQ ID NO: 6310 - DNA, 801 bp, synthetic construct
  misc_feature 1..801: note = source = /note="Description of Artificial Sequence: Synthetic coding sequence"
  source 1..801: mol_type = other DNA
atgaaagcggccgttcttacactggccgtgttgttcctgacaggtagccaggctcgacatttctggcagcaagacgagccccctcagagcccttgggatagagtgaaggacttggcaaccgtgtatgtggacgtcttaaaggattccggtcgcgactatgtgtctcagtttgaaggtagtgctctcggcaagcagctcaatttgaagctactagataactgggacagtgtgacgtccaccttttcaaagttgagagaacaactgggaccagttactcaggaattctgggataatcttgagaaggaaacagaggggctacgccaagaaatgagtaaggatttggaggaagtcaaggctaaggttcagccctacctggatgactttcagaaaaaatggcaggaggagatggagctttatcgtcagaaagtggagcccctgagagccgagctacaggagggggcacggcaaaagctacatgagttgcaagagaagctctcccccctaggcgaggagatgcgcgactgcgcacgagcccacgtcgatgcattaagaactcatttggccccttattcagacgaactgagacagaggctagcggcgcgtctggaggccctgaaagaaaacggaggagccagattggcagagtaccacgctaaagccactgaacacctcagcacattatccgaaaaggccaagccagccctggaagatctgcgtcaggggcttctgcctgtgctggaatcctttaaggtctcattcctgtcagctctggaggagtataccaagaaactgaacactcag

SEQ ID NO: 6311 - DNA, 801 bp, synthetic construct
  misc_feature 1..801: note = source = /note="Description of Artificial Sequence: Synthetic coding sequence"
  source 1..801: mol_type = other DNA
atgaaggcagccgtgctaacacttgctgtgctgtttcttacggggagccaggcaaggcacttctggcagcaggacgaaccgccccaaagtccctgggaccgcgttaaggatctggctacagtgtacgtcgatgtgctcaaggattcagggcgggattatgttagtcagttcgaaggttccgctctcggaaaacaactgaatctgaaactgctggataactgggatagcgtgacctccaccttctcaaagttgagagagcaacttggaccagtcactcaggaattctgggacaacctcgaaaaagagaccgaaggacttagacaggaaatgtctaaggaccttgaagaagtcaaagcaaaagtgcaaccctatttggacgattttcagaagaaatggcaagaggagatggaactgtaccgacagaaggtggaacccctgcgagccgaactgcaggagggggcacgacagaaactacatgaactccaagagaagttgtctcctctgggggaagaaatgagggattgtgccagagcacacgtcgacgccttacgcacccatttagctccttactccgacgaactgcggcagaggttggccgcacgccttgaggctcttaaggaaaacggaggtgcacgtctggccgaatatcatgctaaggccaccgaacacctgagtacgctcagcgaaaaggccaagcctgcccttgaggatctgcgccaagggctcttacccgttctagaaagcttcaaggtctctttcctctctgccttggaggaatataccaagaagctgaacacgcaa

SEQ ID NO: 6312 - DNA, 801 bp, synthetic construct
  misc_feature 1..801: note = source = /note="Description of Artificial Sequence: Synthetic coding sequence"
  source 1..801: mol_type = other DNA
atgaaagccgctgtactgaccctggcagtgctgtttctgactggctcccaggctcgccatttctggcagcaggacgaaccgccacagtcaccctgggatagggtgaaggacttggctacagtgtatgtcgacgttttaaaggattccggacgcgactatgtgtctcagttcgagggctccgctctggggaaacagctgaacctaaaactgctcgacaattgggactccgtgacctctaccttcagtaaactccgagaacagctgggtccagtgactcaagaattttgggataatcttgagaaggagacagaaggcctccgccaggaaatgtccaaagatctggaggaggtgaaggctaaagtgcagccatacctcgatgatttccagaagaaatggcaggaggagatggaactctaccgacaaaaggtggagcctctgcgggcggagttgcaggaaggagccaggcaaaagttacacgagctgcaagagaagctgtccccactgggcgaggagatgcgggattgcgctagagcgcatgtcgatgctctacggacccatctggcaccatacagcgacgagctcaggcagcggttggcggctcgcctggaggccttgaaggagaatggaggtgcaagattagctgaatatcacgctaaggcaacagaacacttatccaccctgagcgagaaggccaagcccgccctggaagacttgagacagggcctgctccctgttctagagtctttcaaggtgtccttcctgagtgccctcgaagaatacactaaaaagttgaacacgcag

SEQ ID NO: 6313 - DNA, 801 bp, synthetic construct
  misc_feature 1..801: note = source = /note="Description of Artificial Sequence: Synthetic coding sequence"
  source 1..801: mol_type = other DNA
atgaaagcagccgtccttacgctcgcagtcctgttccttaccggcagtcaggctcggcacttctggcaacaagacgagcctccacagtcgccttgggatcgtgtcaaggatctggcgaccgtgtacgtcgatgtgttgaaagacagcggaagagactacgtctcccaatttgaaggatccgcccttgggaagcagctcaatcttaagctgcttgacaactgggattccgtgacgagcacgttttcaaagctgagggaacagttgggtcctgtgacgcaggaattctgggataacctcgaaaaggaaactgagggtttgcggcaggaaatgtcaaaggaccttgaagaagtgaaagcaaaggtgcaaccttacctcgatgacttccagaagaagtggcaagaagaaatggaactgtaccgccagaaggttgagccccttagagccgaactccaagaaggggcacgccagaaacttcatgagcttcaagagaaactgagccctctcggtgaagagatgagagattgtgcaagagcacatgtcgacgcactgcgcacccacctggcaccctattcagatgagcttcgtcaaagactcgcagcgcgtctcgaggcactgaaggaaaatggaggtgcacggctggctgaatatcacgccaaagccactgagcatctttccactctctccgaaaaggcaaaacccgcattggaggacctccggcagggacttctgccggtcctggaatcgtttaaggtttcatttcttagcgcactcgaggaatacaccaagaagctgaatactcag

SEQ ID NO: 6314 - DNA, 801 bp, synthetic construct
  misc_feature 1..801: note = source = /note="Description of Artificial Sequence: Synthetic coding sequence"
  source 1..801: mol_type = other DNA
atgaaagcagcagtgcttacactagccgtgctattcctgacaggtagtcaagctcgccacttctggcaacaagacgagccaccacagtcaccatgggacagggtcaaggatttggccaccgtatacgtggacgtcctgaaggacagcggaagggattacgttagccagtttgaaggcagcgcgctgggtaaacagcttaaccttaagctgctagacaattgggactcggtaacatcgactttctctaagctaagggaacagctcggtcccgtgacacaggaattctgggataaccttgagaaggaaacggaaggtttaaggcaagagatgagcaaggatctggaagaagtgaaggcgaaggtacagccctatttggatgattttcagaaaaagtggcaggaggagatggaattgtacaggcaaaaagtagagcctctgagggcggagctgcaggagggggcaagacaaaagctccacgaactgcaggagaaactctctcccttgggggaagagatgagagattgcgcacgcgcacacgtggatgcacttcgaacccacttggctccatactccgacgaactaaggcaaaggctggccgcccgacttgaagccttaaaagagaacggcggcgccagacttgcggaatatcacgcaaaagccacagagcatcttagtactctcagcgagaaagcaaagcccgcactggaagacctgcggcaaggattgctgccagtcctcgaaagcttcaaagtgagctttctttctgccttggaggaatacaccaagaagcttaatacccag

SEQ ID NO: 6315 - DNA, 801 bp, synthetic construct
  misc_feature 1..801: note = source = /note="Description of Artificial Sequence: Synthetic coding sequence"
  source 1..801: mol_type = other DNA
atgaaggcagcagttctcaccctggcggtcctgttcctcaccggaagtcaagccagacacttctggcaacaggatgagccgccccaaagtccctgggaccgcgtgaaagaccttgctacagtctacgtggacgtgctcaaggattctggccgcgattacgtgtcccagttcgagggttccgcacttggtaaacagttgaaccttaaactgctagataactgggattctgtcacctctaccttctctaagctacgggaacagttaggccctgtcacccaagagttctgggacaatttggaaaaagagaccgaaggcctgagacaggaaatgtccaaggaccttgaagaggttaaggccaaggtgcaaccatatctcgacgattttcagaagaaatggcaagaggaaatggaactgtacaggcagaaggtggagccccttcgagccgaattgcaggagggagccaggcagaagctccatgaactacaagagaaactgtccccattgggagaggaaatgagggattgcgcccgcgcgcacgtggacgccctacgcacccacctcgccccatattctgatgagctgagacagaggctcgctgcaaggctggaagcactcaaagagaacgggggggcgagacttgctgaatatcatgccaaggctactgaacacttatccaccctatccgagaaagccaaaccagcactggaggaccttcgacaggggctactgcccgtgctcgaatccttcaaggtctcctttctatcagccctggaggagtatactaagaaattgaatacccag

SEQ ID NO: 6316 - DNA, 801 bp, synthetic construct
  misc_feature 1..801: note = source = /note="Description of Artificial Sequence: Synthetic coding sequence"
  source 1..801: mol_type = other DNA
atgaaggcggcagtcctgactttggccgtgctgttcctgaccggctcgcaggcgaggcatttttggcagcaggacgaaccccctcagtcaccgtgggatcgggtgaaggacctggcaaccgtgtacgtcgacgtcctgaaggactccggacgcgactatgtgagccagtttgaaggatccgcactgggcaagcagcttaatctgaaactgctggataactgggactcggtgacttccaccttcagcaaactcagagaacagctgggaccggtgactcaagaattttgggacaatctggagaaggaaaccgagggactcagacaagaaatgtccaaggatctcgaggaagtcaaagccaaagtgcagccatacctcgacgacttccagaagaagtggcaagaggaaatggaactctaccggcagaaagtggaaccgctcagagcggaactccaggaaggagcaagacaaaagctccacgaactgcaggaaaagctctcgccgctgggagaggaaatgcgggattgcgccagggcccacgtcgatgccctgaggactcatttggctccgtactccgatgagctccgccagcggctggcggcaagattggaagccctcaaggaaaacggaggagctagattggctgagtaccacgcgaaggccaccgagcacctctccactctgtcagaaaaggcaaaacctgcactcgaggacttgcgccagggactcctgccagtcctggaatcgttcaaggtgtcgttcttgtcggccctggaagaatacactaagaagctcaacacccag

SEQ ID NO: 6317 - DNA, 801 bp, synthetic construct
  misc_feature 1..801: note = source = /note="Description of Artificial Sequence: Synthetic coding sequence"
  source 1..801: mol_type = other DNA
atgaaggcggccgtgcttaccttggccgtgcttttcctgaccggttcgcaagcacgtcatttttggcagcaagacgaaccgccacaatcgccctgggatagagtcaaggacctcgcaaccgtgtacgtggacgtcctgaaagattccggaagggattacgtgtcacaattcgagggttcggcgctcggtaagcagcttaacttgaagctcctggataattgggactcggtgacctcaacgttctccaaattgagagaacaacttggtcctgtgacccaagaattttgggataaccttgaaaaagaaaccgagggacttcgccaagaaatgtcaaaggatctggaagaggtgaaagccaaagtccaaccatacctggacgacttccagaagaaatggcaggaggaaatggagctgtaccgtcagaaggtggaaccactcagggcagaacttcaagagggcgcaagacaaaaacttcacgaactccaagaaaagctgtcacctctgggagaagaaatgagagactgtgcacgcgcacacgtcgacgcccttcgcacccatttggcaccttactcagatgagcttaggcagcgtcttgcggcccgcctggaggcactcaaagaaaatggaggagcgcgccttgcagagtaccacgcaaaggccaccgagcacctgtcaactctgtccgagaaggcgaagccagctctggaagatctccggcaaggtctgcttcctgtcttggagagctttaaagtcagcttccttagcgcactggaggagtacactaagaagctcaacacgcag

SEQ ID NO: 6318 - DNA, 801 bp, synthetic construct
  misc_feature 1..801: note = source = /note="Description of Artificial Sequence: Synthetic coding sequence"
  source 1..801: mol_type = other DNA
atgaaggccgcggtccttacgttggcagtcctgtttcttactggatcccaagccaggcatttctggcaacaggatgaacccccacaaagcccatgggaccgggtgaaagatctcgcaaccgtgtacgtggacgtactgaaggactcaggaagagattacgtttcgcaattcgaaggcagcgcacttggaaagcagcttaatctcaagctcctggacaactgggatagcgtgacttcgacttttagcaagctgagggaacagctcggtcctgtgacgcaggaattctgggataacttggaaaaggagactgagggactgcggcaagagatgtcgaaagacctggaagaagtgaaggcaaaggtgcaaccctaccttgacgattttcagaagaaatggcaagaagagatggagttgtatagacaaaaggtggagccccttagagccgaactgcaagaaggagcccgccagaaacttcatgagctccaggagaagttgtcgcctcttggcgaggaaatgagggattgtgctcgggcacacgtggacgctttgcgaactcatctggcaccgtatagcgatgaactcagacaacgcctggccgcacgcctcgaagcattgaaggaaaatggcggcgcaagattggctgaataccacgcaaaggccactgaacatctctccaccctgagcgaaaaggcaaaacccgcactggaagatctgagacaaggtttgctgccagtccttgaatcgttcaaggtgtcctttctgtcagcgctggaggaatacaccaaaaaacttaacacccag

SEQ ID NO: 6319 - DNA, 801 bp, synthetic construct
  misc_feature 1..801: note = source = /note="Description of Artificial Sequence: Synthetic coding sequence"
  source 1..801: mol_type = other DNA
atgaaggccgctgttttaacactggcagttctgtttttgacaggctcccaggcgagacatttttggcagcaggatgagcctccgcagagcccctgggatcgggtcaaggacctggccacggtttatgtcgatgtattaaaggactccgggagagactacgtcagccaatttgaaggttcagcactgggcaagcagcttaacctcaaactactggacaactgggattcggtgactagcacattctccaagctgagggaacagcttggacccgtgacgcaggaattctgggataacctcgaaaaggagaccgaggggctgcgtcaagaaatgtctaaggatttggaagaggttaaggccaaggtccaaccttacctggatgacttccaaaagaagtggcaggaagagatggaattatatcgtcagaaggtagaaccattaagagccgaactgcaggagggggcgcgccaaaagctgcatgagctccaagaaaagctgtcccctctgggggaagagatgcgcgattgtgcccgcgcacacgttgacgctctgcgtacacacctggccccatattcagacgaactcagacagaggcttgctgctagactggaggccctgaaagagaatgggggagcccggctcgcagagtatcatgccaaggctaccgaacacctgtcgactctatcggagaaggctaaacctgcgttggaggatctaaggcaaggcctgctgcctgtgctggaaagctttaaggtgagctttctgtcggctctcgaggaatacactaaaaaactgaacactcag

SEQ ID NO: 6320 - DNA, 801 bp, synthetic construct
  misc_feature 1..801: note = source = /note="Description of Artificial Sequence: Synthetic coding sequence"
  source 1..801: mol_type = other DNA
atgaaggcagctgttttgaccctcgccgtcctgttcctaaccgggagccaagctaggcatttctggcagcaggacgaacctccccaaagtccatgggatcgggtgaaagacctagctacagtctacgtcgacgtgttaaaggatagcggccgcgattacgtgtcacagttcgagggctccgctttgggtaaacagctgaacttaaagctgcttgataactgggactcggtgacatcaaccttctccaagttgcgcgagcagctagggcctgtcacacaggaattttgggataacctcgagaaagagactgaagggttgcgccaggaaatgtctaaagatctcgaggaggtcaaagccaaggtgcagccttacctggacgatttccagaagaagtggcaggaagagatggagctgtatcggcagaaagtggaacccctgagggccgaactgcaagaaggcgcgcgtcagaagcttcatgagctgcaagagaaactttcaccactgggagaagagatgcgagattgcgctcgcgcgcacgtcgatgcactgcggacacacctggcaccctatagcgatgagctccgacagcggctggccgccaggctggaggctctgaaagagaacgggggcgctcggctggccgagtaccatgccaaagccaccgagcacctgtctaccctgtccgagaaagccaaacccgccctcgaggatctgaggcaggggctcctgccggtcctggagtccttcaaagtgtcgttcctgagcgcgctggaggaatacacgaagaagctgaatacccaa

SEQ ID NO: 6321 - DNA, 801 bp, synthetic construct
  misc_feature 1..801: note = source = /note="Description of Artificial Sequence: Synthetic coding sequence"
  source 1..801: mol_type = other DNA
atgaaagctgcagttttaactctagctgtattatttttaactggaagtcaagctagacatttttggcaacaagatgaaccaccacaatcaccatgggatagagttaaagatttagcaacagtatatgttgacgttttaaaggatagtggtagagattatgtatctcaatttgaaggatcagctttaggaaaacaacttaacttgaaattgttggataattgggactctgttacttctactttctcaaaactaagagaacaacttggtccagttactcaagaattttgggataatcttgaaaaagaaactgaaggacttagacaggagatgagtaaagatttagaagaagttaaggcaaaagttcaaccatatcttgatgatttccaaaaaaaatggcaagaagaaatggaattatatagacaaaaggttgagcctttaagagctgaattgcaagaaggggcaagacaaaaattacatgaacttcaagaaaagcttagtccattaggagaagaaatgagagattgtgcaagagcacatgttgacgctttaagaactcatttagcaccatattcagatgaattaagacaaagattagccgctagattagaagcattaaaggaaaacggaggtgcaagattagctgaatatcacgctaaagcaacagaacatttatccactttatctgaaaaagcaaagccagcattagaggatctaagacaaggacttttaccagttttagaatcatttaaggtttcattcttatctgctttagaagaatatacaaagaagttaaatactcag

SEQ ID NO: 6322 - DNA, 801 bp, synthetic construct
  misc_feature 1..801: note = source = /note="Description of Artificial Sequence: Synthetic coding sequence"
  source 1..801: mol_type = other DNA
atgaaggcagccgtgcttacgctcgcagtcctttttctcactgggtcccaagcccgccatttttggcaacaggatgagcctcctcagagcccctgggatcgcgtgaaggatcttgccactgtgtacgtggacgtgttgaaggattcaggaagagattacgttagccagtttgaaggatcggctcttggaaaacagcttaatctgaaactcctcgataactgggactcagtcacctctaccttctccaaactgagggaacaactgggccctgtcactcaagagttctgggacaaccttgaaaaggaaaccgagggacttagacaggaaatgagcaaggatctcgaagaagtgaaggcgaaggtccagccatatctggacgactttcaaaagaagtggcaagaagagatggagctttaccggcagaaggtggaacctctgcgggcggaacttcaagaaggtgcacggcagaaactgcatgagctgcaggaaaagctctctcctctgggtgaggaaatgcgtgattgtgcgagggcccatgtcgatgcactcagaacccacctggcaccatactccgatgagctcagacagcgacttgcagcgaggcttgaagcactcaaagaaaacggaggggcgcgccttgcagagtaccacgccaaagcaacggagcatctgtccactctttcagagaaggccaaaccagcacttgaagatttgaggcaaggtctgttgcccgtgcttgagtctttcaaagtgagctttctgtccgcacttgaagaatacactaagaagctgaacacccag

SEQ ID NO: 6323 - DNA, 801 bp, synthetic construct
  misc_feature 1..801: note = source = /note="Description of Artificial Sequence: Synthetic coding sequence"
  source 1..801: mol_type = other DNA
atgaaagccgcggtccttacactggctgtgttgtttttgaccggtagtcaagcaagacacttctggcagcaagatgagccaccacaatccccttgggacagggttaaggacctcgcaacagtatacgtggatgtgctgaaggactccggccgtgactacgtgtctcagttcgagggctccgctctggggaagcagctcaatttgaagcttcttgataactgggacagcgttacaagtacgttctcaaagctacgcgaacagctgggccccgttacccaggagttctgggacaacctggagaaagagaccgagggattaaggcaggagatgagcaaagatttggaggaggtgaaggccaaagtgcagccatacctggacgacttccagaagaagtggcaggaggagatggaactctatcgccagaaggtagaacctttgcgggctgagcttcaagagggagcccgtcagaagttacatgagctgcaggagaaattatccccactcggggaggaaatgcgcgactgtgccagggcacacgtggacgcactgagaacgcacctggcaccttatagcgatgaactcagacagagattggctgcgcggctcgaggcactgaaagagaatggcggggctcggctggcagaataccatgccaaggccaccgagcatctgtccacactatctgaaaaggccaagcccgctttggaggacctgcggcagggtctgcttcccgtgctggagtcttttaaagtcagtttcctatccgctctggaggagtatactaaaaaactgaacacccag

SEQ ID NO: 6324 - DNA, 801 bp, synthetic construct
  misc_feature 1..801: note = source = /note="Description of Artificial Sequence: Synthetic coding sequence"
  source 1..801: mol_type = other DNA
atgaaagcggctgtcctcacactggccgttctgttcctcactggctcacaagcaagacatttttggcaacaggatgaacctccgcagagtccatgggacagggtgaaagatctcgcaacagtgtatgtagacgttctgaaggacagtggaagagactacgttagccagttcgaggggagcgcactgggcaaacagctgaatctgaaattacttgacaactgggatagcgtcactagcacgttctcaaagctgcgggaacagctcggccccgtgacacaagaattctgggataatctggagaaggagactgaagggcttaggcaggagatgtccaaggacctcgaggaagtgaaggctaaggtgcaaccttatctggatgacttccagaaaaagtggcaagaagaaatggagctgtacaggcagaaggttgaacccttgcgggccgagttacaggaaggagcgcgccagaagctgcatgagctccaagagaaattgagcccattgggtgaggaaatgagggattgcgctagagcccatgttgatgcccttaggacccatctcgccccatattcagacgagctgcggcagcggctggctgccagactggaggctttaaaagagaatgggggagccaggctggctgaataccacgcgaaagcaacagaacacctgagcacattgagtgaaaaggctaagccggctctcgaagatctgcggcaaggcctgctgccggtgctggagtcctttaaggtaagctttcttagtgccctggaagaatacacaaagaagctgaacacacag

SEQ ID NO: 6325 - DNA, 801 bp, synthetic construct
  misc_feature 1..801: note = source = /note="Description of Artificial Sequence: Synthetic coding sequence"
  source 1..801: mol_type = other DNA
atgaaggcggccgtgctgacactggctgtgctctttctcacgggcagtcaagcaaggcatttttggcagcaggatgagcctccacaaagcccatgggatcgcgtcaaggatctggcaacggtgtatgtggacgtactgaaggacagcggccgggattatgttagtcagtttgagggcagcgctctgggaaagcaactcaatctgaagctgcttgataactgggattccgtaacctctaccttttccaaactgcgagaacagctgggtcccgtcacgcaggaattctgggacaatctcgaaaaggagaccgaaggcctgaggcaggagatgagtaaagacttggaagaagtaaaagccaaggtgcagccctatctggatgatttccagaagaagtggcaggaagagatggaactctatcgccagaaggtcgagcccctgagggcagaactccaggaaggcgctcgacagaaattgcatgagctgcaggagaaactctccccccttggagaagagatgcgggactgtgctcgggcgcacgttgatgctctgaggacacacctcgccccctactccgacgaattgcgacagcgcctcgccgccagactggaagcactgaaggagaacggaggtgctaggttggctgaatatcacgcaaaggcaactgaacatctttcaacactgagcgaaaaggcgaagccagccctggaagacctgaggcagggtctccttccagtgcttgagtcatttaaggttagtttcctgtctgctctggaagagtataccaaaaaactgaacacacag

SEQ ID NO: 6326 - DNA, 801 bp, synthetic construct
  misc_feature 1..801: note = source = /note="Description of Artificial Sequence: Synthetic coding sequence"
  source 1..801: mol_type = other DNA
atgaaggcagcggtgctgactctggcggtgttgttcctcacgggcagccaggcgcgccacttttggcaacaagatgagccaccgcagtcgccctgggatcgggtgaaagacctggccaccgtctacgtcgacgtgctgaaagactccggacgggactacgtctcgcaattcgagggaagcgcgctgggaaaacagctgaatctgaaactgctcgataattgggattcagttacctcgacgttcagcaaactccgcgaacagctgggacctgtcacgcaggaattctgggacaatctcgaaaaggaaaccgagggactgcgccaagagatgtctaaagacctggaggaagtgaaggcaaaggtgcagccgtacctggacgatttccagaagaagtggcaagaagaaatggaactgtacaggcagaaagtggagcccctgagagctgaactgcaggaaggggcccgccagaagctccacgaactccaagagaaactcagcccactcggtgaggagatgcgcgattgtgccagagcccacgtggacgccctgcggactcatctcgctccgtactcggatgaactgcgccagcgcctggcagccaggttggaggccctcaaggaaaacggaggggcacgcctggcggagtaccatgcaaaggccactgaacacctctcaactctgtccgaaaaagccaagccggcgctcgaagatctgcgccagggactcctgccggtcttggaatcgttcaaagtgtcatttctttcggccctggaagaatatactaagaagctgaacactcaa

SEQ ID NO: 6327 - DNA, 801 bp, synthetic construct
  misc_feature 1..801: note = source = /note="Description of Artificial Sequence: Synthetic coding sequence"
  source 1..801: mol_type = other DNA
atgaaggcagccgttctaactctcgcggtattgtttcttacagggtctcaggcccgtcatttttggcagcaggatgaacctccacaatcaccctgggaccgagtgaaggatcttgctacggtgtatgtggacgtgctgaaggacagcggaagagattacgtgtctcagttcgaaggatctgccttaggcaagcaattgaatttgaagctgttggacaactgggattctgttacatcgacgttttccaaattgcgagaacaattaggacccgtcacccaagagttctgggacaatctggagaaggagacggaaggtttacgccaggagatgtctaaggatcttgaggaagttaaggcgaaggtgcagccgtatctcgacgacttccagaagaaatggcaagaagaaatggaactgtacagacaaaaggtcgagcctcttcgcgccgaactgcaagagggcgcacgccaaaagctgcatgaactacaggaaaaactctcccccttgggggaagaaatgcgtgattgtgctcgcgcgcatgtcgacgccctaagaacccatctggccccctattccgatgaactgcgccaacgccttgcggctcgcttggaagcattgaaagaaaatggaggtgcgcgcctcgccgaataccacgcaaaggctactgaacatcttagcactctctccgagaaggccaagcctgccctggaggatctgcgacagggactcctcccagttttagaaagcttcaaagtgtcttttttgtcagcgcttgaagagtataccaagaaacttaacacacag

SEQ ID NO: 6328 - DNA, 801 bp, synthetic construct
  misc_feature 1..801: note = source = /note="Description of Artificial Sequence: Synthetic coding sequence"
  source 1..801: mol_type = other DNA
atgaaggccgctgtgctcactctcgccgtgctcttcctgacaggcagccaggcccgccacttttggcagcaagatgaacccccgcagagcccttgggaccgtgtaaaggacctggcaacggtatacgtggacgtgcttaaggactcaggacgagactatgtgagtcagttcgagggtagcgccctaggcaaacagctcaaccttaaactgctggacaattgggacagcgtcactagtacgttctcgaaattgcgtgagcaactgggacccgtaacacaagaattttgggacaacctcgagaaggaaactgagggcctcagacaggaaatgagcaaagacttggaggaggtgaaggccaaagttcaaccatacctggatgattttcagaagaaatggcaggaagaaatggagctctatcgtcaaaaagtggagccattgagagcggaactccaggaaggggcccgtcaaaagttgcacgagctacaagagaaactctcacccttgggggaggagatgcgcgactgtgcccgggctcatgtcgatgccctgcgtactcacttggccccctatagtgatgagctgagacagagactcgctgctcggttggaagccttgaaagagaatggcggggcacggctggcagagtatcatgcgaaggccaccgagcatttgtccaccttgagcgaaaaggctaagccggcattagaggacctacgacagggactgctgccggtgctggagagcttcaaggtgtcctttctgtctgctctggaagaatacacaaaaaagcttaacacacag

SEQ ID NO: 6329 - DNA, 801 bp, synthetic construct
  misc_feature 1..801: note = source = /note="Description of Artificial Sequence: Synthetic coding sequence"
  source 1..801: mol_type = other DNA
atgaaagcggcggttttaacgctagcggtattatttttaacgggttcgcaagcgcgacatttttggcaacaagatgaaccgccgcaatcgccgtgggatcgtgtaaaagatctagcgacggtttatgttgatgttctaaaagattcgggtcgtgattatgtttcgcaatttgaaggttcggcgttaggtaaacaactaaatttaaaattactagataattgggattcggtaacgtcgacgttttcgaaattacgtgaacaactaggtccggttacgcaagaattttgggataatttagaaaaagaaacggaaggtttacgtcaagaaatgtcgaaagatttagaagaagtaaaagcgaaagttcaaccgtatctagatgattttcaaaaaaaatggcaagaagaaatggaattatatcgtcaaaaagtagaaccgctacgtgcggaattacaagaaggtgcgcgacaaaaactacatgaactacaagaaaaattatcgccgttaggtgaagaaatgcgtgattgtgcgcgtgcgcatgtagatgcgttacgtacgcatttagcgccgtattcggatgaactacgtcaacgtctagcggcgcgattagaagcgttaaaagaaaatggtggtgcgcgattagcggaatatcatgcgaaagcgacggaacatttatcgacgctatcggaaaaagcgaaaccggcgctagaagatctacgtcaaggtttactaccggtattagaatcgtttaaagtatcgtttctatcggcgttagaagaatatacgaaaaaattaaatacgcaa

SEQ ID NO: 6330 - DNA, 801 bp, synthetic construct
  misc_feature 1..801: note = source = /note="Description of Artificial Sequence: Synthetic coding sequence"
  source 1..801: mol_type = other DNA
atgaaggccgctgtgctcacccttgccgtgctgttcctgactgggtcacaagctaggcacttctggcagcaagatgaaccaccgcagtccccttgggatcgcgtgaaagacttggctactgtgtacgtcgatgtgctgaaggactcaggccgggattacgtttcgcagttcgaaggatccgcgctcggcaaacaacttaacctcaagctgcttgacaattgggacagcgtgacctccacgttctccaagctgcgggagcaactgggaccggtgactcaggagttctgggataacctcgaaaaggaaacggaaggactccgccaagagatgagcaaggatctggaggaggtgaaggcaaaagttcaaccttacctggacgactttcagaaaaagtggcaggaagaaatggagctgtatagacagaaggtcgagccgctgcgagcggagctccaggagggtgcccgccaaaagttgcatgagctccaggaaaaactgtctccacttggcgaagagatgcgcgactgtgcccgggcgcatgtggacgccctccggacccacctggctccgtactctgatgagctccgccagcgcctggcagcacgacttgaggcactgaaggaaaatggaggggccaggctggccgaataccacgcaaaggcaaccgaacacctgtcgactctgagcgaaaaggctaagcctgcccttgaggaccttaggcagggactcctcccggtcctcgaatcgtttaaggtgtcattcctttcagcactggaggaatacaccaaaaaactgaacacccag

SEQ ID NO: 6331 - DNA, 801 bp, synthetic construct
  misc_feature 1..801: note = source = /note="Description of Artificial Sequence: Synthetic coding sequence"
  source 1..801: mol_type = other DNA
atgaaggccgcagtcttgactctggccgtactgtttctgaccggcagtcaagcccgccacttttggcagcaagatgagcctccccagagcccttgggatcgcgtcaaagatctcgccactgtgtatgtggacgtcctgaaggactccggaagggactacgtttcccagttcgaggggtccgccctgggcaaacagctaaacctgaagctgctggataactgggattcagtaacaagtactttctctaaactccgagagcagctaggtcccgtcactcaggaattctgggacaatctggaaaaggagactgagggtctgcgacaggagatgtctaaagatttagaagaggtcaaggctaaggtgcagccctaccttgacgacttccagaagaagtggcaggaggagatggagctgtacagacagaaagtggagcccctgcgtgccgaactgcaggagggggcacgtcagaaactccatgagcttcaggagaagctctctcccttaggcgaagaaatgagggactgtgcgcgtgcccacgtggatgccctcaggacccacctcgccccttatagcgacgagctccgtcagcgtttggcagcccggctggaggccttaaaggagaatgggggcgcccgactggccgaataccatgccaaagccaccgaacacctaagcacgctgtctgaaaaagccaagcctgcactggaggatctgcggcagggtcttctgcccgttttggagtctttcaaggtgtcattcttatcagccctcgaggaatatactaaaaagctgaacacccag

SEQ ID NO: 6332 - DNA, 801 bp, synthetic construct
  misc_feature 1..801: note = source = /note="Description of Artificial Sequence: Synthetic coding sequence"
  source 1..801: mol_type = other DNA
atgaaagcagctgtgctgacgttggcggtgctctttttgaccggctctcaggcacgccacttctggcagcaggatgagcctccacagagcccctgggatagggtaaaggatttggccacggtgtatgtcgatgtcctgaaagattccgggcgcgactatgtttcccaatttgagggctccgcactaggcaaacaactgaacctcaaactgttggacaattgggattctgtcactagcactttctctaaactgcgagagcagttgggcccagtgacgcaggagttctgggacaacctggagaaggaaaccgagggactgcgccaagaaatgtcaaaagacctggaggaagtgaaagcgaaagtgcagccgtatttagatgatttccagaaaaagtggcaggaggagatggagctgtaccgccagaaggtagagcctctgcgtgcggagctgcaggagggcgctcgacagaagctccacgagctgcaagaaaagctgtcaccattgggagaggaaatgcgcgactgtgcgcgcgctcatgtcgacgctctgcgcactcatcttgcgccgtattcggatgaactgcgacaaagactcgcggcacgcctcgaggccctgaaggaaaacggtggtgcacgcctggctgaataccatgccaaggcgaccgaacacttaagcaccctttctgaaaaggcgaagccggctttggaagatctgcgacaaggcctgctgccggtcctggagtcctttaaagtctctttcctgagcgctctggaggagtatacaaagaagttgaatactcag

SEQ ID NO: 6333 - DNA, 801 bp, synthetic construct
  misc_feature 1..801: note = source = /note="Description of Artificial Sequence: Synthetic coding sequence"
  source 1..801: mol_type = other DNA
atgaaggcagcggtgctcaccctggccgtgctttttctcaccggttctcaagcacggcacttttggcagcaagacgaaccccctcaatccccctgggaccgggtcaaggatctggcgaccgtatacgtggatgtgctgaaagattccggaagggactacgtgtcccaattcgagggctcagccctgggaaagcagcttaatctgaaacttcttgacaattgggactcggtgacgtcaactttttcaaagctcagggaacaacttggtccagtgactcaggaattttgggataacctcgaaaaggaaactgaaggactgcgccaggagatgtcgaaagatctggaggaggtcaaggccaaggtgcagccgtacctggacgatttccaaaagaagtggcaggaagagatggaactctacaggcaaaaagtggaaccacttcgtgccgaactgcaagagggcgcgcgtcaaaagctgcacgagcttcaggaaaaactgtcaccgcttggagaggaaatgagggattgtgcaagagctcacgtggatgccctgagaactcatcttgcaccgtacagcgacgaattgcgtcaacgcctcgccgcaaggctcgaggcactcaaggaaaacggaggagcacggcttgcagaataccatgcaaaagcaactgaacatctttcgactctttccgagaaggcaaagccagctcttgaggaccttcggcaaggccttctgcccgtgctcgaatcctttaaagtgagcttcttgtcggcactggaagaatacaccaagaagttgaacactcag

SEQ ID NO: 6334 - DNA, 801 bp, synthetic construct
  misc_feature 1..801: note = source = /note="Description of Artificial Sequence: Synthetic coding sequence"
  source 1..801: mol_type = other DNA
atgaaagcggccgtgctgactctggccgtgcttttcctcaccggatcgcaggctagacatttctggcagcaggacgaaccgccgcagtcaccttgggaccgcgtgaaggatttggcgacggtctacgtggatgttctcaaagactcgggaagagactacgtgtcacagttcgagggatcggcccttgggaagcagctgaacctcaaactccttgataactgggattccgtgacctcaactttctccaagctgcgcgaacaactgggcccggtgacccaggagttctgggacaacctggaaaaggagactgaaggactgaggcaagagatgtccaaggacctggaggaagtgaaagccaaggtgcagccgtacctcgacgactttcaaaagaaatggcaggaagagatggagctgtacaggcagaaggtcgagccactgcgtgccgagctgcaggaaggcgctcggcaaaagttgcatgagttgcaggaaaaattgtcccctctcggagaggaaatgagagactgcgcacgggctcacgtcgatgccctgcgcacccacctggcgccctatagcgatgagctccggcaacgcctcgcagcccgcctggaagctctgaaggaaaatggcggtgcgcggctggccgagtaccacgcaaaggccaccgaacacctcagcactctgtcggaaaaggcaaagccagcactcgaggaccttcgacaagggctgctcccagtcctggaatcgttcaaggtcagctttctctctgcgctggaagaatacaccaaaaagctgaatactcaa

SEQ ID NO: 6335 - DNA, 801 bp, synthetic construct
  misc_feature 1..801: note = source = /note="Description of Artificial Sequence: Synthetic coding sequence"
  source 1..801: mol_type = other DNA
atgaaagcggccgtgctgactctcgccgtgctcttcctgaccgggtcgcaggcccgacacttttggcagcaggatgaaccaccacagagcccatgggatcgggttaaagatcttgccaccgtctacgtggacgtcctgaaggactcgggacgcgactacgtgtcacagttcgaaggatcagccctgggaaaacaactcaatcttaagctcctggacaattgggattcagtgacctcgaccttctcgaagttgagggaacagttgggaccagtgacccaagaattctgggataacctggaaaaggagactgagggtctgcgccaggagatgtctaaagatctggaagaggtcaaagccaaggtgcaaccatacctggatgactttcaaaagaaatggcaggaggagatggagctctacagacagaaagtggaaccactgcgggccgagctgcaggagggagcgagacagaagctgcatgagctgcaggaaaagttgtcacccctgggggaagaaatgagggactgcgcacgcgcccacgtcgacgccctccgcacccacctggctccatactcagacgaattgagacagcgcctcgccgccagactggaagcgctgaaggaaaatggaggggcacgcctcgcagagtaccatgcaaaggcgactgagcatctgtcgacgttgtccgagaaggcaaagccggccctcgaggatctgagacaaggcctgctgcctgttctggagtccttcaaggtgagctttctgtccgctttggaggaatatactaagaaacttaatacccag

SEQ ID NO: 6336 - DNA, 801 bp, synthetic construct
  misc_feature 1..801: note = source = /note="Description of Artificial Sequence: Synthetic coding sequence"
  source 1..801: mol_type = other DNA
atgaaagctgctgttctcacgctggcggtactgttcctaaccggctcacaggctaggcacttctggcagcaggatgagccgccacaaagcccctgggatcgggtgaaggatctggccacggtttacgtcgatgtgctgaaggattcgggcagagattacgtaagtcaatttgaagggtctgcactaggcaagcaattaaatttgaagcttcttgacaactgggattcggtgacaagtaccttttccaagttacgagagcagctagggcccgtaacccaggaattctgggataatcttgagaaagaaactgagggattgcgacaggaaatgtcaaaagaccttgaagaagtaaaagcgaaagttcagccttatctggatgactttcagaagaagtggcaggaggagatggagttgtatagacagaaggtggagcccctaagagccgaactgcaggaaggcgctcgacagaagctgcacgagcttcaggaaaagctctcccccctaggcgaagagatgagggactgtgctcgagcccacgtcgacgccttgagaactcacctggccccatattcagacgagctgcgacagcgattggctgctcgattagaggccctgaaagagaacggtggtgctcggctcgctgaataccatgccaaggcaactgaacacttgagtactctctccgagaaggctaaaccagccttggaggatctgagacaaggcttgctccccgttcttgagtccttcaaagtgtcctttttatccgcacttgaagagtatacaaaaaagttaaatacacag

SEQ ID NO: 6337 - DNA, 801 bp, synthetic construct
  misc_feature 1..801: note = source = /note="Description of Artificial Sequence: Synthetic coding sequence"
  source 1..801: mol_type = other DNA
atgaaggctgccgtccttacactggctgtgctgtttttgactgggtcccaagcacgccacttttggcaacaggacgaaccacctcagtcaccctgggacagggttaaggacctggctactgtttatgtagatgtgctgaaagacagcggccgtgattatgtgtctcaattcgaaggcagcgctctgggaaagcagcttaaccttaaactgcttgataactgggattccgtcacatccactttcagtaaactcagggaacaactgggaccagtgacccaagaattctgggataacctcgagaaggagacagagggactgaggcaagagatgagcaaggacctcgaggaggtgaaagcaaaggtccagccgtacctggacgatttccagaaaaagtggcaggaggaaatggaactgtataggcaaaaagtggagcctctccgcgcagagctccaagaaggtgcgagacaaaaactgcatgaactgcaagagaagttaagcccactgggcgaggagatgagagactgtgctcgcgctcacgtcgacgccctccggacccatctcgccccctattcagatgagctccggcaaagactggcagcccggctggaagccctgaaggaaaacggtggagctcggctggccgaataccacgcgaaggctactgagcacctctctaccctctctgagaaggcgaagcctgctcttgaagatctgagacagggcctactcccggtcctggaatcttttaaagtttcttttctcagcgctttggaggaatacactaagaaactgaacactcaa

SEQ ID NO: 6338 - DNA, 801 bp, synthetic construct
  misc_feature 1..801: note = source = /note="Description of Artificial Sequence: Synthetic coding sequence"
  source 1..801: mol_type = other DNA
atgaaggcggcggtgctgaccttggcagtcctcttcctgaccggatcacaggcgcgccacttttggcagcaggacgaacctccgcagtcaccgtgggatcgcgtgaaagaccttgccactgtgtacgtcgatgtgttgaaagattccggcagggattacgtgtcccaatttgagggtagcgccctgggaaagcaacttaacttgaagctgctggataactgggacagcgtcactagcacgttcagcaagctgcgggaacagctcggacctgtgactcaggagttctgggacaacctggagaaggaaactgaaggcctgagacaggagatgtcaaaggacctcgaggaagtgaaggcgaaggtgcagccgtaccttgatgattttcagaagaagtggcaggaagaaatggaactgtaccgccagaaagtggaacctctgagagccgaacttcaggagggagctcggcagaagctccatgaactccaagagaagttgtcacctctgggagaggagatgagggactgcgcgcgcgcccatgtggacgcgctcagaacccacctggcaccgtactccgacgaactgcggcagagacttgccgcgcggcttgaggcgctgaaagagaatggaggagctcggctggcagagtaccacgccaaagccactgaacatctttcgaccctttcggagaaggccaagcccgccctggaagatctgcggcaggggctcctgcctgtgctcgaatctttcaaggtgtcattcctgtccgcgctggaggagtacaccaagaaattgaacacgcaa

SEQ ID NO: 6339 - DNA, 801 bp, synthetic construct
  misc_feature 1..801: note = source = /note="Description of Artificial Sequence: Synthetic coding sequence"
  source 1..801: mol_type = other DNA
atgaaggctgcggtcctgaccctagcggtgctattcctgaccggctcacaggctcgccatttctggcagcaagatgagccaccccagtctccatgggatcgagtgaaggacctcgccaccgtctacgtagacgtgctaaaagacagtgggcgtgactacgtgagtcaatttgagggcagcgctctgggcaaacagctcaacctcaaactgttagataattgggacagtgtgacttccacgttctctaaactgcgggaacagttaggcccagtcactcaggaattctgggataacctggagaaagaaacagaggggctacgccaggagatgagcaaggatctcgaagaagtgaaggctaaggtccagccatatctcgatgactttcagaagaagtggcaggaggaaatggagctgtacaggcagaaagttgaacctttgagggctgagttgcaggagggagcaaggcagaagctccacgaactacaggagaaactgtcacccctcggcgaagagatgcgcgactgcgcccgcgcccacgtggacgcactccgaactcatttggcgccgtatagcgatgaactccggcagcgtctagctgcaagactggaggccctgaaggaaaacggcggagcccgtctcgctgaataccacgccaaggcaacagaacatctgagcactctgtccgaaaaggccaaacccgctctggaagacctgcggcaggggcttctccccgtgctcgagtcatttaaagtgagctttttatctgctctggaggagtatacgaaaaaacttaatactcag

SEQ ID NO: 6340 - DNA, 801 bp, synthetic construct
  misc_feature 1..801: note = source = /note="Description of Artificial Sequence: Synthetic coding sequence"
  source 1..801: mol_type = other DNA
atgaaggccgctgtgctgactctggcagtgcttttcctgaccggctctcaagccaggcacttctggcagcaggacgagcctccacagtccccgtgggaccgcgtcaaagacctggcaaccgtgtacgtggacgttctgaaagattctggacgagattacgtgtcccagttcgagggctctgcacttggtaaacagctgaacctcaagttgctggacaactgggactcggtgacttcgactttcagcaagctgcgcgaacagctcggccctgtcacccaagaattctgggacaaccttgagaaagaaacggaaggattgagacaagaaatgtcaaaagatctcgaagaggtgaaggctaaggtccaaccatacctcgatgactttcagaagaagtggcaagaagaaatggagctctaccgtcagaaggtggagccacttagggccgagcttcaggaaggagccagacagaagttgcacgagctgcaagagaaattgagcccgctgggagaagaaatgcgcgactgcgcccgggcccacgtcgacgcgcttcgaactcatctggcgccctactcggatgaattgcgccagaggctggcggctcggctcgaagcgctcaaggagaatgggggagcccgcctggcagagtatcatgccaaggccaccgaacacttgtcaactctgtccgagaaagctaagccggccctcgaggatttgcggcagggcctcctgccggtgctcgagtcgttcaaggtgagctttctgtcagccttggaagaatacacgaagaagctcaatacccaa

SEQ ID NO: 6341 - DNA, 801 bp, synthetic construct
  misc_feature 1..801: note = source = /note="Description of Artificial Sequence: Synthetic coding sequence"
  source 1..801: mol_type = other DNA
atgaaggccgcggttcttaccttggctgtgctgttcctgactggaagccaagcacggcacttctggcagcaagacgaaccgccgcaatccccgtgggatagagtcaaggatctcgcgaccgtgtacgtggatgtgcttaaggattcagggcgcgattatgtgtcccagtttgagggatccgcactgggaaagcagctcaatctgaagctgctggacaactgggactccgtgacctccaccttctccaagttgcgggaacagctgggaccggtcactcaggaattttgggataacctcgaaaaagaaaccgaaggattgcgccaggaaatgtcgaaggacttggaggaggtcaaggccaaagtgcagccatacctggacgacttccaaaagaaatggcaggaggaaatggaactctatcgccaaaaagtggaaccgcttcgggcagaactccaagagggcgctcgacaaaaactgcatgagctgcaggagaagctcagcccactgggcgaggagatgcgtgactgcgcacgcgcccatgtggacgcgcttcgcacccacctggctccgtattcggatgaactgagacagcgtttggcggcaaggcttgaagctctgaaagaaaacgggggtgcccgcctcgcagaataccacgccaaagccacggaacacctgtcgactctcagcgaaaaggccaagcccgcgctcgaagatctgaggcaaggcctgcttcccgtccttgagagtttcaaggtgtccttcctcagcgcactggaggaatacactaagaaactgaatacccag

SEQ ID NO: 6342 - DNA, 801 bp, synthetic construct
  misc_feature 1..801: note = source = /note="Description of Artificial Sequence: Synthetic coding sequence"
  source 1..801: mol_type = other DNA
atgaaggccgcagtgctgaccctggcagtgttgttcctgacgggaagccaggcacggcatttctggcagcaggatgaacccccacaatcaccctgggaccgcgttaaagacctcgcaaccgtttatgtggatgttctgaaagattctggacgggattatgtgtctcagttcgagggctctgccctcggaaaacaactgaacctgaagctgttagacaattgggacagcgtcacctctacgttctctaaactcagggaacagctgggccctgtgacccaggagttctgggacaacctggagaaggaaaccgagggtctgagacaggagatgtccaaggatcttgaggaagtgaaggcaaaggttcagccctacctggacgacttccagaagaagtggcaggaggaaatggagctctacaggcagaaagttgaaccattgagggccgagctgcaggaaggagcacgccaaaaattgcacgagcttcaggagaagcttagcccccttggagaggaaatgcgcgactgtgcacgggctcacgtcgatgcccttagaacccatctcgccccctattctgatgagctcaggcagagactggccgctagacttgaggccctcaaggaaaacggaggggcacgcctcgccgagtaccacgcaaaagccacggagcatctgtccactctctccgaaaaagcaaagcccgctcttgaagatctgaggcaaggactgttaccggtgctggaatctttcaaagttagtttcctgtccgcgctggaggaatacaccaaaaagctgaacactcag

SEQ ID NO: 6343 - DNA, 801 bp, synthetic construct
  misc_feature 1..801: note = source = /note="Description of Artificial Sequence: Synthetic coding sequence"
  source 1..801: mol_type = other DNA
atgaaggccgccgtcctgacccttgccgttctgttcctgaccggaagccaggcccggcacttttggcagcaggatgagcctccccagagcccctgggatagggtcaaagaccttgccacggtgtatgtggatgtgttgaaagattccggtcgagactatgtgtctcagtttgaaggaagcgcccttggcaagcagctcaatttgaagcttctggataattgggattcagtcacatccactttctctaaactccgcgaacagctgggaccggttactcaggagttttgggataatcttgaaaaggaaactgagggtctgaggcaggaaatgagtaaggaccttgaagaagtaaaagcaaaagtgcagccatacctggatgactttcagaagaagtggcaagaggaaatggaactctatagacagaaagttgaaccattgagagcagagctccaggagggcgcgcgccagaaactgcacgaacttcaagaaaaactgtcccccctgggcgaggagatgagagattgtgccagagctcatgtcgacgcccttaggacacacctggctccatatagtgatgagctcaggcagagacttgccgcccgcttggaggcactcaaggagaacgggggtgcccggctcgcagaataccacgctaaggccaccgaacatctgtctacactgagtgagaaagccaagccggcacttgaggacctgcgacagggtttgttgcccgttctcgagagcttcaaggtgagcttcctgagtgcgttggaggaatacaccaaaaaactgaacactcag

SEQ ID NO: 6344 - DNA, 801 bp, synthetic construct
  misc_feature 1..801: note = source = /note="Description of Artificial Sequence: Synthetic coding sequence"
  source 1..801: mol_type = other DNA
atgaaagctgcagttcttaccctggccgtgttgttccttaccggttctcaagctcgtcatttctggcaacaggatgaaccaccgcaatcaccttgggatagggtgaaagacctcgccacggtttatgtggatgttttgaaggatagcggaagggactatgtttcacaattcgaaggttccgcgttgggaaaacaattgaatctaaagctattagacaattgggattccgttactagcaccttctccaagcttcgggagcaactcgggcccgtcacacaagaattctgggataacttggaaaaagagaccgagggtttgagacaagagatgtctaaagatttggaggaggtgaaggctaaagttcaaccttatcttgacgattttcagaagaagtggcaagaggagatggagctgtataggcaaaaggttgagcccttgagagctgagctacaagagggggctagacagaagctgcacgaacttcaagagaagttgagccctcttggagaagaaatgagagattgtgcaagagctcatgttgatgcattgagaactcacttagcaccttatagcgatgaacttcgtcagcgattagcagcccgattagaggctctgaaagagaatggaggagcacggctcgctgaatatcacgctaaggccactgaacatctttcaacgttgagtgagaaggctaagcccgctctggaagatttgaggcagggacttcttcctgtgttggaaagctttaaagtcagcttcctttcagcgttagaagagtataccaagaagctcaatacccaa

SEQ ID NO: 6345 - DNA, 801 bp, synthetic construct
  misc_feature 1..801: note = source = /note="Description of Artificial Sequence: Synthetic coding sequence"
  source 1..801: mol_type = other DNA
atgaaagccgcggtgctcacattagcggtgctgtttcttaccggctctcaggctagacatttttggcagcaggatgaacccccacagtctccttgggaccgggtgaaggacttggccactgtgtacgtagatgtcctgaaagactccgggcgagattatgtgagccagttcgagggaagcgcgctcggcaagcaattaaaccttaaactgttggacaactgggattccgtcacatccactttctcaaaactgcgcgaacaactgggccccgtgacccaagagttctgggataacctcgaaaaggaaacagaaggattgcggcaggagatgtctaaggacctggaggaggtgaaggctaaggtgcaaccctacctggatgacttccagaaaaaatggcaggaggagatggagttataccggcagaaagtcgagcccctcagggctgagctgcaggagggagcacgccaaaaactccatgagctgcaggagaagctgagcccgctgggtgaagaaatgcgtgactgtgcccgtgcccacgtcgacgccctccggacccacctggcaccttatagcgatgaactcagacagcgtttggcggcgcgcctggaggccctcaaggaaaatggtggagcccgcctcgcagaataccacgccaaagcaaccgaacacctgtctactctgtcagagaaggccaaaccagcactggaagacctgagacaagggctccttcccgtgctagaaagcttcaaggtgagcttcttaagcgccttggaggagtatactaagaaactgaacacccag

SEQ ID NO: 6346 - DNA, 801 bp, synthetic construct
  misc_feature 1..801: note = source = /note="Description of Artificial Sequence: Synthetic coding sequence"
  source 1..801: mol_type = other DNA
atgaaggccgccgtgctgaccctggccgtgctgttcctgacggggtcgcaagcgcggcacttctggcagcaagacgagccaccacagtcgccctgggaccgcgtgaaggacctggcgaccgtctatgtcgatgtcctcaaggactcgggacgggactacgtctcccagttcgaaggatccgctctgggcaagcagcttaacctgaagctcctggataactgggattccgtgacctcgaccttctcgaaactgcgtgagcaattgggtccggtgactcaggagttctgggacaacttggaaaaggaaacggagggactccggcaagagatgtcaaaggacctggaagaggtgaaggcaaaggtgcagccgtacctggacgacttccaaaagaagtggcaggaagaaatggagctttaccggcagaaggtcgaacctctgcgggcggaactgcaagaaggagctagacaaaaacttcatgaactgcaggagaaactcagcccacttggtgaagagatgcgcgactgcgctcgggctcacgtggatgcattgaggacccacctggccccatactccgatgagctgcgccagagactggcagcccgcctcgaagcactcaaagagaacggcggcgccagacttgcggaataccatgcaaaagctaccgaacatctgagcactctctccgagaaagccaagccagcattggaggacctccgccagggactcctgccggtcctggaatcgttcaaggtgagcttcctgtcggccctggaagaatacacgaagaaactgaacacccag

SEQ ID NO: 6347 - DNA, 801 bp, synthetic construct
  misc_feature 1..801: note = source = /note="Description of Artificial Sequence: Synthetic coding sequence"
  source 1..801: mol_type = other DNA
atgaaggccgctgtgctgactcttgccgtgttgtttcttactggtagccaagcgagacacttctggcagcaagatgaaccgccacaaagcccttgggatagggtcaaggatctcgcaactgtgtacgtggatgtccttaaggattcgggtagagactatgtctcccaatttgaaggtagcgcactgggaaagcagctgaacctgaaactcctggataactgggattcagtgacttctaccttctcgaagttgcgcgaacaacttgggcccgtgacccaagaattctgggataacctcgaaaaagaaaccgaggggctgagacaggaaatgtcaaaggatctcgaagaagtcaaggcaaaggtccagccttacctggatgactttcagaagaaatggcaggaagagatggagctgtaccgtcagaaggtggaacctctcagagccgagctgcaggaaggagcacggcaaaaactgcatgaacttcaagagaagttgtcaccattgggggaggagatgcgagactgtgcacgcgcccatgtggatgctctgcggacccatctcgccccgtacagcgatgaactcagacaacgcctcgcagcaaggttggaagcactcaaagaaaacgggggtgcaaggctggcagaataccacgcaaaggccaccgaacatctgtcaacgctctctgaaaaggccaagccagctctggaagatctgagacaaggacttctgccagtccttgaatcctttaaggtgtcatttttgagcgccttggaagagtacacgaaaaagctgaatactcag

SEQ ID NO: 6348 - DNA, 801 bp, synthetic construct
  misc_feature 1..801: note = source = /note="Description of Artificial Sequence: Synthetic coding sequence"
  source 1..801: mol_type = other DNA
atgaaggctgcagtgctgaccctggccgtccttttccttacgggatcgcaagcgcgccatttttggcagcaagacgaacctcctcagtcgccttgggatcgagttaaagatctggccacggtgtatgtggacgtcctgaaggactccggtcgtgattacgtgtcacaatttgagggttcagcattgggaaagcaacttaatcttaagctgttggacaattgggattcagttacttcgacgttctcgaaacttagggaacaattgggcccggtaactcaagaattctgggataacttggaaaaagaaactgaaggcctccggcaggagatgtccaaggatttggaagaggtcaaggcaaaggtgcaaccttacctggatgattttcagaaaaagtggcaggaggaaatggagctttacaggcagaaggtggaaccgctgagggccgagttgcaggaaggagcccggcagaagttgcatgaactccaggagaagctgtccccgctgggagaggagatgcgtgattgcgctcgtgcacatgtggacgcgcttcgcacccacctggcaccatacagcgacgaattgagacagagactggcggcaagactcgaagcattgaaggaaaacggaggggcaagactggccgaataccatgcgaaggccaccgaacaccttagcaccctgtcggaaaaagcaaaacccgcccttgaagatctccgccaggggctccttccagtccttgaatcctttaaagtctcttttctttcagcacttgaagaatacaccaaaaaactcaacacgcaa

SEQ ID NO: 6349 - DNA, 801 bp, synthetic construct
  misc_feature 1..801: note = source = /note="Description of Artificial Sequence: Synthetic coding sequence"
  source 1..801: mol_type = other DNA
atgaaggctgccgtgctgacccttgcagttctctttctcactggtagtcaggcacgacatttctggcagcaggatgagccacctcagtccccatgggatcgtgtgaaagatctggccacagtttatgtggacgtgctgaaggactctggccgggactacgtgtcgcagtttgaaggcagcgccctgggcaagcagctcaacctgaagctgctcgacaactgggacagcgtcacaagcacatttagtaagttgcgggaacaattgggtccagtcactcaggaattttgggacaatctggagaaagagactgaggggctacgccaggagatgtccaaagacctggaggaggtaaaagccaaggtgcaaccctacttggacgattttcaaaagaaatggcaggaggaaatggagttgtacagacagaaggtggagccgttgagagctgagttgcaggagggggccaggcaaaagctccacgaacttcaggagaaattgagccctcttggtgaggagatgcgggactgtgccagggcacacgtagacgccctcagaacacacctcgcaccctactccgatgagcttagacagcgtctggcagctcggttagaggccctcaaggagaatgggggtgcccgtctcgcagagtatcacgctaaagccaccgagcatttgtcaacactgtctgaaaaggctaagcccgccctggaagatctgcgccaaggactgctgcctgtccttgagtcttttaaggtatcctttctgagcgccttggaggagtatacaaagaagctgaacacccaa

SEQ ID NO: 6350 - DNA, 801 bp, synthetic construct
  misc_feature 1..801: note = source = /note="Description of Artificial Sequence: Synthetic coding sequence"
  source 1..801: mol_type = other DNA
atgaaggcagcggtcttgactctcgcggtcctgtttctgacagggtctcaggctcgacacttttggcagcaggatgagccgccgcaatctccttgggatcgagttaaggacctcgcgacagtatacgtggacgtccttaaagacagtggccgtgattatgtctctcagtttgaagggagcgcacttggcaaacaactaaatttgaaattattggataattgggattctgttacatccacattttccaaactgcgagagcagctgggaccggtgacgcaggaattttgggataacctcgaaaaagaaacagaaggccttaggcaagaaatgtcgaaggatctagaagaagtgaaagccaaggtgcaaccttacttagacgattttcagaagaaatggcaggaagagatggagttatatcgccagaaagttgaacccttacgggcagaactgcaagagggagcgcgacaaaagctgcatgaactgcaagaaaaactctccccccttggcgaagaaatgcgcgattgcgctagggcgcatgttgacgcgttacgcacacatctggctccttactctgatgaattaagacaaaggcttgctgctagattggaagcgctcaaggaaaatgggggagctcggcttgccgaatatcatgcgaaggcaactgaacatctgtctacactgtcggaaaaggcgaaaccggcgctggaagacctccgccaagggcttcttccagtactcgaatcattcaaagtctcattcctttcagcactagaagaatataccaaaaagttaaatacgcag

SEQ ID NO: 6351 - DNA, 801 bp, synthetic construct
  misc_feature 1..801: note = source = /note="Description of Artificial Sequence: Synthetic coding sequence"
  source 1..801: mol_type = other DNA
atgaaggcagcagtcctgacgcttgcagtgctgttccttaccggatcccaagcacggcatttttggcaacaggacgaaccaccacaaagcccatgggatagagtcaaggatcttgcaactgtgtacgtggatgttctgaaggactccggtcgtgactacgtgagccaatttgagggatccgcattgggaaagcagttgaacctcaagctgctggacaactgggacagcgtcacctccactttttctaagctgcgggaacaactcgggcccgtgactcaagagttttgggataatctcgagaaggagactgagggactgagacaggaaatgagcaaggatctggaagaagtgaaggccaaagtgcaaccatacctcgatgattttcagaaaaagtggcaagaagaaatggaactctacagacagaaggtcgaacccttgcgtgcggagctgcaagaaggagcaagacagaaacttcacgaacttcaggaaaaactgagtcccttgggtgaagaaatgagagattgtgctcgggcccacgtggatgctttgagaacccatctggcaccctactccgacgagcttagacaaaggcttgcagcacggctcgaagcactcaaagaaaatggcggtgccagactcgccgaataccacgctaaagcaactgagcatctgagcaccctttcagaaaaggcaaagcctgcactcgaagatctgaggcagggcctccttcccgtgcttgaatcgtttaaggtgtccttcctgtcagccttggaagaatacactaagaaactgaacacgcag

SEQ ID NO: 6352 - DNA, 801 bp, synthetic construct
  misc_feature 1..801: note = source = /note="Description of Artificial Sequence: Synthetic coding sequence"
  source 1..801: mol_type = other DNA
atgaaggccgcagtgttgactcttgctgttcttttcctgacgggctcccaggcacggcacttctggcagcaggacgagcctcctcagagcccctgggaccgggtgaaggacctggccaccgtctacgtggacgtcctgaaagacagcggccgggactacgtgagccagttcgagggttccgccctgggtaagcagctcaatctgaagctcctggataattgggattcagtgacttcgaccttttctaagctcagagaacagcttggcccagttactcaggaattctgggataacttggaaaaggaaacggaaggactccgccaagaaatgtcaaaggatctcgaggaggtcaaggcgaaggtgcagccatatctggatgacttccagaaaaagtggcaagaggagatggaactgtaccgccaaaaagtagagccgcttcgcgcggagctccaagaaggcgctcgtcagaaactccacgagctgcaagagaaactttcaccactgggggaagagatgcgggattgtgcgcgcgcccacgtggacgctctgcgcactcatctcgcgccttacagtgacgagctgcggcagagactcgctgcgcgcctggaagccctgaaggagaatggaggtgcgaggcttgcggaataccatgcgaaggcgacggaacacctctccacgctctcggaaaaggccaagccggcactggaggatctccgccagggactgctgccggtgctggaatccttcaaagtgtcgtttctgtcggcactcgaagaatacactaagaaactgaatacccaa

SEQ ID NO: 6353 - DNA, 801 bp, synthetic construct
  misc_feature 1..801: note = source = /note="Description of Artificial Sequence: Synthetic coding sequence"
  source 1..801: mol_type = other DNA
atgaaagcggccgtactgaccctggcagtgctctttctgactggatcccaggcccggcacttttggcagcaggacgagccgccacagtcgccgtgggatcgggtcaaggacctggccactgtctacgtcgatgttctgaaggatagtggacgcgattacgtgagtcagttcgaaggaagcgcgctgggaaaacagctcaatctcaagctgcttgacaattgggactccgtgacctcgaccttctccaaattgcgcgaacaacttggcccagtcacccaggagttctgggataacctcgagaaggagacggaagggctgcgccaagaaatgtccaaagatctcgaagaggtgaaagctaaggtgcagccgtatctggatgatttccagaaaaagtggcaagaggagatggaactgtaccggcagaaggtggaaccactgcgggcggaactgcaggagggagcccgccaaaaattgcatgagctccaagagaagctctcgccgctgggcgaggagatgcgcgactgcgcccgggcccatgtggacgctctgcggacccaccttgcaccgtactccgacgaacttaggcagcggttggcggcgcggctggaagcactcaaggaaaacggaggagccagattggcggaataccatgcgaaggccactgagcacctgagcacgctttcagaaaaagctaaaccagcactggaagatttgcgccagggcctcctccccgtgctcgaatcgtttaaagtctccttcctgtcggccctggaagagtacaccaagaagctgaacacccaa

SEQ ID NO: 6354 - DNA, 801 bp, synthetic construct
  misc_feature 1..801: note = source = /note="Description of Artificial Sequence: Synthetic coding sequence"
  source 1..801: mol_type = other DNA
atgaaagcagctgtgctgactctggcggtgttgttcctcactgggtcacaggcacggcatttctggcagcaggatgagccgccacagagcccgtgggaccgggtgaaagacctcgccactgtctacgtggacgtgctgaaggacagcggaagggattacgtgtcacagttcgaaggatctgcgcttgggaagcaactgaatctgaaattgctggacaactgggattccgtgacttcgactttctcgaagctgcgcgagcagctggggccggtgacccaagaattctgggacaacttggaaaaggagactgagggccttcggcaggagatgtcgaaggacttggaggaggtcaaggcgaaggtgcagccttacctcgacgattttcaaaagaaatggcaagaagagatggaactgtaccggcaaaaggttgaacccctgagagcggaactgcaggaaggagcacggcagaaactgcatgagctgcaggaaaagctctctccgttgggtgaggagatgcgcgattgcgccagagcgcatgtcgatgcgttgcgcactcatcttgcaccatactcggacgaactgcggcaacgcttggccgcaaggctggaagccttgaaggaaaatggaggcgctagactcgcggaataccacgctaaagcaacggaacatctcagcactctgtccgaaaaagcaaagcccgctctcgaggatctccggcagggactcctgccagtgctggaatcgttcaaggtgtcgttcctctcggccctggaagagtataccaagaagctcaacactcaa

SEQ ID NO: 6355 - DNA, 801 bp, synthetic construct
  misc_feature 1..801: note = source = /note="Description of Artificial Sequence: Synthetic coding sequence"
  source 1..801: mol_type = other DNA
atgaaggccgcggtcttgacgttggccgtgctcttccttaccgggtcccaagcgaggcatttctggcaacaagacgaacctccacagtccccgtgggaccgagttaaggacctggccaccgtgtacgtggatgtcctgaaggattcgggacgcgactacgtgtcccagtttgagggttcggccctgggaaaacagttgaacctgaagctgctggataattgggatagcgtgacttccactttcagcaaactgcgagaacaacttggaccagtcactcaggagttttgggacaacctggagaaagaaactgaaggcctgcggcaagagatgtccaaggacctggaagaagtgaaggccaaggtgcagccttacttggatgatttccagaaaaagtggcaggaagaaatggagctgtaccgccagaaagtcgagccattgcgggccgagctgcaagagggagcgcgccaaaagctgcacgagctgcaggagaagctcagcccgctgggagaagagatgcgcgactgcgcgagagcacacgtggacgcattgaggacccacctggccccgtactccgatgaactccgtcagcggctggcagcacgattggaggcactcaaggagaacggcggagcgcggttggcggagtatcatgcgaaagccaccgagcatctgagcacgctgtccgagaaagccaaaccggcgctcgaagatctgcggcagggtctgctgcctgtgttggagtcttttaaggtcagcttcctctcagctctcgaagagtacaccaagaagctgaacactcag

SEQ ID NO: 6356 - DNA, 801 bp, synthetic construct
  misc_feature 1..801: note = source = /note="Description of Artificial Sequence: Synthetic coding sequence"
  source 1..801: mol_type = other DNA
atgaaggcagctgtcctcaccctcgccgtccttttcctcaccggatctcaagcacgccacttttggcagcaggacgagcctcctcagtccccgtgggatcgggtgaaggacctcgcaaccgtgtacgtcgatgtgcttaaagattcaggacgcgactacgtgtcccaattcgagggaagcgccctgggtaaacagctgaatctgaagctccttgataactgggatagcgtgactagcacgttcagcaagctgagagaacagctgggaccggtgactcaagaattttgggacaatctggagaaggaaactgagggactccggcaggaaatgtcaaaagaccttgaagaagtgaaagccaaggtccagccttacctggacgacttccagaagaagtggcaggaagaaatggaactgtacaggcagaaagttgaaccgctgagagcagaactgcaggaaggggctcgccaaaagctgcatgaactgcaggagaagctctccccgttgggcgaggagatgcgcgactgcgcgcgtgcccacgtggacgccctccgcacccacctcgccccatattccgacgaactcagacaacgtcttgcggccagactcgaagcactgaaagagaacggaggggcccgcctggccgagtaccacgccaaggctactgagcacctgagcacgctgtcagagaaggccaagccggccctggaggacctccgccaaggactcctgccggtcctggagtcattcaaggtgtccttcctttcagccctggaggaatacaccaagaagctcaacacccaa

SEQ ID NO: 6357 - DNA, 801 bp, synthetic construct
  misc_feature 1..801: note = source = /note="Description of Artificial Sequence: Synthetic coding sequence"
  source 1..801: mol_type = other DNA
atgaaagccgcggtcctcaccctggcggtgctcttcctcactggctctcaggctcgtcacttctggcaacaagacgagcccccacaatccccatgggatcgggtgaaggacctcgctaccgtctacgtggacgtgctcaaagactccggacgcgactatgtgtctcagttcgagggaagcgcactggggaagcagttaaatttgaagcttttggataactgggactccgtaacctcaacgttctcaaaacttagagaacaactgggacctgtcacgcaggagttctgggacaatctggaaaaagaaactgagggcctgagacaggagatgagtaaagatctcgaggaagtcaaggctaaggtgcagccttacctggacgacttccagaagaagtggcaggaagagatggagctgtacaggcagaaagtggaaccgctgcgggccgagctgcaagaaggcgccagacagaaactgcacgagctgcaggagaagctgagtcccttgggggaggagatgcgggactgcgcaagagcccacgtggatgcccttcgcacgcatctcgctccttacagcgatgaactgcgacaacgattggctgcccggttagaagccttgaaggagaatgggggagctcggctggccgaataccacgccaaggcgacagagcatctttccaccttgtccgaaaaggccaagcccgctctggaagatttgagacagggtctgcttcccgtgttggagagtttcaaggtgtcctttctaagtgcgctggaagagtatactaagaagctgaacacccag

SEQ ID NO: 6358 - DNA, 801 bp, synthetic construct
  misc_feature 1..801: note = source = /note="Description of Artificial Sequence: Synthetic coding sequence"
  source 1..801: mol_type = other DNA
atgaaggccgccgtcctgactctcgccgtcctgtttctgacgggatcccaggcccgtcacttctggcaacaggacgagccccctcaatcaccatgggatagggtgaaagaccttgcgaccgtgtacgtggacgtgctgaaagactccgggcgcgactatgtgagccaattcgagggctcagcgttgggaaaacaactcaacctcaagctgctggacaactgggactcggtgacctcgacgttcagcaaacttcgcgagcagctcggccccgtcacccaggagttctgggacaacctggagaaggaaactgagggactccggcaagaaatgtccaaggatctcgaggaagtgaaagcaaaggtgcaaccctacctggacgacttccagaaaaagtggcaggaagagatggagctgtacagacagaaggtcgaaccactcagggccgaactccaggaaggcgcgcggcagaagctgcacgaactgcaggagaagctgagcccactcggagaagaaatgagggattgcgcccgcgcccatgtggatgcactccggacccaccttgccccttactcggacgaactgcggcagagactggccgcacgcttggaagcgctcaaggagaacggtggagcgcggcttgccgaataccacgcgaaggccacggaacatctctcaaccctgtcagaaaaggcaaagcctgcgctggaggatttgcgccagggcctcctcccggtcctggagtcgtttaaagtctcgttcctcagcgcactggaggaatacacgaaaaagttgaacacccaa

SEQ ID NO: 6359 - DNA, 801 bp, synthetic construct
  misc_feature 1..801: note = source = /note="Description of Artificial Sequence: Synthetic coding sequence"
  source 1..801: mol_type = other DNA
atgaaagctgcagtcttaacattagctgtgctttttctaacaggatcacaggcacgacacttttggcagcaggatgaacccccccaatctccctgggaccgggttaaagacctagcgactgtttacgtggatgtactaaaagatagtgggcgggattatgtgtcccagttcgaaggatctgccctggggaaacagctaaatctaaaactgctcgataactgggactcagttacttccactttcagtaagcttcgcgaacagctcggacccgtgactcaggaattttgggataacctggaaaaagaaacagaaggactccggcaggagatgtccaaagacctggaagaagtgaaagcgaaagttcagccctacctggacgattttcagaaaaaatggcaagaagagatggaactgtaccggcagaaagttgaacctctccgagccgaactccaagaaggagcccgccagaaattgcacgaactgcaggagaagctgtctcctctgggagaagaaatgagggattgtgctagagcccacgttgatgcactcagaactcatctcgctccctactcagatgaactgcgccagcggttagcagcaaggctcgaagctttaaaagagaacggaggagccagactcgctgagtaccacgccaaggcgacagagcatttatcaactctttcagagaaagcaaaacctgctctcgaggatttacgccaggggctcctgcctgttttagaatcattcaaagtctcattcctatctgctctcgaagagtatacaaaaaaacttaatactcaa

SEQ ID NO: 6360 - DNA, 801 bp, synthetic construct
  misc_feature 1..801: note = source = /note="Description of Artificial Sequence: Synthetic coding sequence"
  source 1..801: mol_type = other DNA
atgaaagcggccgtgctcacattggcagtgctgttcctaactggatctcaggccagacatttctggcagcaagatgagccaccccagagtccctgggacagggtgaaagatcttgccactgtctacgtggacgtcctgaaagatagtggaagagactacgtatcccagttcgaagggtcagcattaggaaagcagctcaacttgaaactcctcgataactgggattcagtgacatcgacgttctctaaactccgagaacagttaggaccagtaactcaggaattttgggataacttagaaaaagagacagaaggactcagacaggagatgagtaaagatctcgaggaagttaaagcaaaggttcagccctatcttgatgattttcagaaaaagtggcaagaagagatggaactatacagacagaaagtcgaacccctgcgggccgaactccaggagggggctcgacagaaattacatgaactgcaggaaaaattatctcctctgggggaggaaatgcgggattgtgcaagggcgcacgtggatgccttgaggacacacctcgccccctattccgatgaattaagacaaagactagccgcaagattagaagctctgaaggaaaacggaggggctaggctggctgagtatcacgccaaagcaacagaacacctatccacactatccgaaaaagcaaaacctgcactcgaagacctcaggcaggggcttctgccagtgctcgaatccttcaaagtgtcatttttgtcagcgcttgaagagtatacaaaaaagcttaatactcag

SEQ ID NO: 6361 - DNA, 801 bp, synthetic construct
  misc_feature 1..801: note = source = /note="Description of Artificial Sequence: Synthetic coding sequence"
  source 1..801: mol_type = other DNA
atgaaggcagcggtgttgactctggcagtgctgttcctcacgggtagtcaggcccgccatttttggcaacaggacgagcctccgcagtctccttgggatagggttaaggatctcgccactgtctatgtggacgtgctcaaagatagtggtcgggactatgtaagtcaatttgaaggcagtgccttgggcaaacagctcaatcttaagctcctcgataattgggatagtgtcactagcaccttctccaagttacgcgaacaactgggccctgtcacacaggagttttgggacaacctggagaaagagactgaaggcctaaggcaggagatgtcgaaggacctcgaagaggtgaaggccaaggtccagccatacctggacgacttccagaaaaaatggcaagaggagatggaactctatcggcagaaagtggaaccactccgcgccgagttgcaggagggtgcccggcagaagctgcatgagctgcaggagaaattatcgccactaggtgaggaaatgagggactgtgcgcgggcgcatgtcgatgctttgcgtacccatttggctccttacagcgacgagttacgacagaggctcgctgccagactggaggctctcaaagagaatggcggcgccagattggcagagtatcatgccaaagccaccgagcatctctcaaccctgagtgaaaaggcaaagcccgctctcgaagatctgagacaagggctgctgccagtgctggagtccttcaaggtctctttcctcagcgctctagaggagtatacgaagaagctaaacacacaa

SEQ ID NO: 6362 - DNA, 801 bp, synthetic construct
  misc_feature 1..801: note = source = /note="Description of Artificial Sequence: Synthetic coding sequence"
  source 1..801: mol_type = other DNA
atgaaagccgccgtactcactctggctgtcctgttcctgacagggagccaggcccgtcatttttggcaacaggacgaaccccctcaatccccgtgggatcgcgttaaggatctcgctacagtgtacgtggatgtcctgaaggactctggcagagactacgtctcccagtttgaaggcagtgcactgggaaaacagctcaatttaaaattgctggacaattgggactctgtcacctctacattttccaagctgagagagcagctgggcccggtgacacaggagttctgggacaacctggagaaagaaactgaaggtctgcgccaggagatgagcaaggatttggaagaggtgaaggcaaaagtgcagccttacttggacgactttcagaaaaagtggcaggaagaaatggaactatatcgccagaaagtggagcctctacgtgccgaattgcaggagggagcgaggcagaagctgcacgagcttcaagagaagttaagtccactgggagaggagatgcgcgactgcgcaagggctcacgtcgacgccctcagaacgcatctggcgccgtattccgacgagctgcgacagagattagctgctaggctggaagccctgaaggaaaacggaggtgcccgactcgccgagtaccatgccaaggcgacagaacacttgagcactcttagtgagaaggctaagcctgctctggaagacttgagacaggggctgctgcccgtgttagagtctttcaaggtgtcatttcttagcgcactggaggagtatactaaaaagttgaatacgcaa

SEQ ID NO: 6363 - DNA, 801 bp, synthetic construct
  misc_feature 1..801: note = source = /note="Description of Artificial Sequence: Synthetic coding sequence"
  source 1..801: mol_type = other DNA
atgaaggccgcagtgctgacactggccgtgctatttctgacaggatctcaggctagacatttctggcagcaagatgaaccaccgcagtcaccctgggaccgtgtgaaggaccttgccacagtttacgtggacgtactgaaggactcaggacgagattacgtttcccagttcgagggttctgctttaggtaagcagttgaatctgaagttgttagacaactgggactctgtgacttccaccttttctaaactgagggagcagctgggcccagtgacacaagagttctgggacaacctagaaaaagagacagaaggtttgcgccaggagatgagcaaggacctcgaggaagttaaggcaaaggtccagccttatcttgacgatttccagaagaagtggcaggaagagatggaactgtacaggcagaaggttgaacccctccgcgccgagctgcaggagggagctcgccagaagctccacgaactgcaggagaagctgagccccctgggagaggaaatgcgcgattgcgccagagcgcatgttgatgccctgcggacccatcttgctccatactccgacgagctgagacaaaggctcgccgcacgcttggaagccctaaaggagaatggcggcgccagattggcagagtatcacgccaaggccacggaacatctatccacactaagcgaaaaggcgaaacctgccctggaggaccttaggcaggggctactgcccgtgctagagtccttcaaagtctccttcctgagtgctcttgaggaatacacaaaaaagttgaatacccaa

SEQ ID NO: 6364 - DNA, 801 bp, synthetic construct
  misc_feature 1..801: note = source = /note="Description of Artificial Sequence: Synthetic coding sequence"
  source 1..801: mol_type = other DNA
atgaaggccgcggtacttacattagccgtgcttttccttacaggttcccaagcccgccacttttggcagcaggatgagcccccccagtccccttgggatagagtgaaagacctcgcgaccgtatacgtagatgtgctaaaagacagtggtagggactacgtaagccaattcgagggcagtgccctcggcaagcagctgaatttgaagcttctggacaattgggactcagtaacaagcacattttcaaaactccgggagcaactgggaccagtcacccaggagttttgggacaatctggagaaagaaactgaaggtcttagacaagagatgagcaaagacttggaagaggtgaaagcaaaagtccagccatatttggatgatttccaaaaaaagtggcaggaagagatggagctatatagacaaaaagttgagcctttgagagctgagctgcaagaaggtgcccgacaaaagttgcacgagctgcaagagaagctgtcgcccctcggagaggaaatgagggattgtgccagagcccatgtggacgcattaagaactcacttggccccatacagtgacgaacttcggcagaggctggctgccaggctggaagccctaaaagaaaatggaggggctagactggcagagtaccatgccaaggcaacggaacatctgagcacgttgtccgagaaggctaagcctgcccttgaagaccttagacagggcttactgcctgtattagaatcgttcaaggttagcttcctgtctgcccttgaagaatacactaagaagctaaatacccag

SEQ ID NO: 6365 - DNA, 801 bp, synthetic construct
  misc_feature 1..801: note = source = /note="Description of Artificial Sequence: Synthetic coding sequence"
  source 1..801: mol_type = other DNA
atgaaggcagccgtgctgactctcgccgtgctgttcctcaccggaagccaggccaggcatttctggcagcaagacgaacctccacagtcgccgtgggatcgggtcaaggacctggctacggtgtacgtggatgtgctgaaggattccggacgggattacgtctcgcagttcgagggttcagcgctcgggaagcaactgaacctgaaactcctcgataattgggatagcgtgaccagcactttttcgaaactgcgcgaacagctcggtcctgtgacccaagaattctgggataacctggaaaaggaaaccgaggggctgcggcaagaaatgtcgaaggacctggaagaggtgaaagctaaggtgcaaccttacctcgatgatttccaaaagaaatggcaggaggagatggagttgtacaggcagaaggtggaaccactcagagcggaactccaggaaggggcccggcaaaagctgcacgaactgcaagaaaaactgtcaccgctcggcgaagaaatgcgcgactgcgcgcgcgcccacgtcgacgctctgcgcacccacctggcaccatactccgacgaactgcgccagcggcttgcggcccgtctggaggcactgaaggagaacggcggcgctcgccttgccgagtatcacgctaaggccaccgaacacctgagcaccctgtcggaaaaagcgaaaccggccctggaggatctgagacaaggcctcctccctgtgctggagtcgttcaaggtgagcttcctgagcgcattggaagaatacaccaagaagctcaacactcag

SEQ ID NO: 6366 - DNA, 801 bp, synthetic construct
  misc_feature 1..801: note = source = /note="Description of Artificial Sequence: Synthetic coding sequence"
  source 1..801: mol_type = other DNA
atgaaggccgctgttctgacgttagccgtgctgttcctgaccggatcacaagctagacacttctggcagcaagatgaaccaccacagagtccctgggatagggttaaagatctggccaccgtgtacgtagatgtgctgaaggattctggtcgcgattatgtctctcagttcgaaggttctgccttgggcaaacagctgaacttgaagctgctcgataactgggattcagtaaccagtaccttctctaaactccgtgagcaactgggccccgttactcaggaattctgggacaatctggaaaaggagacagagggactccgccaggaaatgagtaaggatttggaggaggtgaaagcaaaagtccagccatatctggacgattttcagaagaagtggcaggaagagatggaactctacagacagaaagtggaaccactgagagctgagctgcaggagggggctaggcagaaactccatgagcttcaagaaaagttatccccactgggcgaggagatgcgagattgcgcgagagcacatgtagacgccttgaggacacatcttgccccctactcggacgagctgaggcaacggctggccgctcgccttgaggccctgaaagaaaacggaggggccagattggctgagtatcatgcgaaagcaactgaacacctatccactctgtcagagaaagcaaaaccagctctggaagatcttaggcagggcctcctgccggtgctagaatccttcaaggtgtcctttctatcggcgctggaggagtacacgaagaaattgaacacgcag

SEQ ID NO: 6367 - DNA, 801 bp, synthetic construct
  misc_feature 1..801: note = source = /note="Description of Artificial Sequence: Synthetic coding sequence"
  source 1..801: mol_type = other DNA
atgaaggccgcggtgctcacgttggcagtgctgttccttaccggatcccaagcgcgccacttttggcagcaggacgaacctccgcagagcccgtgggatcgcgtgaaagatctcgccaccgtttacgtggacgtgctcaaagattccggacgcgattacgtttcccagttcgagggatcagccctgggaaaacagctgaacttgaagctcctggataactgggactctgtgactagcactttttcgaagctgagagagcaattggggccggtgacgcaggaattttgggataacctggaaaaggagactgaaggtttgcgacaagaaatgtcaaaggatcttgaagaggtgaaggccaaggtgcagccgtacctggatgacttccagaagaaatggcaggaagaaatggaactttaccgccaaaaggtggagcctctgcgggccgaactccaagaaggagctaggcaaaagctccatgaactgcaagaaaaactctcacccctgggcgaggagatgagagactgtgcgagagcacacgtggacgcgcttcggactcacctcgctccgtactccgacgaactcaggcaacggctggcagccaggctcgaggccctgaaggaaaatggaggagcacgcctggctgaataccatgccaaggcgaccgagcacctgagcacgctgtcggaaaaggccaagcctgcgctggaggacctccgtcaaggcctcctgccagtcctcgagtcgttcaaggtttcatttctctcggccctcgaggaatacactaagaagctcaatacgcag

SEQ ID NO: 6368 - DNA, 801 bp, synthetic construct
  misc_feature 1..801: note = source = /note="Description of Artificial Sequence: Synthetic coding sequence"
  source 1..801: mol_type = other DNA
atgaaggccgccgtcctgacactggctgttcttttcctaacaggctcccaggcccgtcatttctggcaacaggacgagcccccgcaaagcccatgggatcgagtaaaagacttagctacagtttatgtagacgtgttaaaggatagcggaagagactatgtgagccagttcgagggctcggctttgggtaaacagctgaacttgaaactgctggataattgggactcggtgacctctactttctcaaaattacgtgaacagctcggccctgtaacccaagagttctgggacaacttggaaaaggaaaccgagggcttgaggcaggagatgagcaaggacctggaggaagtgaaagcgaaggtgcagccttacctggacgatttccaaaagaagtggcaggaagaaatggaactctaccgacaaaaagtggaacccctaagggctgagttacaggagggagcccgacagaagctccacgagctacaagaaaagctctcgcctctgggagaagagatgagggactgcgctcgggcccacgtggacgccctccgcacgcacctagccccctacagcgacgagctgcggcaacgacttgccgcacgattggaagccctgaaggaaaacggcggggcccgactggcagagtaccatgctaaggcaaccgagcacctgagtacactgtcggaaaaggccaaacctgccctcgaggacctgaggcaggggttgctgcctgttcttgaatcttttaaagtgagtttcctgtcggcactagaggaatacaccaaaaaattaaacacccag

SEQ ID NO: 6369 - DNA, 801 bp, synthetic construct
  misc_feature 1..801: note = source = /note="Description of Artificial Sequence: Synthetic coding sequence"
  source 1..801: mol_type = other DNA
atgaaagctgccgtcctgactcttgcagtcctctttctgactggatcccaagcacggcatttttggcaacaagacgagcctccccagtcaccgtgggatcgggtgaaggatcttgctactgtgtacgtggatgtgcttaaggactccggaagggattatgtttcacaattcgaaggctcagccctcgggaaacagctgaatctgaaacttctcgataactgggacagcgtgactagcaccttctcgaagctgcgggagcagctcggacctgtgacccaggagttttgggataatctggaaaaggaaaccgaaggacttcgtcaagagatgtcgaaggatctggaggaggtgaaggccaaagtgcaaccttaccttgatgacttccagaagaagtggcaagaagaaatggaactctaccggcagaaggtcgaacctttgagagcagaactgcaggaaggagcaagacaaaagctccacgagcttcaagaaaaactttcacctttgggtgaagaaatgcgcgattgcgctagagcgcatgtggatgcactgcgcacgcatctcgcgccgtactcggacgaactccggcagagattggccgcgagactggaagcgctgaaggaaaatggtggtgcacggctggcagaataccacgctaaggccactgagcacctgtccaccctttcggagaaagcaaagcctgcactggaggacctgcgccaggggttgctccccgtgcttgagtcatttaaggtcagcttcctctcggcgctggaagaatacaccaagaaacttaacacccaa

SEQ ID NO: 6370 - DNA, 801 bp, synthetic construct; identical to SEQ ID NO: 6331
  misc_feature 1..801: note = source = /note="Description of Artificial Sequence: Synthetic coding sequence"
  source 1..801: mol_type = other DNA

SEQ ID NO: 6371 - DNA, 801 bp, synthetic construct
  misc_feature 1..801: note = source = /note="Description of Artificial Sequence: Synthetic coding sequence"
  source 1..801: mol_type = other DNA
atgaaggcagcagtgctcactcttgcagtcctgttcctcactggaagccaggcccgacacttttggcaacaggacgaacccccgcaatcaccatgggatcgtgtgaaggatctggccaccgtgtatgtggacgttctgaaggatagcggccgcgactacgtgtcccagttcgaaggatccgcactgggtaaacagttgaatctcaaactgctcgataactgggattcggtgacctcaactttttcgaaactgcgagaacagcttggtcccgtgacccaggaattctgggacaacctggagaaggaaactgaaggtctgagacaggagatgtcgaaggatcttgaagaggttaaggcaaaggtgcagccttaccttgatgatttccaaaagaagtggcaagaagaaatggagctttacaggcaaaaggtcgaacctctcagggcagaactccaggagggagccaggcaaaagttgcatgaacttcaagagaaactctcgcctttgggtgaggagatgcgggactgtgcccgggctcatgttgatgcactgcggactcatctggcgccttactcggatgaactccgacagagactggccgccagactcgaggcgcttaaagagaatggaggtgcaagactcgccgagtaccatgctaaggcgaccgaacacctttccaccttgtcggaaaaggccaaacctgctctggaagatctccgtcaaggacttctgcctgtgctcgagagcttcaaggtgtcgttcctttccgcgctggaagaatacaccaagaaacttaacactcag

SEQ ID NO: 6372 - DNA, 801 bp, synthetic construct
  misc_feature 1..801: note = source = /note="Description of Artificial Sequence: Synthetic coding sequence"
  source 1..801: mol_type = other DNA
atgaaagccgctgtgctgactttggctgtactattcctaactggcagccaggcacgccacttttggcagcaggacgaaccgccccagagcccttgggaccgcgtgaaggatcttgcaacggtgtatgttgatgttctcaaggacagcggcagggattacgtgtcccaattcgaaggttccgccctggggaagcagctgaacttgaagctgcttgacaactgggatagcgtgacctccaccttcagtaaactccgagagcagttgggccccgtgacccaggagttttgggataaccttgaaaaagagaccgaaggactgcgccaggagatgtccaaggatctggaggaggtgaaagctaaggtccagccctacttggatgactttcaaaaaaagtggcaggaggagatggaactgtaccgccagaaggtcgagcctcttagagctgagttgcaggagggcgccaggcagaagctgcatgagcttcaagagaaactgagcccactgggtgaggagatgcgggactgtgccagggcacatgtggacgctctccgaacccacctggctccttattccgacgagctgcgtcagcggttagcggccaggctcgaggcactcaaggaaaatggcggtgcccggctcgccgaataccacgcgaaggctacagaacacctgagcacattaagcgagaaagcaaagccggcattggaggatctgagacaggggctgctgcccgtactcgaaagctttaaggtatctttcctgtccgctttggaggagtacactaagaagctcaacactcag

SEQ ID NO: 6373 - DNA, 801 bp, synthetic construct
  misc_feature 1..801: note = source = /note="Description of Artificial Sequence: Synthetic coding sequence"
  source 1..801: mol_type = other DNA
atgaaggccgctgtgctgactttagcagttctgtttctcactggaagtcaggctagacacttctggcagcaggacgaaccccctcagtccccctgggaccgtgtgaaggatctcgcaactgtttacgtggatgtgctcaaggattcgggaagagattacgtgtctcaattcgagggatccgccctgggaaagcagctaaatctgaagcttctggataattgggactcggtaacttctacattcagcaaactgagggaacaactcggaccagtgacccaggagttctgggacaatttagaaaaagagactgagggactgcggcaggagatgagcaaagacctagaggaggttaaggccaaagtgcagccttatctggacgattttcagaaaaagtggcaggaggagatggagttgtatcgtcagaaagtcgagccactgagagccgaattacaggaaggggctagacagaaattgcacgagctgcaggaaaagctctccccactgggtgaagagatgcgggactgtgctagagcgcacgtcgacgcgctccgaactcacctggctccttacagtgacgaactgaggcagagactggcagctcgcttggaagcgctcaaagagaacgggggagcaaggctagccgagtatcacgctaaagctactgaacatctgtcaaccctctcagaaaaggcgaaacctgcactggaagacctgcgccagggactgctcccggtccttgagagcttcaaggtgtcattcctgtccgccttggaggagtatactaaaaaactgaatactcag

SEQ ID NO: 6374 - DNA, 801 bp, synthetic construct
  misc_feature 1..801: note = source = /note="Description of Artificial Sequence: Synthetic coding sequence"
  source 1..801: mol_type = other DNA
atgaaggccgcagtcctcactcttgcagtgctttttctgaccgggtcgcaagccagacatttttggcagcaagacgagccaccccaatcaccttgggaccgcgttaaggatcttgctaccgtgtatgtggatgtcctcaaggattcaggtcgagactacgtctcccagtttgaaggaagcgcactggggaagcaactcaatctgaaactcctggataactgggactctgtcacgtccacttttagcaagctccgagaacaacttggaccagtcacgcaggaattttgggacaatttggagaaagaaactgaaggactcagacaggaaatgtcgaaggatttggaggaagtcaaggcgaaagtccagccgtacttggatgatttccaaaagaagtggcaggaagagatggagttgtaccgccaaaaggttgaacctctgagagccgaacttcaagaaggtgcaagacaaaaactccacgaactccaggagaagctcagcccacttggagaagagatgcgcgactgtgcaagagcgcatgtggacgccctcaggacccaccttgcaccttactcagatgagctgagacaacgcctcgctgcacgcttggaggcgcttaaggagaatggtggggcacgtcttgcagaataccatgccaaagcaactgaacacttgtcgactctgtcggaaaaggctaagcctgccctggaggatctgcggcaaggacttctcccggtgttggaatcctttaaagtgtccttcctctccgcacttgaagaatacactaagaaactgaatacccaa

SEQ ID NO: 6375 - DNA, 801 bp, synthetic construct
  misc_feature 1..801: note = source = /note="Description of Artificial Sequence: Synthetic coding sequence"
  source 1..801: mol_type = other DNA
atgaaggccgcggtgcttacactggcagtcttgttcctcacaggatctcaggcccggcacttttggcaacaagacgaaccaccacaatccccctgggacagggttaaggatctcgccactgtctacgtagacgtgctgaaggattcagggcgggattatgtctcccaatttgaaggctcggcgctgggcaaacagcttaatctgaaactcttagataattgggactctgtgacctcaaccttttctaaactgagggagcagctgggcccggttactcaggagttttgggataacctggagaaagaaactgagggactgcgccaggaaatgagcaaagatctggaagaagtcaaagccaaggtccagccctatcttgatgattttcagaagaaatggcaagaggagatggaactgtatcggcagaaggttgagcccctgcgagccgaacttcaggagggagctcgacaaaagctacacgagcttcaggaaaagttgagccccctgggcgaagaaatgcgggactgtgctcgcgctcatgtggacgctttacgaacgcacctggctccatatagcgacgaactcagacagcgccttgcagcaagactcgaggctctgaaagagaatggcggcgcacgactcgcagagtatcacgccaaggccaccgagcatctcagcaccctgagcgaaaaggcaaaaccagcccttgaggacttgcgtcagggcctcctacctgtgctcgagagttttaaagtgtctttcctatcagctttggaggagtacacaaagaagctgaacacacag

SEQ ID NO: 6376 - DNA, 801 bp, synthetic construct
  misc_feature 1..801: note = source = /note="Description of Artificial Sequence: Synthetic coding sequence"
  source 1..801: mol_type = other DNA
atgaaagctgccgtgctgactcttgcagtgctgtttcttaccggctcgcaagcccggcatttctggcagcaggacgagcctcctcagagcccttgggaccgggtcaaagaccttgcaacggtttacgtggacgtgctcaaggacagcggacgcgattacgtcagccaatttgaaggatcagcactgggcaagcagctgaatcttaagctgctggacaattgggattcggtcacctccaccttcagcaaacttcgggaacagctgggtccagtcacgcaagaattttgggataaccttgaaaaggagactgaaggccttcgccaagaaatgagcaaggatcttgaggaggtgaaagcaaaggtgcaaccctacctggatgactttcaaaagaagtggcaggaagaaatggagctttaccgacagaaagtcgagccccttagagcggaactgcaagaaggggcaaggcagaagctgcacgaactccaggagaagctgagcccacttggagaggagatgcgggactgtgcgagagcgcatgtcgacgccctcaggacccatctcgcaccctactcggacgagctgcgacagcgtcttgccgcccgcctggaagccctcaaggagaatggcggagcgcgcctggcggaataccacgcaaaggccaccgagcatctgtccactttgtcggagaaggcgaaaccagcactggaagatctccgccaaggcctgcttcctgtcctggagtcctttaaggtgtcgtttctgtctgccctcgaggagtatactaaaaagttgaacactcaa

SEQ ID NO: 6377 - DNA, 801 bp, synthetic construct
  misc_feature 1..801: note = source = /note="Description of Artificial Sequence: Synthetic coding sequence"
  source 1..801: mol_type = other DNA
atgaaggccgccgtgctcactttggccgtgctcttcttgaccgggtcccaggctagacacttctggcagcaggacgaacctccacaaagcccttgggatcgggtgaaggacttggcaaccgtgtatgtggatgtgctgaaagactcagggcgcgattacgtgtcccagttcgaaggtagcgccctcggaaaacagctgaatctgaagctccttgacaactgggattcagtgacttccaccttctctaaactcagagaacagctgggcccagtcactcaagagttctgggataacctggagaaggagactgaaggcctccggcaagaaatgtcgaaggatctggaagaagtgaaggcgaaggtccagccttacctcgacgactttcagaaaaagtggcaggaagaaatggagctgtaccggcagaaggtggaaccccttcgcgctgagcttcaagagggtgcccgccagaaactccatgaactgcaggaaaaactctcacctctcggagaagagatgcgggactgcgcgagggcccacgtcgacgctctgagaactcacctcgccccatactccgatgagctgaggcaaaggctggccgcccgcctcgaggcactcaaagaaaatggaggagccaggctggcagagtaccatgcgaaggccaccgagcatctgtccaccctgtcggaaaaggcaaagcctgctcttgaggatcttcgccagggcctccttcctgtcctggaatcgttcaaggtgtcgttcttgtcggccctcgaagaatacaccaagaaactgaatactcag

SEQ ID NO: 6378 - DNA, 801 bp, synthetic construct
  misc_feature 1..801: note = source = /note="Description of Artificial Sequence: Synthetic coding sequence"
  source 1..801: mol_type = other DNA
atgaaagccgccgtcttgaccctcgcggtgctgttcttaacaggcagccaggcacgacatttctggcagcaggatgagccgccccagtccccctgggatcgcgtcaaggatctggctacagtctacgtggatgtgctcaaggatagcggacgggattacgtttcccagttcgaaggctccgcgctgggtaagcagctgaacctcaagctcttggataattgggattccgttacgagtaccttctcgaagctgcgcgagcagctgggtccagtaacccaggagttttgggataacctcgaaaaggagactgagggactcagacaggagatgtcaaaggacttggaggaggtgaaggccaaggttcagccatacttagatgattttcagaaaaagtggcaagaggagatggaactgtaccggcagaaggtcgagccgctgcgtgcagagctgcaggaaggtgcccgccaaaagctgcacgagctgcaggagaaactctccccactgggcgaggaaatgcgcgattgtgcacgcgcacacgttgacgccttgcgtacgcacctcgccccatactcagacgagctgcgtcagcgccttgctgcgcgcctggaggccttgaaggaaaacggcggagcacgtctggccgagtaccatgctaaggcaacagaacacttgtccacccttagcgagaaagctaagccggctctggaggatcttcgacagggactgttgcccgtcctggagtcctttaaggttagtttcctttcagccctcgaggagtacacgaagaagctaaatacgcaa

SEQ ID NO: 6379 - DNA, 801 bp, synthetic construct
  misc_feature 1..801: note = source = /note="Description of Artificial Sequence: Synthetic coding sequence"
  source 1..801: mol_type = other DNA
atgaaggcagcagtgctgactctcgcggtattgttcctcactggaagccaggcacgtcacttctggcaacaagatgagcctccgcagtcaccttgggaccgtgtcaaagacctggcgactgtttacgtggacgttctgaaggactccggccgggattatgtgtcgcaatttgaaggatcagcattgggaaagcagctcaaccttaaacttcttgataactgggatagcgtcacgtctaccttttccaagctgcgggagcagcttggtccagtcactcaagaattttgggataacttggagaaagaaaccgaagggctgcgccaagagatgtcaaaagacttggaagaagtgaaggcaaaagtgcagccatatctggacgactttcaaaagaagtggcaagaggaaatggaactgtacagacagaaggtggagcctctgcgtgcagagcttcaagaaggcgcccgccagaaactccatgaacttcaggaaaaactctcgccccttggtgaggagatgcgggattgtgcgcgagcacatgtcgatgcactcaggacccacctggcaccgtacagcgatgaattgagacaacgcctggcagcgcggcttgaggcgctcaaggagaatggaggggcgcgtctggcggaataccatgccaaagccaccgaacatcttagcaccctgagcgaaaaggccaagccggcgcttgaagatctgaggcaaggtcttttgcctgtgctcgaatcgtttaaggtgtccttccttagcgccctggaagagtacaccaagaagctgaatactcag

SEQ ID NO: 6380 - DNA, 801 bp, synthetic construct
  misc_feature 1..801: note = source = /note="Description of Artificial Sequence: Synthetic coding sequence"
  source 1..801: mol_type = other DNA
atgaaggcagcggtgctgaccctcgcagtgcttttcctgactggatcccaggctcgtcatttctggcagcaagacgagcccccacagtcgccatgggatagagtgaaggacctcgccactgtgtacgtcgacgtgcttaaggattccggccgtgattacgtctcccagttcgaaggttcggcactgggtaagcaacttaacctgaaactgctcgacaattgggatagcgtgacctcaactttctctaagctccgggagcagcttgggcctgtcactcaagagttctgggataacttggagaaggaaactgaaggactccgtcaagaaatgtcgaaagatctggaagaagtcaaggccaaggtccagccctaccttgacgattttcaaaagaagtggcaagaggaaatggaactctaccggcaaaaggtggagccccttcgggcagaactccaggagggggcgagacagaagctgcatgagctgcaagagaaactgagccccctgggagaagagatgcgagattgtgcaagagcgcatgtggatgctctgcgaacgcaccttgctccttactcggacgagctccggcaacggcttgccgcacgacttgaggcactgaaggaaaacggcggagccagattggctgaataccatgcgaaggccaccgaacacctttcgactctttcagagaaggcaaaacctgccctggaagatcttcgacaaggactgctccctgtcctggaatcgttcaaggtgtcgtttctgtcagcactggaagaatacactaaaaagctgaacactcag

SEQ ID NO: 6381 - DNA, 801 bp, synthetic construct
  misc_feature 1..801: note = source = /note="Description of Artificial Sequence: Synthetic coding sequence"
  source 1..801: mol_type = other DNA
atgaaagccgcagtgctgaccctcgccgtcttattcctcacaggcagccaggctcgccacttttggcagcaggacgagcccccccagagtccctgggaccgggttaaggatctggctaccgtttacgtcgatgttttgaaagacagcggaagggactatgttagccaatttgaggggtcagctctgggtaaacaattgaatctgaaacttttggataattgggattccgtgacaagcaccttttcaaaactacgagagcagctagggcccgtgacccaggagttctgggacaacctggagaaggagacagagggattaagacaggagatgtctaaggacttggaggaagtaaaagccaaggtacagccatacctggacgattttcaaaaaaaatggcaggaggaaatggaactctataggcagaaggtggagcccctaagagcagagctgcaggagggcgctaggcagaagctacatgagctgcaagagaagctgagtcctctgggtgaggaaatgcgagactgtgcgcgtgcacacgtggacgccctgaggacccacctggcgccctattcagacgagctgagacagagactggctgcccggcttgaggcactgaaggagaacggcggagcgcgattggctgagtatcacgcaaaggcaacggagcatctgtcgacccttagcgagaaggccaaaccagcactggaggatctgcgtcaaggtttactccctgtcctggagagcttcaaggtttcatttctgtccgccctcgaagaatacacaaaaaaactgaacacccag

SEQ ID NO: 6382 - DNA, 801 bp, synthetic construct
  misc_feature 1..801: note = source = /note="Description of Artificial Sequence: Synthetic coding sequence"
  source 1..801: mol_type = other DNA
atgaaggcagccgttctgaccctggcagtgttgtttctgacaggttcacaggccagacatttctggcaacaagatgaaccccctcagagcccttgggatagggtgaaagatctggcaacagtctacgtggatgttttaaaggacagtggaagggactatgttagccagttcgagggctctgcgctgggcaaacaactcaacttgaagctgctggacaattgggattcagttaccagcaccttctcgaagctcagggagcaactgggcccggttacccaagagttctgggataacctggaaaaagagacagaggggctgagacaggagatgagcaaagacctggaagaggtgaaggcaaaggttcaaccatacctggacgatttccagaaaaagtggcaggaagaaatggaactttatagacagaaggtggagcccctgagagctgaattgcaggagggggctagacagaagctacacgagcttcaagagaaacttagccccttgggggaggagatgagggattgcgcccgagctcacgtcgacgcccttcgtacccatctggcgccttatagcgacgaattgaggcaaaggttggcagccaggctggaggctcttaaggagaacgggggtgcaagacttgccgaatatcacgcaaaggctaccgaacatctcagtacattaagcgagaaagccaaaccagccctggaggatctgagacaaggtctgctgccagtacttgagtcatttaaggtcagtttcttgagcgctttggaggaatacacaaagaagttgaacacacaa

SEQ ID NO: 6383 - DNA, 801 bp, synthetic construct
  misc_feature 1..801: note = source = /note="Description of Artificial Sequence: Synthetic coding sequence"
  source 1..801: mol_type = other DNA
atgaaagcggctgtgctaacacttgctgttctgtttttaactggctcacaagcgagacacttttggcaacaggatgagcctccccaatccccctgggaccgagtaaaggatttagctaccgtttatgtcgatgtccttaaagattctggcagagactacgtcagccagttcgagggttccgcattgggaaaacagctcaacttgaagttgctggataattgggatagtgttacatctaccttttctaagttgcgtgaacaattgggaccagtgacacaagagttttgggataatttggaaaaggaaactgagggattgcgacaagaaatgtcgaaggatttagaggaggttaaggcaaaagtgcaaccatacctagatgatttccagaaaaaatggcaggaagaaatggaattatacagacagaaagtcgaaccattacgtgcggagttgcaggaaggagcacgacaaaaactgcacgagttgcaagaaaaactcagcccgcttggagaggaaatgagagattgtgctcgagcccatgtggatgcgctgcgaacccaccttgcgccgtattctgatgaattgcgtcaacgtctcgctgcccgtctcgaagcactcaaggaaaatggaggagctcgtttggctgaatatcatgcgaaggctacagagcacctttcaacattgagcgaaaaagcgaaaccagcacttgaggaccttcgtcagggacttctgccggtcctcgaatcatttaaggttagttttctttccgctctcgaggagtatactaaaaaactcaacacacaa

SEQ ID NO: 6384 - DNA, 801 bp, synthetic construct
  misc_feature 1..801: note = source = /note="Description of Artificial Sequence: Synthetic coding sequence"
  source 1..801: mol_type = other DNA
atgaaggccgcggtgcttaccctcgctgtgctgttccttactggctcacaagcacgccatttctggcagcaggatgaacctcctcaatccccatgggatcgggtgaaagatctcgcaaccgtgtatgtggacgtccttaaggattccggacgcgactacgtgtcacagtttgaaggttcggcgttggggaagcaactgaacctgaagctgctcgataattgggactccgtgacctcgaccttttcgaagctccgggagcaactgggacctgtcacccaggagttttgggacaacctggaaaaggaaaccgagggacttagacaggaaatgagcaaagatctggaagaagtcaaagcaaaggttcagccatacctggacgactttcaaaagaagtggcaagaagagatggagctgtaccggcaaaaggtcgagcctcttagggcggagcttcaggaaggcgcgcggcagaaactccatgagcttcaggagaaactgtcgcccctcggtgaagaaatgcgggattgcgcgcgggcacatgtggatgcactgagaacccaccttgcaccctactcggacgaacttcgccaaagactcgcagcaagactcgaagcacttaaggaaaatggaggagcccgactcgctgaataccatgcgaaggcgaccgagcatctgtcaaccctctcggaaaaagctaagccggcattggaggacctgaggcaagggctcctgcctgtcctcgaatcatttaaggtcagcttcctgtcagcattggaagaatacaccaagaagctgaacacccaa

SEQ ID NO: 6385 - DNA, 801 bp, synthetic construct
  misc_feature 1..801: note = source = /note="Description of Artificial Sequence: Synthetic coding sequence"
  source 1..801: mol_type = other DNA
atgaaggcagcagtgctcactctcgctgtgctctttctcaccggaagtcaagccaggcacttctggcagcaggacgagccaccacagtcaccatgggatcgcgtgaaagacttggcaacggtctatgttgacgtcctgaaagatagtggtagggactacgtatcccagtttgaaggatcagcgctgggcaaacagttgaacctcaagcttttggacaactgggacagtgttacctccaccttcagtaagcttcgcgagcagttgggccccgttacccaggaattctgggataaccttgaaaaggagacagagggtctgagacaggagatgtccaaggacttggaggaagttaaggccaaagttcagccctatctcgacgacttccaaaaaaagtggcaggaagagatggagttgtacaggcagaaggttgagccacttcgcgcagagctgcaggagggtgcgagacagaagctgcacgagctgcaagaaaaactgtcacccttgggtgaggaaatgagagactgcgcaagggcccatgtggacgctctgaggacacacttggcaccctacagtgacgaactcaggcagcgcctggcggcgagactcgaggccctcaaggagaatggaggcgctcgcttggctgagtaccacgcaaaggcgacagagcacctctccactttgtccgagaaggccaaacccgcccttgaggatcttcgccaaggtttgctcccggttttggagagtttcaaagtgagcttcctgtctgctcttgaggagtacacaaagaagctcaatacccaa

SEQ ID NO: 6386 - DNA, 801 bp, synthetic construct
  misc_feature 1..801: note = source = /note="Description of Artificial Sequence: Synthetic coding sequence"
  source 1..801: mol_type = other DNA
atgaaggcggcagtgctgaccctcgccgttttgttcttgacaggcagtcaggcccgccacttttggcaacaggatgagccgcctcagtcgccctgggatcgggtgaaggatcttgccaccgtttacgtggacgtcctgaaggacagcggtcgcgactacgtcagtcagttcgaggggagcgcgctgggtaagcaattgaacctgaagctcctggacaattgggattcggttacctccacattctcgaagctgcgggagcagttgggtccggtcacgcaggagttctgggacaaccttgaaaaggagaccgaggggctgcgccaggagatgtcgaaggatctggaggaggtcaaggctaaggtccagccctaccttgatgatttccagaagaaatggcaggaggagatggagctctacaggcagaaggtcgagccccttagagcagagcttcaggaaggcgccaggcagaagttgcacgagctgcaagaaaaactgagccccctgggcgaggaaatgcgtgactgcgctcgtgcccacgtcgatgctctccgtacgcaccttgccccgtactctgacgagctgcgtcaacgtctcgccgcgcgactggaggctctcaaggagaacggcggcgcgcgtctggccgaatatcacgcgaaagccactgagcacctctccacactgtccgagaaagctaagcccgccctggaggaccttcgtcagggtctgctgcccgttctagagtctttcaaagtgtccttcctctccgccttggaggagtataccaaaaagcttaacactcag

SEQ ID NO: 6387 - DNA, 801 bp, synthetic construct
  misc_feature 1..801: note = source = /note="Description of Artificial Sequence: Synthetic coding sequence"
  source 1..801: mol_type = other DNA
atgaaagctgcagtgcttacgctggctgtgctcttcctcactggttcgcaggccagacatttctggcaacaagacgaaccaccccaatcaccatgggatagggtgaaagatcttgcgactgtgtatgtcgatgtgcttaaggactccggaagagactacgtttcccagtttgagggtagcgcacttgggaagcagcttaacttgaagctcttggataactgggactcagtgactagcactttctccaagctccgagaacagctgggtcctgtgactcaggagttttgggataatcttgaaaaggaaaccgagggcctgcgtcaagagatgtccaaggatctcgaagaagtcaaggcaaaagtgcagccataccttgacgatttccagaagaagtggcaggaagaaatggaactgtaccgacaaaaagttgaaccacttcgggccgagctgcaagaaggagcgcgacagaagctgcatgaacttcaagaaaagctgtcccctcttggtgaggaaatgagagattgcgcacgcgcacatgtggacgcgctgagaacccatctcgcaccctattcagatgaactgagacagcgactggcagcacgactggaggcattgaaagaaaacggaggcgcccggctcgcagagtaccatgcgaaggcaaccgaacatctcagcaccctctcagagaaggcaaagcccgcattggaagatctcagacaaggactgctcccggtgctggagtcctttaaagtgtcgtttctttccgcccttgaggaatacactaagaagctgaacacccaa

SEQ ID NO: 6388 - DNA, 801 bp, synthetic construct
  misc_feature 1..801: note = source = /note="Description of Artificial Sequence: Synthetic coding sequence"
  source 1..801: mol_type = other DNA
atgaaggccgctgtgctgactctcgccgtgttattccttaccggaagccaggccagacacttttggcagcaggacgaaccccctcagtccccctgggatagggtcaaagatctggccacagtgtacgtggatgtgctcaaagacagcggcagagactatgtctctcagtttgagggaagtgcactgggcaaacagctgaatctgaagctgctagacaattgggactctgtgacaagcacattctctaagctgcgcgagcagctcggccctgtgacacaggagttctgggataatctggagaaggagaccgagggcctccggcaggagatgtctaaggatctcgaagaggttaaggctaaagttcaaccctacctggacgacttccaaaagaagtggcaagaagaaatggagctgtatcggcagaaggtggagccactgagggcagagctgcaggaaggagctcggcagaagctgcatgagctgcaggaaaagctcagccccttaggagaggaaatgcgggactgtgcaagggctcatgttgacgctttgagaacccacctggccccctactcagatgaactgagacaaaggttagccgcaaggttagaggcactgaaagagaatggaggggcccgtctggccgaatatcatgctaaggctactgaacacctgtcaactctcagcgagaaagcaaaaccagccctggaggacctcaggcaaggtctactgcctgtgcttgagtcattcaaagtttcttttctatccgccctggaagagtacaccaagaagctaaatacccaa

SEQ ID NO: 6389 - DNA, 801 bp, synthetic construct
  misc_feature 1..801: note = source = /note="Description of Artificial Sequence: Synthetic coding sequence"
  source 1..801: mol_type = other DNA
atgaaggccgccgtcctgacacttgcggtgctgttcttgacaggttcccaggcaaggcacttctggcaacaggacgagccgccacaaagtccttgggaccgggtgaaggatttggctaccgtgtacgtcgatgttttgaaagactctggccgagactacgtgtcccagtttgaggggtctgccctgggtaaacagctgaatcttaagctgctggataactgggactctgtcacctccaccttttctaagctgagggagcaattgggtcccgtgactcaggagttctgggataacctggagaaggagaccgagggactgcgccaggaaatgtctaaggacctggaggaggtgaaggcaaaggtacagccatatctggatgactttcaaaagaagtggcaggaagagatggaactctacaggcaaaaggtcgaacctctgcgagctgagttgcaagagggcgcacgacaaaaactccacgaactccaggaaaaactctcacctcttggagaggagatgcgggactgtgcaagggctcatgtggacgccctgaggacacatctcgcaccatattcagatgaacttcgccaacgactggccgcgagacttgaagccctcaaggagaatggcggagcccgcctggctgaataccatgccaaagctaccgagcatctgagcacgctttccgagaaggctaaacccgcactggaggacctcaggcaggggctgcttccggtgctggagtcatttaaggtgagctttctttccgccctggaggagtatacaaagaagctgaacactcag

SEQ ID NO: 6390 - DNA, 801 bp, synthetic construct
  misc_feature 1..801: note = source = /note="Description of Artificial Sequence: Synthetic coding sequence"
  source 1..801: mol_type = other DNA
atgaaagccgccgtgctgactctggctgtgctgtttctgactggatctcaggccaggcatttttggcaacaggatgaaccgccccaatcgccgtgggatcgggtgaaggacctggcgacggtttacgtggacgtgttgaaagattcgggcagggattacgtgtcccaatttgaaggaagcgcgttggggaagcaattgaacttgaagctgctggacaactgggactctgtgacttccactttctccaaactgcgcgaacagctggggcctgtgacgcaggagttctgggataacttggagaaagaaacggaaggccttcggcaggaaatgagcaaagacctggaggaagtcaaagctaaggtgcaaccatacctcgatgatttccagaagaagtggcaggaagagatggaactgtatcgccagaaagtcgagccactgcgggctgagttgcaagagggtgcacgccagaagctgcacgagctgcaggaaaagctgtcgccactgggagaggaaatgcgggaccgggctagagcccacgtggacgcacttagaacccacctggcgccttactcagatgagctccgacagcggctggctgcccgcctggaagccctcaaggaaaatggaggagcccgccttgcggaataccatgcaaaggcgaccgaacacttgtccactctctccgagaaggccaagccggccctggaagatctgcgccagggactgctgccagtgctcgagtcgttcaaagtctcttttctctcagctctcgaagagtacactaagaagttgaacactcaa

SEQ ID NO: 6391 - DNA, 801 bp, synthetic construct
  misc_feature 1..801: note = source = /note="Description of Artificial Sequence: Synthetic coding sequence"
  source 1..801: mol_type = other DNA
atgaaggcagctgtgcttactctggctgtgttgttcctcaccggaagccaagcccgacacttttggcagcaggacgaaccaccacaatcaccctgggatcgggtgaaggatctggccacggtgtacgtcgacgttcttaaggactcgggacgggactacgtgagccaattcgaaggctccgcgcttggtaagcagctgaacctgaaactcctggacaattgggacagcgtcacctcgactttctccaagctccgggaacagcttgggccggtcacccaagagttctgggacaacctggagaaggaaaccgaaggtctgcggcaagaaatgtcaaaggatcttgaagaggtcaaggccaaagtgcagccataccttgatgatttccagaaaaagtggcaggaggaaatggagctttatcgacaaaaagtcgaaccactccgagcagaacttcaagaaggggcacggcagaaactccacgagctgcaggaaaaactttcgccgttgggggaagaaatgagagatagagcgagagcccacgtggacgcactgcgcacccatctggccccgtactccgatgagttgaggcagcgcttggccgcgaggctcgaggctctgaaagagaacggaggagcacggcttgccgaataccatgcgaaagcaactgagcacctgtcgaccctgagtgaaaaggcgaagcctgccctcgaggacctgcgccagggactcctgccggtgctggaatcattcaaggtgtcttttctgtctgctttggaggagtacactaagaagctgaatacgcaa

SEQ ID NO: 6392 - DNA, 801 bp, synthetic construct
  misc_feature 1..801: note = source = /note="Description of Artificial Sequence: Synthetic coding sequence"
  source 1..801: mol_type = other DNA
atgaaagccgcggttctgacacttgccgtgctgtttcttacaggtagtcaggctcgccatttttggcagcaggatgagcccccgcagtctccgtgggatcgcgtcaaggatttggctactgtgtacgtagacgtcctgaaagattcaggacgggattacgtttcccagttcgaaggctctgccttgggtaagcaacttaacctgaagctgttggacaactgggattccgtcacatcaactttttccaagctgagggagcaactgggccccgtgacccaagagttttgggataacctcgagaaagaaaccgaaggattgcgccaggaaatgagcaaagacttggaggaagtcaaggcaaaagtgcagccttacctggacgactttcaaaaaaaatggcaggaggagatggagctctacagacagaaagtggagccactgcgggccgagctgcaggagggagcacggcagaaacttcacgaactgcaggaaaagttgtccccgctgggggaggaaatgagagacagggccagggcccacgtggacgcacttcgaactcacctcgcaccttactctgatgagctgcggcagagactcgccgctagactggaggctctcaaggagaacggcggggctaggctcgccgaataccacgccaaagccacagaacacctgagcacgcttagcgaaaaggccaaacctgctttggaagatttgagacagggactgttgcccgtcctggagtcctttaaggtttctttcctgtccgccctggaagaatataccaagaagttgaatactcag

SEQ ID NO: 6393 - DNA, 801 bp, synthetic construct
  misc_feature 1..801: note = source = /note="Description of Artificial Sequence: Synthetic coding sequence"
  source 1..801: mol_type = other DNA
atgaaggcggcagtccttactctggcggtcctctttctgaccgggagccaagctcggcacttttggcagcaagacgaacctccgcagtcgccatgggatagagtcaaggatctcgccactgtgtacgtagacgtgctgaaggattcgggccgggactacgtgtcccagtttgagggcagcgccctgggaaagcaactcaatctgaaacttcttgataactgggatagcgtgacttcgactttcagcaaactcagagaacagctcggcccagtgactcaggaattttgggataaccttgagaaggaaacggaaggattgcgacaagaaatgtcaaaggatcttgaggaggtgaaggcaaaggtgcaaccttacctggatgatttccagaagaaatggcaagaggaaatggaactgtacagacaaaaagtcgaaccacttagggcagaactccaggagggagctcggcagaagctccatgagcttcaggaaaagctctccccactgggtgaagaaatgagagacagagcaagggcacatgtggatgcacttaggacccaccttgccccatattccgacgaactccggcagcgacttgcagcccgcctcgaggcactgaaagagaatggtggagcccgactggctgaataccatgcgaaggcgaccgaacatctgtcgactctctcggagaaagcgaagcctgccctggaggatctgcgtcaaggactgctgcccgtcctcgagagctttaaagtttcctttctttcggctcttgaagaatacaccaaaaaactcaacacccag

SEQ ID NO: 6394 - DNA, 801 bp, synthetic construct
  misc_feature 1..801: note = source = /note="Description of Artificial Sequence: Synthetic coding sequence"
  source 1..801: mol_type = other DNA
atgaaggcagccgtcctgactctggcggtcttgttcctcactgggagccaagcacgccacttctggcagcaagacgagccgcctcaatccccgtgggatcgcgtgaaagatttggccaccgtgtacgtggatgtgctgaaggattccgggcgcgactacgtgtcgcaattcgagggttcggccttggggaagcaactgaacctgaagctgctggacaattgggactccgttacgagcaccttttctaagctcagagaacagttgggaccagtcacccaggagttttgggataacctggaaaaggaaaccgagggcctgcggcaggaaatgtccaaggacctggaagaggtgaaggctaaggtgcagccatacctggacgatttccagaagaagtggcaagaagaaatggaattgtacaggcaaaaggtcgagcctctgcgcgccgagctccaggagggggccaggcagaagctgcatgagctgcaggagaaactgtccccgctgggagaagaaatgagggatagagctcgagcgcacgtcgacgcactccgcacgcatctggctccttactcggacgaattgcgccagagacttgctgcaaggctcgaagcgttgaaggaaaacggaggtgcccgcctcgcggaataccacgccaaagctactgaacacctgagcaccctttcggagaaggccaagcccgcgctcgaggacctgagacaaggcctgctcccagtgctggagagcttcaaggtgtcgttcctgagcgccctggaagaatacactaagaagctgaacacgcaa

SEQ ID NO: 6395 - DNA, 801 bp, synthetic construct
  misc_feature 1..801: note = source = /note="Description of Artificial Sequence: Synthetic coding sequence"
  source 1..801: mol_type = other DNA
atgaaggccgctgttctaactctggcagtgttgtttctaaccggctcccaggccaggcacttttggcaacaggatgagccaccacagagcccctgggatcgcgtaaaagacttggctacagtgtatgtggatgtactgaaggacagcggcagggattatgtctcccagtttgaaggtagcgccctgggaaaacaactgaacctgaaattgcttgacaattgggattcagtgacttcgaccttttctaagctgagggaacagctgggacccgtgacacaagagttttgggacaatttggaaaaggaaacagaaggtcttagacaagagatgagtaaggacctggaagaagtgaaggccaaggtgcagccttacttagacgattttcagaagaaatggcaggaagaaatggaactgtataggcaaaaggtggagcctctgagagcggaacttcaagagggcgccagacagaagcttcacgaactgcaggaaaagttgagccccctgggagaagagatgcgtgacagggccagagcccatgtggatgctctgagaacacacctggctccatactccgatgagctacggcaacggctggcagctagattggaggccctgaaggagaacgggggcgctcgtctagccgaatatcatgctaaggccaccgagcatttgtctactctttcggaaaaggccaaacctgcgttggaggacttgaggcagggtctcctcccagtgcttgaatctttcaaagtctcatttctttccgcattagaggaatacaccaaaaaattaaacactcag

SEQ ID NO: 6396 - DNA, 801 bp, synthetic construct
  misc_feature 1..801: note = source = /note="Description of Artificial Sequence: Synthetic coding sequence"
  source 1..801: mol_type = other DNA
atgaaggcagcagtccttacgcttgctgtgctttttcttaccggttcgcaggcgcggcatttctggcaacaagatgaacctccacagtcaccgtgggatcgggtgaaagatcttgcaaccgtgtacgtcgatgtccttaaagactcaggtcgcgactacgtctcccagttcgagggatcggcactgggaaagcaattgaatctcaaactgcttgataattgggattcagtgacgtccactttttccaaactgcgagaacaacttggtccagtcacccaggagttttgggacaatctggaaaaggagactgaaggacttcgtcaggaaatgtcgaaggatctcgaagaagttaaggcaaaagtgcagccatacctcgatgactttcagaaaaagtggcaagaagaaatggagttgtaccgtcaaaaggtcgaaccacttagagcggagcttcaagagggtgcgagacaaaagctgcatgagcttcaagaaaaactcagcccactcggagaggaaatgagagacagggcccgggcacatgtggatgcgctgcgcacccatctcgcaccgtactcggatgaactgaggcagcgactcgctgcgagattggaagccctcaaggagaacggcggagctagactcgccgaataccacgccaaggcaacggagcacctttcgaccctttcggagaaagcaaaaccagccctggaggatctgaggcagggtctgctgcctgtcctcgaatcattcaaggtgtcattcctgtccgccctggaggaatacaccaagaagctgaacacgcag

SEQ ID NO: 6397 - DNA, 801 bp, synthetic construct
  misc_feature 1..801: note = source = /note="Description of Artificial Sequence: Synthetic coding sequence"
  source 1..801: mol_type = other DNA
atgaaggcagccgtcctcaccctcgctgttctgtttcttacaggctcacaggctagacacttttggcagcaggatgagcctccacagtccccttgggatcgggtcaaggatctggccaccgtgtacgtcgacgtgttgaaagacagcggaagggattatgtatcccagtttgaaggctccgcattgggcaagcagctgaacttgaaactgttagataattgggacagcgtgacctcaacattctccaagttaagagaacagctggggcctgtgacacaggagttttgggacaacctcgagaaggaaaccgaaggcctgcgacaggagatgagcaaggatctggaagaagtaaaagctaaggtgcaaccctatctcgatgacttccaaaaaaagtggcaggaagaaatggaactgtaccgacagaaggtggagccactccgtgccgaactgcaggagggtgccaggcagaagttgcacgagttgcaggagaagctgtctcccctgggtgaggagatgagagaccgggcccgagcacatgttgatgccctgagaactcacctcgccccatactctgacgaactgcgccagaggctagccgctaggctggaggccctgaaggagaatgggggtgcgcgtttggccgaatatcacgcgaaggcaactgagcacttgtcaactttgagcgaaaaggctaaacctgccctagaagacttgcgccagggcctcttaccggttctcgagagctttaaggtaagctttttgagtgccctggaagagtatacaaagaagttgaacacacag

SEQ ID NO: 6398 - DNA, 801 bp, synthetic construct
  misc_feature 1..801: note = source = /note="Description of Artificial Sequence: Synthetic coding sequence"
  source 1..801: mol_type = other DNA
atgaaagctgctgttctgaccctggctgtactgttcctaacaggctcacaggccagacatttttggcaacaagatgagcctccgcagagcccctgggaccgcgtcaaggacctcgccactgtctacgtcgatgtgctgaaggacagcgggcgcgactacgtctcccagtttgaaggctccgcactgggaaagcagcttaatctgaagctgctcgacaattgggactccgtcacctccaccttctcgaaactgcgcgaacagctgggcccggtaacgcaggagttctgggacaatttggaaaaggaaacagaggggttgcgccaggaaatgagcaaagatttagaagaagtgaaggcaaaagtacaaccgtaccttgacgattttcagaaaaagtggcaggaggaaatggaactgtatcgccagaaagtggaacctctgcgcgctgaactccaggagggggcaagacagaaattgcatgagcttcaggagaaactgtcccctctgggcgaggagatgagggatcgcgccagggcacatgtggatgcacttcggacacatctggccccctatagtgacgagcttcgtcagaggctggctgcccgactggaagcacttaaggagaacggcggggcaaggctggcggaataccatgcaaaagccactgaacatttatcaacactgtccgagaaagccaaaccggcattggaggatctgaggcagggtctcctgcccgtgctcgagagctttaaagtgtcctttcttagtgccctggaagaatatacaaaaaagctgaacacccag

SEQ ID NO: 6399 - DNA, 801 bp, synthetic construct
  misc_feature 1..801: note = source = /note="Description of Artificial Sequence: Synthetic coding sequence"
  source 1..801: mol_type = other DNA
atgaaagcggcggtattaacgctagcggttttatttttaacgggttcgcaagcgcgacatttttggcaacaagatgaaccgccgcaatcgccgtgggatcgagttaaagatttagcgacggtatatgttgatgtactaaaagattcgggtcgtgattatgtttcgcaatttgaaggttcggcgctaggtaaacaattaaatctaaaactactagataattgggattcggttacgtcgacgttttcgaaattacgagaacaattaggtccggttacgcaagaattttgggataatttagaaaaagaaacggaaggtttacgacaagaaatgtcgaaagatctagaagaagtaaaagcgaaagtacaaccgtatttagatgattttcaaaaaaaatggcaagaagaaatggaactatatcgacaaaaagtagaaccgttacgagcggaactacaagaaggtgcgcgtcaaaaactacatgaactacaagaaaaattatcgccgctaggtgaagaaatgcgtgatcgtgcgcgagcgcatgttgatgcgttacgaacgcatctagcgccgtattcggatgaattacgtcaacgtttagcggcgcgtttagaagcgctaaaagaaaatggtggtgcgcgtctagcggaatatcatgcgaaagcgacggaacatttatcgacgttatcggaaaaagcgaaaccggcgttagaagatctacgtcaaggtttattaccggtattagaatcgtttaaagtatcgtttctatcggcgctagaagaatatacgaaaaaattaaatacgcaa

SEQ ID NO: 6400 - DNA, 801 bp, synthetic construct
  misc_feature 1..801: note = source = /note="Description of Artificial Sequence: Synthetic coding sequence"
  source 1..801: mol_type = other DNA
atgaaggccgctgtgctgaccctcgctgtgttgtttctgactggttcccaagcacgtcatttctggcagcaggatgaaccgccgcagagcccttgggatcgcgtgaaggatctggccaccgtgtatgtcgacgtgctgaaggactcagggcgcgattacgtgtcgcaattcgaaggatcggcgctcggaaaacaactgaacctcaagttgctggacaactgggactccgtgacctcgacgttctcgaaattgcgagagcagctcggccctgtgacccaggagttctgggacaatctcgagaaggaaaccgaagggctgagacaagaaatgtctaaggatctcgaggaagtcaaagcgaaagtgcagccgtacctggacgattttcagaagaagtggcaggaagaaatggagctgtacagacagaaggtcgagcctctgcgcgctgagctccaagaaggagcccgccaaaagctgcacgagctccaagagaaattgtccccgctcggagaagagatgagggaccgcgcgcgggctcatgtcgacgcactgagaacccatcttgctccatactctgacgagctgcggcaacgcctggcggctcggctggaagcactgaaagaaaacggcggagcgagactcgccgagtaccacgccaaggctaccgagcacctttcaactctgtccgagaaagctaagccagcccttgaggacctgaggcagggactgttgcctgtgctcgagtcgttcaaggtgtcgttcctgagcgcactggaagaatacactaaaaagctcaatacccaa

SEQ ID NO: 6401 - DNA, 801 bp, synthetic construct
  misc_feature 1..801: note = source = /note="Description of Artificial Sequence: Synthetic coding sequence"
  source 1..801: mol_type = other DNA
atgaaggcggcagtgctgacgctcgcggtcctttttctaaccggttctcaagcccgacatttttggcagcaggatgagccacctcagtcaccatgggaccgagtaaaggacctggcaactgtgtatgtggacgtgctcaaagattccgggcgcgattacgtgagccagttcgaaggatcggcacttggcaaacaacttaatctcaaactgctggataactgggacagcgttactagtacattctcaaagctgcgagagcaactaggcccggtcacacaagagttctgggataaccttgagaaggagaccgagggactccgacaggagatgtccaaggatctagaagaggtgaaagcaaaggtgcaaccctaccttgacgacttccaaaaaaagtggcaagaagaaatggaactgtaccgacagaaggtcgagccacttcgggccgaactccaggagggtgcaaggcaaaagctacacgagctgcaggaaaagctgtcaccccttggagaggaaatgagagacagggcccgagcccacgtcgacgccctgcgtacccacctcgcaccatactctgacgagttaaggcaaagactggctgccaggctcgaagcactgaaagaaaacggcggggctaggttggcggaatatcacgccaaggccaccgaacatctgtccactctatcagagaaggctaaaccagccctggaggacctgagacagggcctactgccagtgctcgagtcttttaaagtgtcttttctgtccgctctcgaggagtacactaagaagctgaacacccag

SEQ ID NO: 6402 - DNA, 801 bp, synthetic construct
  misc_feature 1..801: note = source = /note="Description of Artificial Sequence: Synthetic coding sequence"
  source 1..801: mol_type = other DNA
atgaaggcagctgttttaacacttgccgtgctcttccttaccggctcacaggcccgacatttttggcaacaggacgagcccccacagagcccctgggacagggtgaaagatctagctacagtctacgtggatgtgctcaaggattctggcagggattacgtgagccagtttgagggcagcgccctcggcaagcagctcaacttaaaattactggataactgggatagtgtcacctcaacctttagcaagcttcgagaacaactagggcccgtcacgcaagaattctgggacaatctcgaaaaagaaacggaaggtcttagacaggagatgagcaaggacctggaggaagttaaagctaaggtgcaaccttatttagatgatttccagaaaaagtggcaggaagaaatggaactctatagacagaaagtcgaacccctgagagccgaactgcaagagggcgccaggcagaaactacatgaactgcaagaaaagttgtcacccctgggtgaagagatgcgggacagggccagagcacacgtggatgcattacgcacgcacttagccccttatagtgacgaattaagacagcgactggccgcacggctcgaagcactgaaggaaaatggcggagctcgccttgcagaataccacgccaaggccactgagcatctctctaccctttccgaaaaggcaaagcctgccctggaggacttgaggcaaggattacttcccgtgttggagtcatttaaggtgtcttttctgtcggctctggaagagtacacaaaaaaactcaatacacag

SEQ ID NO: 6403 - DNA, 801 bp, synthetic construct
  misc_feature 1..801: note = source = /note="Description of Artificial Sequence: Synthetic coding sequence"
  source 1..801: mol_type = other DNA
atgaaggctgcagtgctgaccttggctgtgttgtttctaaccggttctcaagcacggcacttctggcagcaggatgaaccaccacagagcccgtgggaccgtgtgaaggatctggctactgtctacgtggatgtgctgaaggatagcgggagggattacgtgtctcagttcgagggcagcgccttgggaaagcagctcaaccttaaactactggacaactgggattctgtgacttcgacctttagtaaactccgtgagcagttgggccccgttacccaggagttctgggacaacttggaaaaggagacagagggactaagacaagagatgagtaaggatctagaggaagttaaggcaaaagtacagccatacctggatgactttcagaaaaagtggcaagaggaaatggaattgtacagacaaaaggtggagcccctaagagcagagctacaggaaggtgcccggcagaagctgcatgagctgcaggagaagctgtctcctttaggggaggaaatgcgggacagggcacgtgcccacgttgacgcactgaggacacatctcgcaccttatagtgacgagctgcggcagcgtctagccgcacggttagaagcgctcaaggagaatggaggcgccagactagccgagtaccatgctaaggctactgagcacctgagtaccctgtccgaaaaggcaaaacccgctctggaagatctgcgccaaggactgttgcccgttctggagagtttcaaggttagcttcttgtcagctcttgaggagtatacgaagaagttaaatacccag

SEQ ID NO: 6404 - DNA, 801 bp, synthetic construct
  misc_feature 1..801: note = source = /note="Description of Artificial Sequence: Synthetic coding sequence"
  source 1..801: mol_type = other DNA
atgaaggctgcggtgctgacattggctgtgctgttcctgacaggatcacaagccagacacttctggcagcaagatgagcctccacagagtccctgggaccgggtgaaggatcttgctacagtctatgtcgatgttctaaaagactccggccgcgactatgtctcccaattcgagggaagtgctctcggaaagcaattaaaccttaagctgttggacaactgggattcagtaacgagtacgttctccaaactgagggaacaactcggcccagtgacccaggagttttgggacaaccttgaaaaggagaccgagggacttcgccaggagatgtccaaagacctggaggaagtgaaagccaaagtgcagccttacctcgacgacttccagaagaagtggcaagaagagatggagctctaccgacaaaaggtagagcccttgcgagcagagttacaggaaggagcccggcagaagctgcacgagctgcaggaaaagttgagcccgctcggggaggagatgcgcgatcgggccagagcccacgttgatgccctgcggacgcatctcgccccttattcggatgagctgcggcagcgactggcagcccggcttgaggcactcaaagaaaacgggggggcacggctggcagagtaccatgccaaggccaccgaacatctctccaccctttctgagaaagccaaacccgccttagaggacctccggcaaggcctgttgcctgtgctggaaagtttcaaagtgagcttcttatcagctctcgaagagtacactaaaaagctgaatacacag

SEQ ID NO: 6405 - DNA, 801 bp, synthetic construct
  misc_feature 1..801: note = source = /note="Description of Artificial Sequence: Synthetic coding sequence"
  source 1..801: mol_type = other DNA
atgaaggctgcggtcctgacactcgccgtcctgtttttgactgggtcccaagccagacacttttggcagcaagatgagcctccacagtctccatgggaccgcgtaaaggatctagcgaccgtctatgtcgacgtgctcaaggactccggtcgcgattacgtatcacagttcgaaggcagcgccctggggaaacagctcaatctaaaactgctggataattgggatagcgttacatccaccttttcaaaactgcgtgaacagctgggtccagtgacccaagaattttgggacaatctagagaaagagactgagggactgagacaagaaatgagcaaagacctggaagaggtgaaagctaaagtgcagccctatttggacgatttccagaaaaagtggcaagaggagatggaactgtacaggcaaaaggtggaaccgctgcgcgccgagctccaagaaggagccaggcagaagctgcacgagcttcaagagaagctgtcacccctgggcgaagaaatgagggatcgggcacgtgctcatgtggatgcactcaggacccacctagccccttactccgatgaactccgccagcgccttgccgctcgactggaggcactgaaagaaaatgggggtgcacggcttgcagaataccatgccaaggcgactgaacacctctccactctgagcgaaaaggccaagcccgctctggaggatctgcgccagggactgttgccagttctagaatcattcaaggtttccttcctgagtgccctcgaagaatacacaaaaaaactgaacacacag

SEQ ID NO: 6406 - DNA, 801 bp, synthetic construct
  misc_feature 1..801: note = source = /note="Description of Artificial Sequence: Synthetic coding sequence"
  source 1..801: mol_type = other DNA
atgaaagcagccgtccttaccttggctgtcctttttcttaccggcagccaggcacgtcatttctggcaacaggatgagcctccacaatccccatgggatagagtgaaggatcttgccacggtgtacgtcgatgtcctcaaagatagtggaagggactacgtgtcacagttcgagggctcggccctgggtaaacaactgaatctgaagctgttggataactgggattcggtaactagcactttttcaaagctcagggaacagcttggcccggtcactcaagaattctgggacaacctggaaaaggaaactgagggcctcagacaagaaatgtccaaagatctggaagaagtgaaggcgaaggtccagccgtacctggacgactttcaaaagaagtggcaagaggaaatggagctctacagacaaaaggtggagccacttagggcggaactgcaggagggagccaggcaaaaactgcatgagctccaagagaaattgtcgcctctcggggaagaaatgagagatcgggcccgggctcacgtggacgcactgcgaactcatctggccccatattcggacgaactgcgtcaacgcctcgcagcgcgacttgaagcactgaaggagaacggcggggcgcggttggcagagtaccatgcaaaggctaccgaacacctgtcgacgctgtcggagaaggcaaagcctgcacttgaggatcttcggcagggactcttgccagtgctggaatcgtttaaggtgagcttcctgtccgcactggaagagtacaccaagaagttgaacactcaa

SEQ ID NO: 6407 - DNA, 801 bp, synthetic construct
  misc_feature 1..801: note = source = /note="Description of Artificial Sequence: Synthetic coding sequence"
  source 1..801: mol_type = other DNA
atgaaggctgccgtcctgaccctggccgtgctcttcttgacgggcagccaggcacgtcacttttggcagcaggacgaacctcctcagagtccctgggacagggttaaagatctggcgacagtgtatgtggatgtgctcaaagattcaggcagggattacgtaagccagtttgagggatccgccctcggcaaacagctgaatctgaaattactggacaattgggacagcgttacatctactttcagcaaacttagggagcaattgggaccagtcacacaggaattttgggacaatcttgagaaagaaactgagggcttgcgacaagaaatgtccaaagacctggaggaagtcaaggccaaagtgcagccatatctagatgactttcagaaaaaatggcaagaggagatggagctataccgtcagaaagtcgaaccacttagggcggaactgcaggaaggagccagacaaaagctgcatgagttgcaggagaagctgagcccactcggcgaagagatgagagaccgtgccagagctcatgtggatgcactgcgtacccatctggccccatacagtgatgaactgcggcaaagattggccgctagactggaagcattgaaagagaacgggggggcgaggttggcggagtaccatgccaaggctactgaacacttgtctacactgagcgaaaaggcaaaacctgcgctggaggatctccgtcaaggcctattgccagtgcttgagagcttcaaagtcagttttctttctgcactggaagagtataccaaaaaacttaatacccaa

SEQ ID NO: 6408 - DNA, 801 bp, synthetic construct
  misc_feature 1..801: note = source = /note="Description of Artificial Sequence: Synthetic coding sequence"
  source 1..801: mol_type = other DNA
atgaaagctgccgtattgaccctggccgtgcttttcttgaccggctcccaagctcgtcacttctggcagcaggacgagccgccccagtcaccatgggatagagtcaaggatctcgcaactgtgtacgtggatgttctgaaagattccgggcgcgattatgtcagtcagtttgaggggagcgcccttgggaagcagttgaacctgaaacttctcgataattgggatagcgtgacatctacattttccaagctacgcgagcagcttgggcctgtgacacaggagttttgggataacctggaaaaggagactgaaggtcttagacaggagatgtctaaagatcttgaggaggtgaaggctaaggtgcagccctacctagacgacttccaaaagaagtggcaggaggagatggagttgtatcgccaaaaagttgaaccattgagggcagagcttcaggaaggcgcacggcagaagctccacgagctccaagaaaagctgagcccccttggcgaagagatgcgggacagagcacgggcccatgtggatgcattgcggactcatctagctccctatagcgacgagctgcgccagcgcctagctgcgcgacttgaagctctaaaagagaacggaggggctagacttgctgagtaccacgctaaggctactgagcatctaagtacgctctcggaaaaagcaaagcccgccctagaggacctcagacagggcctgctccccgtcttggaatccttcaaggtgtcctttctttctgcacttgaggagtatacgaagaaacttaacacccag

SEQ ID NO: 6409 - DNA, 801 bp, synthetic construct
  misc_feature 1..801: note = source = /note="Description of Artificial Sequence: Synthetic coding sequence"
  source 1..801: mol_type = other DNA
atgaaggcagcagtcctgaccctcgcagtgctgtttcttaccggatcacaggcccgacatttctggcagcaggacgaaccaccacagtcgccctgggatcgggtcaaggaccttgcaaccgtgtacgtcgacgttctgaaagatagcggaagggattatgtgtcccagttcgaaggttccgccctcggcaagcaacttaatctcaagctgctcgataactgggattccgtgacgagcacctttagcaaactcagagagcagcttggtcctgtgactcaagaattctgggataacctggagaaagaaactgagggccttcgacaagaaatgtccaaagatctggaggaagtcaaagccaaggtgcagccttacctggacgattttcaaaagaagtggcaagaagaaatggaactttataggcagaaggtggaaccacttagagccgaattgcaagaaggtgcacgacaaaagctgcacgagcttcaagagaaattgtccccattgggtgaggaaatgagagacagggcgagggcacatgtcgatgcacttcgaacccaccttgcaccttactcggacgagctccgacagcggctcgcggcaagacttgaggcgctcaaggaaaatggaggggcgagacttgcagaataccacgccaaggcaactgaacatctgtcgacgctttcggaaaaagcaaagccagccctggaagatctgagacaaggactgttgccggtgttggagtccttcaaggtttcctttctctcggcccttgaggagtacaccaagaagctgaacacccaa

SEQ ID NO: 6410 - DNA, 801 bp, synthetic construct
  misc_feature 1..801: note = source = /note="Description of Artificial Sequence: Synthetic coding sequence"
  source 1..801: mol_type = other DNA
atgaaggccgcagtgttgaccctggcggtcctcttcctgaccggctcgcaagctcgccacttctggcaacaggatgaaccgccgcagtcgccatgggatcgcgtcaaggatcttgcgactgtgtacgtcgacgtgttgaaggactccggccgggactacgtctcgcagttcgagggatcggcgctgggcaagcaactgaaccttaaattgttggataattgggattcagtgacttcgaccttctccaaactccgcgagcaactcggccccgttactcaggagttttgggataacctcgagaaggagacggagggactgaggcaggaaatgtcaaaggaccttgaagaggtgaaagcaaaagtgcagccatatctcgacgatttccaaaagaagtggcaagaagagatggaactgtaccggcaaaaggtcgaaccgctgcgggccgagctccaagaaggagcccgccaaaagctgcacgaactgcaagagaagctgtcgcctctgggagaggaaatgcgcgaccgggccagagcccacgtggatgcgcttaggacccatctggccccgtactcggatgagctgagacagcggctcgctgcacggctcgaagcgcttaaggagaacggaggtgcccggctggctgaataccatgcgaaagctaccgaacatctctcgactctgagcgaaaaagccaaacctgccttggaggacctcaggcagggcctgctgccggtgctggagtcattcaaagtgagcttcctctcagccctggaggaatacactaagaagctgaacactcag

SEQ ID NO: 6411 - DNA, 801 bp, synthetic construct
  misc_feature 1..801: note = source = /note="Description of Artificial Sequence: Synthetic coding sequence"
  source 1..801: mol_type = other DNA
atgaaggcagccgtgctgactcttgcagtcctcttcttgaccgggtctcaggccaggcatttttggcagcaggatgagccaccacagtctccctgggacagagtgaaagatctggccaccgtgtatgttgatgttctcaaggacagcgggcgcgattacgtttcgcaattcgagggctcggctctaggaaaacagctaaatctgaagctgcttgacaactgggattctgtgactagcaccttcagcaagttacgcgaacagttgggcccggtgacacaagaattttgggacaatctggaaaaagagaccgaaggacttcgtcaggaaatgagtaaggatctagaggaagtgaaagctaaagtgcaaccctatctggatgactttcagaaaaagtggcaagaagaaatggagttatatcgtcaaaaggtagaacctctgagagctgaactgcaagagggagccaggcagaaacttcacgaactgcaagagaaactgagcccccttggggaggaaatgcgggacagagctagggctcacgtggatgctctcaggacccatctggctccttactccgacgaattgcggcagcgcttggcggccaggcttgaggccctgaaagagaacggtggcgccagactcgccgagtatcacgcaaaagctaccgagcacctgtccaccctgtcagagaaagctaagcctgcacttgaggacttgcgtcagggactgctaccggtcctggagagcttcaaggtgtctttcctatccgctttggaggaatataccaaaaaattgaacactcag

SEQ ID NO: 6412 - DNA, 801 bp, synthetic construct
  misc_feature 1..801: note = source = /note="Description of Artificial Sequence: Synthetic coding sequence"
  source 1..801: mol_type = other DNA
atgaaagcagcagtgctcacactagctgtactgtttcttaccggatcccaggcgcgacacttctggcagcaggatgaaccaccgcagagtccttgggatagagtcaaagatctggccacggtctacgttgacgtgttaaaggatagtggccgtgattacgtcagtcagtttgagggctcagcgctcggcaaacagctgaatctgaaactcctggacaactgggatagtgtgacctcgactttttccaaactgagggagcagctgggtcccgtgactcaggagttctgggacaatctggaaaaagagaccgaaggcctgcgccaggagatgtccaaagatctcgaagaagtgaaagctaaagtccagccatacttggatgatttccagaagaagtggcaggaggaaatggagctgtatcggcagaaggtggaaccactgcgcgccgagcttcaggaaggagcgcggcagaaactgcacgagcttcaggaaaagctgagtcctctcggggaggagatgcgagacagagcccgagcacatgtggatgcgcttagaactcacctcgccccttattccgacgaacttcgccagagattggccgcccgcctggaggcccttaaagaaaatgggggagcacgattagcggaatatcatgccaaggctactgagcatctttctacactctcggaaaaggccaagccagcccttgaggacctgcgtcagggcctcctcccagtgctggaatcttttaaggttagttttctcagtgccctggaggagtatacaaagaagcttaatacgcag

SEQ ID NO: 6413 - DNA, 801 bp, synthetic construct
  misc_feature 1..801: note = source = /note="Description of Artificial Sequence: Synthetic coding sequence"
  source 1..801: mol_type = other DNA
atgaaagcagcagtattaacgctggctgttctattcttgacaggatcacaagctcgccatttttggcagcaggacgaaccaccacaatctccttgggatcgagtgaaggacctcgcaacagtctatgttgatgttctgaaagactccggcagagattatgtctcccaattcgaaggctctgccctaggcaagcagctgaatttgaaactactggataattgggactcagttacatctacctttagcaaattacgcgaacaattagggccggttacgcaagaattttgggataatctggagaaagagaccgaagggctgagacaagaaatgtctaaagatttggaagaggtcaaggctaaggtccaaccgtacctcgacgactttcaaaagaaatggcaagaggaaatggagttgtatcgccagaaggttgaaccgctgagggccgaactgcaggagggcgcccgacagaaacttcacgaactgcaagaaaaattatcccctttaggcgaggaaatgcgcgaccgtgcacgggcgcatgtcgatgcactgaggacgcaccttgccccatactcggacgagctccgacagcgactggctgcgcggctggaagcgcttaaggaaaatggtggcgctcgcttagcggagtatcacgcgaaagctacggaacacttatctacattatccgaaaaagcaaaacccgcgttggaggacttgcgccaaggtctcctcccagtgttagaatctttcaaagtatctttcctgagcgcacttgaggaatatactaaaaagcttaatacacag

SEQ ID NO: 6414 - DNA, 801 bp, synthetic construct
  misc_feature 1..801: note = source = /note="Description of Artificial Sequence: Synthetic coding sequence"
  source 1..801: mol_type = other DNA
atgaaggcagctgtgctcactctggctgtgctcttcttgactggctctcaggcccgccacttctggcaacaggatgagcctccacagtccccctgggatcgtgtaaaggacctcgccacagtctacgtagacgtgctgaaggactctggccgcgactatgtgtcacagtttgaaggctctgctctcggtaagcagctgaacttgaaactcctggacaactgggatagcgtgacaagtacattctcaaagcttagagaacaactcggcccagtcactcaagagttttgggacaatcttgaaaaggagactgagggactgcgccaggagatgtccaaggatctggaggaggtgaaggcaaaggttcagccatacctggatgacttccaaaagaaatggcaggaggagatggaactgtacagacaaaaggtggagccattgcgcgctgagctgcaagagggagctcgccagaagctccatgagctccaggagaagctctctcccctgggtgaggagatgcgtgatcgcgcccgcgcccacgtggatgccttgagaacacatctggctccttactccgacgagcttagacagagactggcagctcgtctggaggcactgaaggagaatggcggagccagactcgctgagtatcatgccaaagccactgagcacctctctactcttagcgagaaggccaaaccagctcttgaagacttgaggcagggcctgctgccagtcctggaatcttttaaggtgagctttctctcagccctggaagagtacacaaagaaactgaacacacag

SEQ ID NO: 6415 - DNA, 801 bp, synthetic construct
  misc_feature 1..801: note = source = /note="Description of Artificial Sequence: Synthetic coding sequence"
  source 1..801: mol_type = other DNA
atgaaggcagcggtgttgaccctcgctgtactcttcctgacagggtctcaggcgagacatttctggcagcaggatgagcctccacagtctccttgggatcgagtgaaggacttggccaccgtctacgtggacgtgttgaaggatagcggtcgagattatgtgagtcagtttgagggaagtgccctcggcaaacagctgaatctgaagctgcttgacaattgggattctgtcacttctacgttcagcaaattgagggaacaactcgggcctgtcacccaagagttttgggataatctggagaaggagaccgaagggctcaggcaggaaatgtcaaaagacctggaagaggtcaaagctaaggtgcaaccctaccttgatgactttcagaaaaagtggcaggaagaaatggagctgtaccgtcagaaggtagagccactgcgcgctgaactgcaggagggagccagacagaaactgcacgaattgcaggagaagctgtctccactaggcgaggagatgagagaccgcgcccgagcgcatgtggacgccctgaggacacatcttgccccctattcagacgagctgaggcaacggctggctgctcggctggaagcgctgaaggagaatggtggtgcccgactggctgagtaccatgctaaggcgacagaacatctatctacactctctgaaaaggccaaaccggcacttgaagacctcaggcaagggctgctccccgtgctggagtctttcaaagtcagcttcctctccgcactcgaggagtataccaagaagctgaatactcaa

SEQ ID NO: 6416 - DNA, 801 bp, synthetic construct
  misc_feature 1..801: note = source = /note="Description of Artificial Sequence: Synthetic coding sequence"
  source 1..801: mol_type = other DNA
atgaaggcagccgtgcttactctggcagtcctttttctgacggggtcccaagcgcggcacttttggcaacaagacgaaccgccccaatccccttgggatagagtgaaggaccttgccactgtgtacgtggacgtgttgaaggatagcggccgtgattacgtgtcccaattcgagggatccgcacttgggaagcaactgaatcttaaacttctggacaactgggattcggtgacgtccacgtttagcaagctgcgcgagcaactgggtcctgtgacccaggaattttgggataacctggagaaggaaaccgaaggactccggcaagaaatgtccaaggatctggaagaagtcaaggccaaggtgcagccttaccttgatgatttccagaagaagtggcaggaggagatggaactttacaggcagaaggtggaaccacttagagcagaactccaagaaggagccagacagaaactccatgaactccaggagaagttgtcaccgctcggagaggaaatgagggatcgcgcccgcgcacatgtcgatgcattgcgcactcatctcgcaccatacagcgacgaactcagacagcggctcgcagcaagactggaagcactgaaagaaaacgggggagcaagacttgccgaataccatgccaaagcgaccgaacacctctcgactctttccgaaaaagcaaaacctgcactggaggacctccggcaagggctgcttcccgtgcttgaatcatttaaggtcagctttctttccgcactcgaggaatacactaaaaagctgaacactcag

SEQ ID NO: 6417 - DNA, 801 bp, synthetic construct
  misc_feature 1..801: note = source = /note="Description of Artificial Sequence: Synthetic coding sequence"
  source 1..801: mol_type = other DNA
atgaaggccgcggtgttgaccctggctgtgctcttccttactggaagccaggcccgccacttttggcagcaagatgaaccaccgcagtctccatgggatcgggttaaggacctggctacggtgtacgtggatgtgttgaaggactcaggccgcgattacgtgtcacaattcgaaggaagcgccctcggaaagcagctgaacctgaagctgttggataactgggactccgtgacgtctaccttcagcaaacttcgcgaacaactgggaccagtaacccaggaattctgggacaacctcgagaaggagactgagggactgcggcaggagatgagtaaggacctggaggaagtcaaggccaaggtccagccctaccttgacgacttccagaaaaagtggcaagaagaaatggaactgtataggcaaaaagtggaaccgctgcgggcggagctccaagaaggcgcccgacagaaattgcacgaactgcaagagaaactgtcgcctctcggggaagagatgcgtgaccgggccagagcacacgtcgacgccctcagaacccatctcgcaccctactccgacgagctcaggcagcgcctcgctgctagattggaagccctgaaagagaatggaggggcacggctggcggaataccacgccaaggcaactgagcacctgagcactctgtccgagaaggcaaaaccggccctggaagatcttaggcaaggccttctgccggtgctggagtcgttcaaggtgtcgttcttgtcggcgctggaagaatataccaagaaactgaatactcag

SEQ ID NO: 6418 - DNA, 801 bp, synthetic construct
  misc_feature 1..801: note = source = /note="Description of Artificial Sequence: Synthetic coding sequence"
  source 1..801: mol_type = other DNA
atgaaggctgccgtgctgacactcgcagttctgtttctgactggatcacaagcccggcacttttggcaacaggacgagccaccacaatcaccttgggaccgggttaaagatctggccacagtttacgtggacgtgctgaaggacagcggacgggattatgtgtcacaattcgagggctctgcgctcgggaaacagctgaatcttaagcttctcgacaactgggacagcgttaccagcaccttctcgaagctgcgcgaacagcttggcccagtgacccaggagttctgggacaacttagaaaaggagaccgaggggctacggcaggagatgtccaaggatctcgaagaggtgaaagcaaaggtgcaaccgtacctggacgactttcaaaaaaaatggcaggaggagatggagctgtacaggcagaaggtggagcccttgcgggccgagctgcaagaaggggcccgacaaaaactccacgagctgcaagaaaaattgagccctctcggggaagaaatgcgcgaccgggcacgggctcacgtggacgccctccgaacgcacttggccccctattccgatgagcttcggcagagactggccgcccgcctggaggccctgaaagaaaatggcggtgctaggctagcagagtatcatgcaaaggcaactgagcatctgtccaccttaagcgaaaaagcaaagcccgctctggaggacctccgccagggcctgctgcctgtgttagaaagcttcaaagtaagtttcctaagtgctctggaagagtacacgaaaaaactgaatacccag

SEQ ID NO: 6419 - DNA, 801 bp, synthetic construct
  misc_feature 1..801: note = source = /note="Description of Artificial Sequence: Synthetic coding sequence"
  source 1..801: mol_type = other DNA
atgaaagccgcagttctgactctggcagtgctctttctgactggctctcaggcccggcacttttggcaacaggacgaacctccccagagtccttgggaccgggtgaaagaccttgctacggtgtatgtggatgtcttgaaagatagcggaagggattatgtgtcccagttcgaggggtcagctctcggaaagcagctgaatctgaagctcttagacaactgggatagcgtaacaagtacgttctccaaattgcgcgaacagctgggcccagtgacacaggagttttgggacaacttggagaaagaaactgagggtctcaggcaggaaatgagcaaagacctggaggaggtgaaggccaaagtgcagccctacttagatgactttcagaaaaaatggcaagaagaaatggagctctaccgccagaaggtggagccccttcgggctgagcttcaggagggggcgcggcagaagctgcacgaactccaggaaaagctctccccactgggggaagagatgcgtgacagggcgcgggcccacgtggacgcacttaggacccacctggctccctatagcgatgagctgcgccagagactcgcagcccggctcgaggcactcaaggaaaacggaggcgcaaggctcgccgaatatcacgccaaagccaccgaacacctgagtactctgagtgagaaagcgaaaccagcactcgaggacctccgccaaggcctgctgcccgtcctggagtcgtttaaggtatcattcctgtccgctctcgaagaatacactaagaagctcaacacccag

SEQ ID NO: 6420 - DNA, 801 bp, synthetic construct
  misc_feature 1..801: note = source = /note="Description of Artificial Sequence: Synthetic coding sequence"
  source 1..801: mol_type = other DNA
atgaaggccgcggtccttaccctggcagtcctctttctcacggggtcccaggccaggcatttttggcagcaagatgagcccccgcaatcgccatgggaccgcgtgaaggatcttgcaaccgtgtacgtggatgtgctcaaagacagcggtcgggactacgtgtctcagtttgagggatctgcgctgggcaagcaactgaatcttaaacttcttgataactgggacagcgtgacctccaccttctcgaaactgcgtgaacaactgggacctgtgactcaagagttttgggataaccttgagaaggagactgaaggactccgtcaggagatgagcaaagatcttgaagaagtcaaggcaaaggtccaaccatacctggatgatttccagaagaagtggcaggaagagatggaactgtaccggcaaaaggtggaaccacttcgagctgaacttcaggagggtgcaagacagaagctccacgagttgcaggagaagctgtcgcctcttggagaggaaatgcgagacagggcgcgggcccatgtagacgcactgcggacccacctggcaccctactctgatgagcttagacaacgccttgcggcccggctggaagcacttaaagagaatggcggtgcccgcctggccgaataccatgctaaagctaccgaacatctgtccaccctgtcagagaaagccaagcctgccttggaagatctgcggcaaggtcttttgcctgtgctcgagagcttcaaggtgtcgtttctgtcagctttggaagaatacaccaaaaagctgaacactcaa

SEQ ID NO: 6421 - DNA, 801 bp, synthetic construct
  misc_feature 1..801: note = source = /note="Description of Artificial Sequence: Synthetic coding sequence"
  source 1..801: mol_type = other DNA
atgaaagccgccgtgcttacattggccgttttgtttcttaccggatctcaggctagacacttctggcagcaggacgaacctccccagagcccctgggaccgagtgaaggacttggccactgtctacgtagatgtgcttaaagactccgggcgcgactacgtgtcccagttcgaaggcagtgccctggggaagcagctcaatctaaagctgttggacaattgggatagtgtgacatctacattttcaaaactccgtgaacagttagggccagtgactcaggaattctgggacaatttagagaaggagaccgaggggctgcgccaggaaatgtccaaggacctggaggaggtgaaagctaaagtgcagccctaccttgacgatttccagaaaaaatggcaggaggaaatggaactgtacagacagaaggtggaacccctgcgcgcagaactgcaggagggtgccaggcagaaactacacgagctccaggaaaaactctctccactcggggaggagatgcgcgacagggcccgggcccatgtggacgccttgcgaactcacctggccccttacagcgacgaactgaggcagaggcttgcggcccgtttggaggccctgaaggaaaacggcggagcgaggctagctgagtatcatgccaaggccaccgagcacctctccacccttagtgaaaaggcaaagcccgcactcgaagacctgcgacagggtttgctccccgtactggagagcttcaaggtgtcattcttgtccgcactagaggaatacaccaagaagctcaacacacag

SEQ ID NO: 6422 - DNA, 801 bp, synthetic construct
  misc_feature 1..801: note = source = /note="Description of Artificial Sequence: Synthetic coding sequence"
  source 1..801: mol_type = other DNA
atgaaagccgcggtgctgaccctcgcagtactgttccttactggatcccaagccagacacttttggcaacaggatgagccgccgcaaagcccatgggacagagtcaaggatctggctaccgtctacgtggacgtgctgaaagactcgggacgcgattacgtgtcgcaattcgaagggtcggctttgggaaaacagctcaatctgaagctgctggacaattgggacagcgtgacgtcgaccttttcgaagctgagagaacaactcggaccggtgactcaggagttctgggacaacctggagaaggaaactgaaggattgaggcaagaaatgtctaaagacttggaagaggtcaaggccaaggttcagccatacttggacgattttcagaagaagtggcaagaggagatggagctttaccgtcagaaggtggaacccctcagggcagaactccaggaaggtgcgcgccagaaactccacgaactgcaggaaaagctgagcccgctgggagaagaaatgcgcgacagagcacgggcccacgtcgatgccctgagaacgcacctcgcaccatactcggacgaattgaggcaacgccttgccgctcggctcgaggcgctgaaggaaaacggaggagcaaggctggccgaataccacgcaaaggcgactgaacacctgtcgaccctttccgaaaaagctaaacctgccctcgaagatctccggcaaggcctgctgcccgtgctcgaatccttcaaagtctcatttctgagcgctctcgaggagtacacgaagaagctcaacactcag

SEQ ID NO: 6423 - DNA, 801 bp, synthetic construct
  misc_feature 1..801: note = source = /note="Description of Artificial Sequence: Synthetic coding sequence"
  source 1..801: mol_type = other DNA
atgaaggcagcggtcctcacgcttgctgttcttttcttgaccgggagccaagcgcgccacttttggcaacaagacgaaccaccccagagcccgtgggaccgcgtcaaggatttggcaaccgtctacgtggatgtgctgaaggacagcgggcgcgattacgtgagccagttcgaaggaagcgccttggggaagcaactcaatctcaagctgctggataactgggactcggtcacctccaccttcagtaaactgagagaacagctgggccccgtgactcaagagttctgggacaacctggagaaagagactgaaggcctgcggcaggaaatgtcaaaggacctggaggaggtgaaggccaaagtgcagccttaccttgacgacttccagaaaaagtggcaggaagaaatggagctctatcggcagaaggtggagcctctgagagccgaactgcaagagggagcgcggcagaagctgcacgaactgcaggaaaagctgtcaccactgggggaggagatgagagatcgggctcgcgcgcacgtcgatgccttgcggactcatctcgcaccatactcggacgaactgcggcaacgccttgccgcaaggctggaggctcttaaggaaaacggtggagcacggctcgccgaataccatgcaaaggccacggaacacctctcaaccctgtccgaaaaggccaaaccagccctggaagatctccggcagggacttctcccagtcctcgagagcttcaaagtctcctttctcagcgcactggaagagtataccaaaaaacttaatactcaa

SEQ ID NO: 6424 - DNA, 801 bp, synthetic construct
  misc_feature 1..801: note = source = /note="Description of Artificial Sequence: Synthetic coding sequence"
  source 1..801: mol_type = other DNA
atgaaggcagccgttttgacgctagcggtcctgttcctcacgggctcgcaggcccgacatttctggcaacaggacgaaccgccccagtccccctgggaccgggtcaaggatctcgctacagtttatgtggatgtccttaaagactccggtcgggactacgtcagccaatttgagggctcagctttgggaaaacagctgaatctaaagctgctggataactgggactcggtgacgtctaccttctcgaagctgcgcgagcaactcggtccagtgacccaggagttctgggacaacctcgaaaaggagacggaaggtctgcgccaagagatgtcgaaggatcttgaagaggtcaaggcaaaggtccagccatacttggatgacttccagaagaaatggcaggaggagatggaactttaccgccagaaagtggagccactgcgcgccgagcttcaggagggggccaggcaaaaactgcatgagctgcaagagaaactgagcccactgggtgaagaaatgcgcgatcgcgcccgcgcacacgtagatgcactaaggacacatttggccccctacagtgacgagctacgccaaaggcttgccgctcggctcgaagcgctgaaggagaacggaggtgctcgcctcgccgaatatcatgctaaggctaccgagcacctgagtaccctgagtgaaaaggctaagccggccctggaagatctgcgtcagggcttgctgccggtactggagtcgttcaaggtgtcgtttctgtccgcgctggaggagtacactaaaaagctaaatactcag

SEQ ID NO: 6425 - DNA, 801 bp, synthetic construct
  misc_feature 1..801: note = source = /note="Description of Artificial Sequence: Synthetic coding sequence"
  source 1..801: mol_type = other DNA
atgaaggcagcagtcctcactcttgcggtgctcttcctcaccggcagtcaggcacggcatttctggcagcaagacgagcccccgcagtccccatgggaccgagtcaaggatctcgccaccgtgtacgtcgatgtattaaaagattcagggcgggattacgtgtctcaattcgagggctcagccctcgggaagcagcttaacctaaagctgctagacaactgggattcagtcacgtctactttctccaagctccgagagcagctggggccggtaacccaggagttttgggataacctggaaaaagaaacagaagggttgagacaggagatgtccaaagatctcgaagaagtcaaggctaaggtacaaccttacctggacgatttccagaagaagtggcaagaagagatggaactctacaggcagaaagtcgagcccttgcgcgccgagttgcaggagggagctcgccagaagttgcacgagttacaggaaaagctgtcgccgcttggcgaggagatgcgggatagagctagagcccacgtagatgcactgagaacacatctggctccttattccgatgagctccgacagaggctggcagcgcggttagaggcacttaaggaaaacggaggcgcaaggctggcagagtatcacgccaaggcaaccgagcacctcagcaccctgtccgaaaaagctaaaccagccttggaggaccttcgccaagggttgttgcctgtcctcgagagctttaaggtgtcattcctgagcgccttggaggaatacaccaagaaactgaacactcaa

SEQ ID NO: 6426 - DNA, 801 bp, synthetic construct
  misc_feature 1..801: note = source = /note="Description of Artificial Sequence: Synthetic coding sequence"
  source 1..801: mol_type = other DNA
atgaaagcagctgttttaacacttgcagttttgtttcttacaggatctcaagctagacatttttggcaacaagatgaaccaccacaatcaccatgggacagagtaaaagatcttgcaactgtttatgttgacgtattaaaggattcaggaagagattatgtttctcaatttgaaggttctgcacttggaaaacaattaaatcttaaactactcgataattgggattcagttacatcaacattttcaaaattacgtgaacaattaggaccagttactcaagaattttgggataatttggaaaaagaaacagaaggattgagacaagagatgtcaaaagacttggaagaagtaaaagctaaagtacaaccatatttagatgatttccaaaaaaaatggcaggaagaaatggaattatatagacaaaaagttgaacctttaagagcagaacttcaagaaggagctcgtcaaaaacttcacgaattacaagaaaaactttcaccattaggggaagaaatgagagatagagcaagagcacatgttgacgcattaagaactcatttagcaccatattctgatgaacttcgtcaacgtttggcagcaagattagaggcattaaaagaaaacggaggagcaagattagctgaatatcacgctaaagcaacagagcacttatcaactttaagtgaaaaggcaaagccagcattagaagaccttagacaaggattattaccagttttagaatcttttaaggtttcatttctttcagcattagaagaatacactaagaaattaaatactcaa

SEQ ID NO: 6427 - DNA, 801 bp, synthetic construct
  misc_feature 1..801: note = source = /note="Description of Artificial Sequence: Synthetic coding sequence"
  source 1..801: mol_type = other DNA
atgaaagcggccgtgctcactctcgcagtgctgttcttgaccggaagtcaagcccgccacttttggcagcaagatgaacccccgcagtccccttgggacagagttaaggacctcgccacagtttatgtagacgtgctcaaggactccggtcgggactacgtgtcgcagttcgaagggagtgctctggggaagcagctcaacctgaagcttttagataattgggactccgtgaccagcacattcagtaaactgagagagcaactggggcctgtcacccaggagttttgggacaatcttgaaaaggaaacagaagggctccgacaggaaatgtctaaggacctggaggaggtgaaagctaaggtgcaaccttatctggatgactttcagaagaagtggcaggaggaaatggagctctataggcagaaagtggaacccctgagggccgaactccaggagggagcaagacaaaagttacatgagctgcaggaaaaactgagccctctaggagaggaaatgagggatcgagcaagagcacatgtggacgcactgagaacccacctggccccatactctgatgaactgcggcagcgtctggcagcaagattagaagcacttaaggaaaacgggggagctaggttggcagagtatcacgccaaggccacagaacatctgtccacactgtccgagaaggccaaaccagccttggaggacttgcgacaaggtctgttgcccgtgttagagagtttcaaggtctcttttctgtcagccctcgaagaatacaccaagaagctgaatactcaa

SEQ ID NO: 6428 - DNA, 801 bp, synthetic construct
  misc_feature 1..801: note = source = /note="Description of Artificial Sequence: Synthetic coding sequence"
  source 1..801: mol_type = other DNA
atgaaggccgccgtgttaaccctggccgtgctcttcttaacaggatctcaggcgcgtcacttctggcagcaggatgagccacctcaaagtccatgggatagggtgaaggacttggctactgtctatgtggacgtgctgaaggactccggcagagattacgtgtcccagtttgaggggagcgccttgggaaaacagttgaacttgaagctgcttgacaactgggacagtgttacttcgacattcagcaagctccgcgaacaattaggacctgtcacccaggaattttgggataatctcgagaaggaaactgagggactaagacaggaaatgtccaaagatcttgaagaagtaaaggccaaagtccagccatacctggatgattttcagaagaaatggcaggaggaaatggagctgtatcgccagaaagtggaacccctccgagcggaactgcaggagggcgcgcggcagaaattgcatgagctgcaagagaagttgagtccgctgggggaagaaatgcgggacagagccagggcccatgtcgatgccctcagaacacatttggcaccatattcagacgaactacgccagcgactcgccgctagactggaggctctgaaggagaatggcggcgcccgtttggcagagtatcacgctaaagccaccgagcacttgtctacgttgagtgagaaggcgaaacctgcccttgaggacctgagacagggattactgcctgtgttggagagcttcaaagtttcatttctttcagccctcgaggagtatacgaagaaactgaacacgcaa

SEQ ID NO: 6429 - DNA, 801 bp, synthetic construct
  misc_feature 1..801: note = source = /note="Description of Artificial Sequence: Synthetic coding sequence"
  source 1..801: mol_type = other DNA
atgaaagccgccgtgctgactctggcagttctctttctgactgggtcccaggctcgacacttctggcagcaggacgaaccccctcagtccccatgggaccgggtgaaagatctggcaacagtgtatgtggatgtcctcaaggactccgggcgggattatgtgagtcagttcgaggggtctgctctagggaagcagctcaatttaaaactactggataattgggatagtgtcacatcaacattttccaaactccgagagcaactcgggcctgtgactcaggaattctgggacaatctcgaaaaagagacagaggggcttcgacaggagatgtctaaagatcttgaggaagtgaaagccaaagtgcagccttatttagatgattttcagaaaaaatggcaggaggagatggaactctataggcagaaagtcgagccacttagggccgaactccaggaaggagcccggcagaagttgcacgaactccaggaaaaactctcgcctctcggggaagaaatgcgggaccgcgcccgcgctcacgtcgatgcccttagaacacatctcgcaccttacagtgatgaactaaggcagcggctcgctgcaagactggaagcactgaaagaaaacggaggagctcggttggctgaatatcacgccaaagctactgaacatctgtctactctttcagaaaaggctaaaccagcactggaagatcttcggcaggggctacttccagtgttagagtcttttaaagtgtcatttttgtccgcccttgaggaatatacaaaaaaacttaatacacag

SEQ ID NO: 6430 - DNA, 801 bp, synthetic construct
  misc_feature 1..801: note = source = /note="Description of Artificial Sequence: Synthetic coding sequence"
  source 1..801: mol_type = other DNA
atgaaggccgcggtgctcaccctggccgtgctgtttctgactggttcccaagcgcgacacttttggcagcaggatgagccgccgcaatccccgtgggaccgcgtcaaggatttggcaactgtctacgtggatgtgctgaaggactcagggcgcgactacgtgtctcaattcgagggctccgccctcggcaaacaactgaacctcaagttgctcgataactgggacagcgtgacctcgacgttctccaagctgcgggaacaattgggtcctgtgacccaggaattttgggataaccttgagaaagaaaccgaaggcctgagacaggaaatgtcaaaggacttggaagaggttaaagcgaaggtgcaaccgtacctcgatgatttccaaaagaagtggcaggaagagatggaactctataggcagaaagtggagcccctccgcgccgaattgcaagaaggagcaagacagaaactgcacgagctgcaggaaaaactctcgccccttggggaggagatgcgcgaccgcgctcgggcgcacgtcgacgcgctgcggacgcatctcgcgccttacagcgacgaacttcgccagagactcgctgccagactcgaggcactgaaggaaaatggaggtgctaggctggccgaataccatgctaaggctactgaacatctgtccaccctctcggaaaaggctaagccggccctcgaggatctccgccagggcctccttccagttcttgagtcgttcaaagtgtccttcctctccgcgctggaagagtacactaagaaactgaatacccag

SEQ ID NO: 6431 - DNA, 801 bp, synthetic construct
  misc_feature 1..801: note = source = /note="Description of Artificial Sequence: Synthetic coding sequence"
  source 1..801: mol_type = other DNA
atgaaggcagcagtgctcacgctggcagtgctgtttctgactggttcgcaagcacgacatttttggcagcaggacgagcctccacaatcaccctgggacagggtgaaggatctcgcaaccgtctacgtcgatgtgctcaaggactccggacgcgattatgttagccaatttgaggggtctgcactcggaaagcagctgaacctgaaattgctggataattgggattccgtgacttcaactttttccaagttgagggagcagctgggccctgtgactcaggaattctgggacaaccttgagaaggaaacggaggggctcagacaggaaatgtcgaaggatcttgaggaagttaaggccaaagtgcagccgtacctggatgattttcaaaagaaatggcaggaagagatggaactttacagacagaaagtggaacctcttcgtgcagaactccaagagggagcgcgtcaaaagctgcacgaacttcaggaaaagctgtccccgcttggagaagaaatgcgcgacagagcacgggctcacgtggatgcgcttcgaacccatctcgcgccatactcggacgaactcagacagcgactggctgcgaggttggaagccctgaaggaaaacggcggcgcgaggcttgccgaataccatgcaaaggcaactgaacatctttcaactttgtccgagaaggcaaagcctgcgctggaagatctgaggcagggactgctgccagtgctcgaaagtttcaaagtgtcgtttctctccgcacttgaggaatacactaagaagttgaatactcag

SEQ ID NO: 6432 - DNA, 801 bp, synthetic construct
  misc_feature 1..801: note = source = /note="Description of Artificial Sequence: Synthetic coding sequence"
  source 1..801: mol_type = other DNA
atgaaggcggcagtgttgaccctcgcggtcctgtttctgacgggctcgcaggcccggcacttctggcagcaagatgagccaccgcaatccccctgggatcgagtgaaggatctggcgactgtgtacgtagacgtcttgaaggactcgggccgcgattatgtgtctcagttcgagggttccgcgctcggtaagcagctgaacctgaaattactggataactgggatagcgttacgtccacgttctccaagctgcgcgagcaattgggcccggtcacgcaggaattctgggacaacctcgaaaaggagaccgagggtctgaggcaagagatgagcaaggacctggaggaggtgaaagcaaaggtgcagccatatttggatgactttcagaaaaaatggcaggaagaaatggaactgtatcggcaaaaagtggagcctctacgcgcagagctgcaagaaggtgccaggcaaaagctgcatgaactgcaggagaaactgagcccgctgggggaggagatgcgcgatcgggcccgcgcccacgtcgacgccttgagaacccacctggccccttacagcgatgagcttcgccaaagattagccgcccgcctggaagcgcttaaggaaaatgggggtgctcgcctagcggagtatcatgcaaaagccactgagcatctgagcacgttgagcgaaaaggcaaagcccgctcttgaggatctgcgccaaggcctgctgccggtacttgagagctttaaagtgtcatttttgtcagccttggaggagtataccaagaagcttaacacccag

SEQ ID NO: 6433 - DNA, 801 bp, synthetic construct
  misc_feature 1..801: note = source = /note="Description of Artificial Sequence: Synthetic coding sequence"
  source 1..801: mol_type = other DNA
atgaaagcggctgtccttaccctggcagtgttgtttcttacgggcagtcaagcacggcatttctggcagcaggatgagcctcctcaatcaccctgggacagggtgaaagacctggctacagtttacgtagatgttcttaaggattctggaagggattacgtgtctcaatttgagggatctgccctcggaaagcaacttaatcttaagctgttggataactgggacagcgttactagcacatttagcaagctccgggaacagcttggccccgtcacacaggagttttgggacaacttagaaaaggagacagagggcctgagacaagaaatgtccaaagaccttgaagaagttaaagcaaaggtccagccctaccttgatgacttccagaaaaagtggcaagaagaaatggaactctacaggcagaaggtggaaccccttagggcagaactgcaagagggagcgcgccagaaactgcatgaactgcaggaaaaactgagtcccctgggggaggaaatgagagacagagcgagagctcacgttgacgctcttaggactcacctcgcaccatacagcgatgagcttcgtcaacgtttggctgcgcggctggaggctcttaaggaaaacgggggagctcgcttggccgagtatcatgcgaaagccaccgagcatctttcaacactcagcgaaaaggccaaacctgcccttgaggacctgaggcaggggcttctgcctgtgctggagagctttaaggtgagcttcctgagcgctttggaagagtatacaaagaaactcaacacccaa

SEQ ID NO: 6434 - DNA, 801 bp, synthetic construct
  misc_feature 1..801: note = source = /note="Description of Artificial Sequence: Synthetic coding sequence"
  source 1..801: mol_type = other DNA
atgaaagccgcagtgctgaccctggctgtactgtttctgacgggctctcaggcccgtcacttttggcagcaggacgagcctcctcagagcccctgggacagggtgaaagacctggccacggtgtacgtcgacgtcctgaaagattccggtagggactacgtgagccaatttgaggggtccgccctgggaaagcagctgaatctgaagctgctggataactgggactctgtcacaagcactttcagtaagctcagagagcagctggggcctgtcactcaagagttctgggacaatctggagaaggaaacagaggggctgcggcaggagatgtccaaggatctggaagaggtcaaagccaaggtgcaaccatacttagacgactttcaaaagaagtggcaggaagaaatggagctgtaccgccagaaggttgaacctctgagggcggagctgcaggaaggagcaagacagaagttacatgagttgcaggagaaactgagtccactcggcgaagaaatgcgagatagggcccgcgcacacgtggacgccctacggacgcacctcgctccatattctgacgaactccggcagcgcctcgccgctcgcctggaagccctgaaagagaacgggggagccagactcgctgagtaccatgctaaggccaccgagcatctctctacgctgagcgagaaggctaagccggctttggaggatctgcgtcagggcctgctccctgtgctggagtctttcaaagtgtctttcctgtccgcactggaagaatatactaaaaaactcaacacccag

SEQ ID NO: 6435 - DNA, 801 bp, synthetic construct
  misc_feature 1..801: note = source = /note="Description of Artificial Sequence: Synthetic coding sequence"
  source 1..801: mol_type = other DNA
atgaaggctgctgtccttactttggcggtcctcttcttgaccggctcacaagcaagacacttttggcagcaggatgagcctccacagtccccatgggaccgcgtgaaggaccttgccaccgtgtatgtggacgtgctcaaagattccgggcgagattatgtcagccaatttgagggatcggcactgggcaaacaacttaacctgaagctgctggacaactgggattccgtgacctccacgttttccaaacttagagagcagcttggtcctgtgactcaggagttctgggataaccttgagaaggaaaccgaaggtctgcgacaggagatgagtaaagaccttgaggaagtgaaggctaaggtgcaaccttaccttgatgactttcagaagaaatggcaggaagaaatggaactttaccgtcagaaggtcgaaccactgagggccgaacttcaggaaggagcaagacaaaagctgcatgaactgcaagagaagttgtcccccctgggagaggaaatgcgtgatagagcgcgagcacatgtcgatgcactcagaacccatcttgccccatacagcgacgaactgagacaaaggctggcggcacgattggaagcccttaaggaaaacggaggagcgagactggcagaataccacgccaaggccacggaacatttgagcactctgtcagaaaaggcgaagcccgcactcgaagatctgcggcaaggtctgcttcctgtcctggaatcgtttaaggtgtcatttctttcggcactggaagaatacacgaagaaacttaatacgcaa

SEQ ID NO: 6436 - DNA, 801 bp, synthetic construct
  misc_feature 1..801: note = source = /note="Description of Artificial Sequence: Synthetic coding sequence"
  source 1..801: mol_type = other DNA
atgaaggctgcggtgctcaccctcgcggtgctgttcctcactggctcacaagcacgccacttttggcagcaggacgagcctccccagtccccgtgggaccgcgtgaaggacctcgctactgtatacgtggatgtgctgaaggattccgggcgcgattacgtgtcgcagttcgaaggctccgccctgggcaagcaacttaacctcaagttgttggacaactgggattcggtgaccagcaccttctcaaagttgcgcgagcaactgggcccggtcacgcaagagttttgggacaatctcgagaaagaaaccgagggactgcggcaagaaatgagcaaggatctcgaggaagtgaaggcgaaggtgcaaccatacctcgatgacttccagaaaaagtggcaagaggaaatggaactgtacagacagaaggttgaaccactccgcgcagagcttcaggaaggagcgcgccagaaacttcatgagctccaggaaaaactgtcgcctttgggagaagaaatgcgcgacagagcccgcgcccatgtggacgcactgcgaacgcacctggcgccttattcggatgaactccggcagcgccttgcagcccggctggaggctctgaaggaaaatggcggcgcccggttggcggaataccacgcgaaggcgaccgaacacctgagcacccttagcgagaaggctaagccggccctcgaggaccttcgccaaggtctgctgccggtcctggaatcgttcaaggtgtccttcctgtcagcgctggaggagtacacgaagaaattgaacactcaa

SEQ ID NO: 6437 - DNA, 801 bp, synthetic construct
  misc_feature 1..801: note = source = /note="Description of Artificial Sequence: Synthetic coding sequence"
  source 1..801: mol_type = other DNA
atgaaggcggcggtcctcaccctggcggtgctctttctgacgggatcgcaagcgcgccacttctggcagcaggacgaaccgccgcaaagcccgtgggaccgcgtcaaggacctggctactgtatacgtggacgtgctgaaagattcgggaagagactatgtgagccaattcgaaggttccgcgctcggtaagcaactgaacttgaagctcttggataattgggactcggtgacctcaactttcagcaagctccgtgaacagctgggccccgtcactcaggaattctgggacaatttggaaaaggaaaccgaaggactccggcaggaaatgtcgaaagatttggaagaggtgaaggccaaggtgcagccgtacctggatgatttccaaaagaagtggcaggaagagatggaactgtaccggcaaaaggtcgagcctctgcgggcggaattgcaggaaggcgcgcggcagaaactgcacgagctccaggaaaagctgtctccactcggtgaggagatgcgcgaccgggccagggctcacgtggacgcgctgcgcactcatcttgcaccgtactccgatgagctgagacaacgtctggccgcccgcctcgaggctctgaaggagaatggtggcgcgagactcgcagaataccatgcaaaggccaccgaacatctgtccactctttccgaaaaggctaaaccagctctggaggacctgagacaggggctcctgccagtgttggagtcattcaaggtttcgtttttgtccgccctcgaagagtacaccaaaaaactgaacacccag

SEQ ID NO: 6438 - DNA, 801 bp, synthetic construct
  misc_feature 1..801: note = source = /note="Description of Artificial Sequence: Synthetic coding sequence"
  source 1..801: mol_type = other DNA
atgaaggcggcggtgctgactttggccgttctgtttctgactggtagccaggcacgacacttctggcaacaggacgagccgccacagagcccatgggaccgcgtgaaggatttggcaacagtgtacgtcgatgtgctcaaagattctggcagggactacgtctcccagttcgagggctccgccctgggaaaacagctgaatctgaaactcctggataactgggacagcgtaacttcaacattcagcaagcttcgcgagcagctcgggccagtcactcaggagttctgggataacctggagaaggaaaccgagggtctgagacaggagatgtccaaggaccttgaggaagtcaaggcgaaggttcagccctatctggacgatttccaaaaaaagtggcaggaagaaatggaactgtaccggcagaaagtcgagcctctcagagccgagctccaggaaggtgcccggcagaagttgcatgaactgcaggaaaaattgagcccgttgggagaagaaatgcgcgatcgcgcacgggcccatgtcgatgcgctgagaacccaccttgctccttattcagatgaactgcggcaacgactcgcagcaaggcttgaagctttgaaagagaacggcggagcgagacttgctgaatatcacgcgaaggcgaccgaacacctttctactctctccgaaaaagccaaaccagcccttgaggacctccggcaggggctgctgccagtgcttgaatcattcaaggtatctttcctgagcgccctggaagaatacacgaagaaactcaacacgcaa

SEQ ID NO: 6439 - DNA, 801 bp, synthetic construct
  misc_feature 1..801: note = source = /note="Description of Artificial Sequence: Synthetic coding sequence"
  source 1..801: mol_type = other DNA
atgaaggcggccgtccttactcttgccgtgctcttcctgaccggatcccaagcacgccacttctggcagcaagacgaaccacctcaatccccatgggatagggtgaaggacctcgccaccgtctacgttgatgtgctgaaggactctggtagagattacgtgtcgcagtttgagggctcggcactgggaaagcaactgaacctgaaactccttgataattgggactcggtgacctccacttttagcaaactcagggaacagttgggacctgtgactcaggaattctgggacaatctggaaaaggagacggagggtctgaggcaagagatgtcaaaagatctggaagaagtcaaggcaaaggtgcagccgtaccttgatgattttcagaagaagtggcaagaggaaatggagctttacaggcaaaaggtcgagcctcttagggcagagctgcaagagggagcgaggcaaaagttgcatgagctgcaggaaaagctcagccccctgggagaggagatgcgtgatagagcaagagcacacgtggatgccctgcggactcatctggctccatactcagatgaactccggcaaaggctcgcggcaagactggaagctcttaaagaaaacggtggggcaagactggccgagtaccatgcaaaagcaaccgagcatctctccaccctgtcggagaaggctaagccggcactggaagatctccggcagggtttgctccccgtgctcgagagttttaaggtgtcttttctgtccgcgttggaggaatacaccaagaaacttaacactcag

SEQ ID NO: 6440 - DNA, 801 bp, synthetic construct
  misc_feature 1..801: note = source = /note="Description of Artificial Sequence: Synthetic coding sequence"
  source 1..801: mol_type = other DNA
atgaaggccgctgtcctgactctggcagtcctgttcctgaccggatcccaagcacgccacttttggcaacaggatgagccacctcagtccccctgggaccgcgtgaaggacctggcaaccgtgtatgtcgacgtgcttaaggactcaggaagggactacgtgagccagttcgagggttccgcgctcgggaagcagctcaacctcaagctgctcgacaattgggactcagttacctcaactttcagcaagctgcgcgagcagctcggccccgtgacccaggaattctgggacaacttggaaaaggaaacggagggcctgagacaagaaatgtcgaaagacctggaagaggtgaaggcgaaggtccagccgtacctggacgacttccagaaaaagtggcaggaagagatggaactgtaccggcaaaaggtcgaaccgttgcgagctgagctgcaggagggtgctcggcagaaactgcatgaactgcaggaaaagctgtcgcccctgggggaagagatgcgggaccgagccagggcacacgtggacgccctccggacccacctggccccgtactcggacgagctccggcagaggctcgcggcacgccttgaggccctgaaagaaaatggcggagcgcgactcgcggaataccatgccaaagcaaccgagcatctgtcaaccctgagcgaaaaagcgaagccagccctggaagatctccgtcaaggcctgctgccggtgctggagtcctttaaggtgtcctttttgagcgccttggaggagtacacgaagaaactgaatacccag

SEQ ID NO: 6441 - DNA, 801 bp, synthetic construct
  misc_feature 1..801: note = source = /note="Description of Artificial Sequence: Synthetic coding sequence"
  source 1..801: mol_type = other DNA
atgaaggctgcagtgcttactcttgctgtattgttcttgacaggatctcaggcacggcatttctggcagcaggatgaaccaccacaaagcccttgggatagggtcaaagatttggctaccgtgtacgtggacgttctcaaagattctggcagagattatgtttcacaattcgagggcagcgccttgggtaaacaactgaacctgaagttacttgataactgggacagcgttacaagtactttctcaaagttacgcgaacagttgggtcccgtcactcaagagttttgggataaccttgaaaaggagaccgagggtctgcgacaagaaatgagtaaggatttagaggaagtgaaagctaaagtccagccatacttggacgacttccagaagaagtggcaagaagagatggagttgtatcgtcaaaaggttgagccacttcgagccgaacttcaggagggtgctaggcagaagcttcacgaattgcaagagaaactatcaccgttgggtgaagaaatgagggatcgagcgcgtgcacacgttgacgcactgaggacacatcttgctccctactctgatgagctacgtcaaaggctggcagccaggttagaagcgcttaaagagaatgggggagctcggttggcagagtatcatgctaaggccactgaacacctctctactctttcggagaaggccaagcctgcattggaggatctacgacagggcttgctcccagttttggaatcctttaaagtaagttttctaagtgcattggaggagtatacaaagaaattgaacacacaa

SEQ ID NO: 6442 - DNA, 801 bp, synthetic construct
  misc_feature 1..801: note = source = /note="Description of Artificial Sequence: Synthetic coding sequence"
  source 1..801: mol_type = other DNA
atgaaagcggctgtcttgactctcgccgtgctgttcttgactgggtcacaagcacggcatttttggcagcaggacgagccgccgcagtcgccgtgggaccgcgtgaaagaccttgccaccgtctacgtggatgtgctgaaagattccgggcgcgattacgtctcccagttcgagggatctgccctgggcaagcaactgaaccttaagctgctggacaactgggattcagtcacctcgacgttcagcaaattgagggaacagctggggccggtgacccaagagttctgggacaatctggaaaaagagactgaggggttgagacaagaaatgtcgaaggacctcgaggaggtcaaagcaaaagtgcagccctacctcgacgattttcagaagaagtggcaggaagaaatggaattgtatagacagaaggtggagcccctgcgggcagaactgcaagagggtgctaggcaaaaactgcacgaacttcaagaaaaactgtcaccacttggagaggaaatgagggaccgcgcccgcgctcacgtcgatgccctgcggactcacctcgcaccttactccgatgaactgcgccagaggctggcagcccgcctggaagccttgaaggagaacggcggcgcgcggctcgcggagtaccatgccaaggccaccgagcacttgtctacgctgtcggaaaaggcgaagcctgctctggaggacctcaggcagggcctgctgccagtgctggagagcttcaaggtgagcttcctttcggcgttggaagaatacaccaagaaactcaatacccaa

SEQ ID NO: 6443 - DNA, 801 bp, synthetic construct
  misc_feature 1..801: note = source = /note="Description of Artificial Sequence: Synthetic coding sequence"
  source 1..801: mol_type = other DNA
atgaaggcagccgtgcttaccctggcagtgctttttctgaccggatctcaggcaagacatttctggcaacaagacgagcctccgcagagcccctgggatcgggtgaaagatctcgcgaccgtctacgtggatgtcctcaaagactcgggtagagattacgtgtcgcagtttgaaggaagcgcacttggaaagcagctgaacctgaagttgctggataattgggattcggtgacctccacctttagcaagctgagggaacagctgggccccgtgactcaggaattttgggataacctcgaaaaggaaactgaaggtttgcggcaagaaatgtcgaaggatctggaagaagtcaaagcaaaggttcaaccataccttgacgattttcaaaagaagtggcaagaggagatggaactctaccgccaaaaggtggagcctctccgagcagaactgcaagaaggcgcaaggcagaaactccatgaactgcaggagaaattgtcacctttgggcgaggagatgagggatcgagcaagagcacacgtggacgccctgaggacccatctggcaccttactccgatgaactgcgccagcgcctggcagcaagactcgaagcactgaaagagaatgggggagcgagacttgcagaataccatgcaaaagcaactgaacatctttccacgctctcagaaaaggcgaagccagctctcgaggacctgcggcagggactgctgccagtgctggaatcgttcaaagtttcctttctctcggcactggaggagtacacgaagaaacttaatacgcag

SEQ ID NO: 6444 - DNA, 801 bp, synthetic construct
  misc_feature 1..801: note = source = /note="Description of Artificial Sequence: Synthetic coding sequence"
  source 1..801: mol_type = other DNA
atgaaagctgccgtgctcaccctggcagtgctattcctgactggctctcaggctagacatttctggcagcaagatgaaccaccccagagtccatgggacagagttaaggatctcgccacggtttacgtggatgtgctgaaggacagtgggagggactacgtttctcagttcgaggggagtgcattaggcaaacagctgaatttgaaactactggacaactgggactccgtgacctccactttttccaagctacgcgagcagttgggccccgtgacacaggaattttgggataatctggagaaagagaccgagggtctgcgccaggagatgtcaaaggatctggaggaggtgaaggcaaaagtccagccgtatctagatgactttcagaagaagtggcaggaggagatggagctgtacagacagaaggttgaacctttgcgagctgaactccaagagggggcccggcagaaacttcacgagctccaggagaaactgtcccctctcggtgaagaaatgagagaccgagcaagggcacatgtggatgccctgcgtacacacctggccccctactcggatgaattgagacagcggttagccgctagactggaggccttgaaggagaacgggggagctaggcttgcagagtaccatgcgaaggccaccgagcacctgtccacattgtccgagaaagccaaacctgccttagaggacctccggcaaggtttgctgcccgtgctggagagtttcaaagtgtccttcctgtccgcactggaggagtataccaagaaactgaacacacag

SEQ ID NO: 6445 - DNA, 801 bp, synthetic construct
  misc_feature 1..801: note = source = /note="Description of Artificial Sequence: Synthetic coding sequence"
  source 1..801: mol_type = other DNA
atgaaagcggccgtgttgaccctggcagtcctgttcctgactggaagccaggcaaggcacttttggcaacaggacgagcctccgcaatcgccatgggacagagtgaaggatctggccaccgtctacgtggacgtgttgaaggacagcggacgcgactatgtcagccagttcgaaggatcggctctcggtaagcagctgaacctgaaattgctggataattgggacagcgtgacctcaaccttttccaaacttagggaacaactcgggccggttacccaggagttttgggacaatctggaaaaggaaaccgaaggactccgccaggaaatgtcgaaggacctggaagaggtgaaggccaaggtgcaaccataccttgatgacttccaaaagaaatggcaggaagaaatggagctgtacagacagaaagtcgagccacttcgggcggagctccaggaaggcgcacggcagaagctgcacgaactccaggaaaagctctccccccttggggaggagatgagagatcgggcgcgggcccacgtggatgctctgaggacccatctggcgccgtactcggacgagctgcgacaacggctggctgcccgactggaagccctgaaagaaaacggcggggccaggttggccgaataccacgctaaagcaaccgagcatctgtccactctgtccgaaaaggccaaaccagccctggaggatttgcgacaggggcttctgcccgtgctggaatccttcaaagtgtcgttcctttccgctctcgaagaatacaccaaaaagttgaacactcaa

SEQ ID NO: 6446 - DNA, 801 bp, synthetic construct
  misc_feature 1..801: note = source = /note="Description of Artificial Sequence: Synthetic coding sequence"
  source 1..801: mol_type = other DNA
atgaaagcggctgttctgaccttggctgtgctgtttcttacaggatcccaggcgcggcacttctggcagcaggacgaaccgcctcagtccccctgggacagagtcaaggacctggccacagtttacgtcgatgttctcaaggactccgggagagactacgtctcacagttcgaaggctctgctcttgggaaacagttaaacctcaaattgttagacaattgggacagcgttacatccaccttttccaaactcagagaacagctcggacctgttacccaagagttctgggataacctagagaaagagacagagggacttcgccaggaaatgagtaaagacctggaggaggtgaaagccaaggtacagccgtacctcgatgatttccagaaaaaatggcaggaggagatggaactctaccggcagaaagtcgaacccctgagggccgaactgcaagagggcgccaggcagaaactacacgaactacaggagaagctttcccccctcggagaagagatgagagaccgggcgcgcgcccatgtggatgctcttaggacccatctcgcaccatactcggacgagctcagacaaagactggctgccagacttgaagctctcaaggagaatggcggcgctaggctggcagagtaccacgctaaggccacagagcatttgtctacactctctgagaaggctaagcctgccctcgaagatttacgccaaggcctgcttcctgtgctggagtcatttaaggtctctttcttgtcagcattagaggagtacacgaagaaactaaatacacag

SEQ ID NO: 6447 - DNA, 801 bp, synthetic construct
  misc_feature 1..801: note = source = /note="Description of Artificial Sequence: Synthetic coding sequence"
  source 1..801: mol_type = other DNA
atgaaagccgcagtccttaccctggccgtcctgtttctgactggtagccaggctaggcatttttggcaacaagacgagcctcctcagtctccatgggacagagtgaaggatttagccaccgtctacgtggatgtcctgaaagatagtggaagagattacgtgtctcaatttgagggttcagcattggggaaacagctcaatctgaaactgctggacaactgggatagcgtgacaagtaccttttccaagttgagagagcaactcggaccagtgacccaagaattctgggataatttggagaaagagaccgaaggtctgaggcaggagatgtctaaagatctggaggaagtcaaagcaaaggtccagccttacctggacgactttcagaagaagtggcaggaggaaatggaattatacagacagaaggtagaaccattgcgtgcagaactgcaggagggggcccgacagaaactccacgaacttcaagaaaaactaagccctcttggagaggagatgagggacagggcgcgggcacacgtcgacgctctcaggactcatctcgcaccttatagtgacgaattgcgtcaaaggctcgccgctaggcttgaggctctgaaggagaacggaggtgcacgcctcgccgaataccacgccaaagctaccgagcatctgtcgactctgagcgaaaaagccaagcccgccttggaggacctgcgccagggtctcctgcctgtcctggaatcgtttaaagtcagcttcctgtccgcactcgaggagtacactaaaaaactgaacacccaa

SEQ ID NO: 6448 - DNA, 801 bp, synthetic construct
  misc_feature 1..801: note = source = /note="Description of Artificial Sequence: Synthetic coding sequence"
  source 1..801: mol_type = other DNA
atgaaagccgctgttttgaccttggctgtactgtttctcactgggtcacaagcccgccatttttggcaacaagacgagccgccgcagtctccttgggatagagtgaaggatttagctactgtttacgtcgatgtattgaaggatagtgggagagattatgtttcccagttcgaggggtctgctttgggtaaacaactaaatctgaaactcttagacaactgggacagcgtgacgagcaccttctctaaactgagggagcagctggggcctgtcacacaagagttctgggataatctcgaaaaagagaccgaggggctaaggcaggagatgtctaaagatctcgaagaggtcaaggctaaggtccagccgtatctggacgactttcaaaagaaatggcaggaggaaatggagttgtatagacaaaaagtagagcccctccgcgccgaactgcaggaaggagctcgtcagaaactgcatgaattacaggaaaagttatccccactcggagaggagatgcgggaccgcgcccgggcgcacgttgatgccctacgcacacacctggctccttatagtgatgagctgcggcagcgcctggccgccaggctggaagcgttgaaggaaaacggcggtgcccgccttgccgagtaccacgccaaggccacagagcatctgagtactctcagcgagaaggccaaaccggcgctcgaagatctgcgccaaggtctgttgcctgtgttggaatctttcaaagtgtcgttcttgtctgcactggaggagtacactaaaaaactcaatactcag

SEQ ID NO: 6449 - DNA, 801 bp, synthetic construct
  misc_feature 1..801: note = source = /note="Description of Artificial Sequence: Synthetic coding sequence"
  source 1..801: mol_type = other DNA
atgaaggccgcagtgctcaccctggccgtgctttttctaacgggaagccaggctagacatttctggcaacaggatgagcctccgcaaagcccatgggaccgggtcaaagatttggctacggtgtatgtcgatgtgttgaaggactcaggacgagactatgtgtcacagtttgaaggttcagcactagggaaacagctgaatctgaagctgcttgacaactgggactccgtaactagcacatttagtaagcttcgtgaacagctgggtcctgttacgcaagaattttgggacaatctcgagaaggaaacagagggactccggcaagagatgtctaaggaccttgaagaggtaaaagcaaaggtacaaccataccttgacgactttcagaagaagtggcaggaagagatggagctgtataggcaaaaggttgagcctctccgggccgagctccaggagggcgcacgacaaaaactacacgaactgcaggaaaaactgagtcccctcggtgaagagatgcgagaccgtgcccgagctcacgttgatgcattgcgcactcacctggcaccctactctgacgagctgcgccagcgattggcggctagactcgaagctctcaaggagaatggcggcgctagattagccgagtatcacgcgaaggccactgagcacctgagtaccctgagcgaaaaggccaagccggccctagaagacctcaggcaaggcctactacctgtgttggagtcttttaaagtctccttcctgtccgccctggaggaatatacaaagaagctgaatacccag

SEQ ID NO: 6450 - DNA, 801 bp, synthetic construct
  misc_feature 1..801: note = source = /note="Description of Artificial Sequence: Synthetic coding sequence"
  source 1..801: mol_type = other DNA
atgaaggcggcagtgttgactttagccgtgctcttcctcacgggtagccaggcacgacatttctggcagcaggatgaaccgccccaaagcccatgggacagagttaaggacttagcaacagtgtatgtggacgtgctgaaagatagtggtagagattatgtgtcacagtttgaaggtagcgctctcggaaagcaattgaatttgaagcttctagacaactgggactcagtaacaagcacatttagcaagctccgtgagcaactgggacccgtcacacaggagttctgggataacttggagaaagaaactgaaggtctcaggcaagaaatgagcaaagatcttgaagaagttaaggctaaggtgcagccgtacctggatgattttcaaaagaaatggcaagaagaaatggagctctaccggcaaaaggttgaaccgctacgggcagagttgcaagaaggtgcccgtcagaagctgcatgagctacaggaaaagctgtcaccgctaggagaggaaatgagggaccgagctcgtgcgcatgtggacgcgctacgaactcatttggccccctatagtgacgagctccgtcaaagacttgctgcacggcttgaggcgctgaaagaaaacggtggagctcgcctcgcagagtatcacgcgaaggctacggagcacctgtcgaccctttctgaaaaggccaaacccgcacttgaagacctccggcaagggttgttaccggtgctggaaagcttcaaagtctcttttctgtcagccctcgaagaatatacaaagaagttgaatactcag

SEQ ID NO: 6451 - DNA, 801 bp, synthetic construct
  misc_feature 1..801: note = source = /note="Description of Artificial Sequence: Synthetic coding sequence"
  source 1..801: mol_type = other DNA
atgaaggctgctgtcttgacactggcagtactgtttctgactggcagccaggccaggcatttctggcagcaggacgagccaccccaaagcccctgggatcgcgtgaaggatctggccactgtttacgtggatgtattgaaagatagcggccgagactatgtgtctcagtttgagggctctgctctagggaagcagctgaatttgaaactgctcgataattgggattccgtcactagtactttctctaagttacgtgagcagctggggcccgtgacgcaggagttttgggacaatttggaaaaggaaacagaggggctgagacaggagatgtcaaaggaccttgaagaggttaaagctaaagtccaaccctacttggacgattttcagaagaagtggcaggaagagatggaactgtaccggcaaaaagtagagcctctgagagccgaacttcaggagggcgccagacaaaaactccacgagctccaggagaagctctcccccttgggtgaagaaatgcgcgatcgtgctcgggctcacgtggacgctttgcgcacccacctagccccatacagcgatgagctaagacagagactggccgctcgccttgaagccctgaaggaaaacggtggcgcgaggcttgccgaatatcacgccaaagccactgagcacctctcaacattgagtgagaaggccaagccagccctagaggacctacggcaagggctcctgccagtgctcgaaagtttcaaggtgagctttctgtcagccttggaagagtacactaaaaagcttaacacacag

SEQ ID NO: 6452 - DNA, 801 bp, synthetic construct
  misc_feature 1..801: note = source = /note="Description of Artificial Sequence: Synthetic coding sequence"
  source 1..801: mol_type = other DNA
atgaaggcagcagtgctgacccttgctgtgctgttcctgaccgggtcgcaagccagacacttctggcagcaagatgaaccaccccagtcgccctgggaccgggtgaaggacctggcaactgtctacgtcgatgtgctcaaggactcgggccgggactatgtttcacagttcgaaggttcggcacttggcaagcaactgaaccttaaacttcttgacaactgggattcggtgacgtcaacttttagcaaacttcgcgagcagcttggtccagttacccaagaattttgggataatctcgaaaaggaaacggaaggactgagacaagaaatgtccaaggatcttgaagaggtcaaggcgaaggtgcaaccctacctcgatgattttcaaaagaagtggcaggaggagatggaactgtaccgacagaaggtggagccgctgcgggcagagctgcaagagggagcaaggcaaaaactgcatgaacttcaggaaaaactttcacctcttggagaagaaatgcgagatagagcccgtgcacatgtcgacgcattgaggacccaccttgcaccgtactccgatgaactgcggcagcgacttgcagcaagactggaagcactcaaggaaaatggtggggcgcgtttggcagagtaccatgccaaggcaactgaacatctctcaactctttccgaaaaggctaagcctgcacttgaggacctgagacaaggactgctgccagtgttggagagctttaaagtgtcgtttctgtcagcacttgaggagtatactaaaaagctgaacacccag

SEQ ID NO: 6453 - DNA, 801 bp, synthetic construct
  misc_feature 1..801: note = source = /note="Description of Artificial Sequence: Synthetic coding sequence"
  source 1..801: mol_type = other DNA
atgaaggccgccgtgctcactctcgctgtgctgttcctgacagggtctcaggccagacacttctggcagcaggatgaaccaccccagagtccctgggatagggtgaaagatcttgccactgtatacgtggatgttcttaaggattcagggcgggattatgtgagtcagttcgaagggagtgccttaggaaagcagcttaaccttaaactccttgacaactgggattctgttactagtacattttctaaactcagggagcagctcgggccagtcactcaagaattctgggataacctcgaaaaagaaacagaagggctgagacaggaaatgtccaaagatctcgaagaagtcaaagcgaaagtccagccatatctggatgattttcagaaaaaatggcaggaagaaatggaattgtatcggcagaaagtagagcccttacgggcggagctccaggaaggggctagacagaaacttcatgaactccaggaaaaactgtctcctctcggggaagagatgagagatcgggcgagggcccatgtggatgccctaagaactcatcttgcaccatactctgatgaattgcggcaacggctcgccgcaagacttgaagctcttaaagaaaacggaggagccagactcgccgagtaccatgcaaaagcgacagaacatttgtcaactctcagtgaaaaagcaaaacctgccctggaagatctccggcagggactgctccctgtgcttgaatcttttaaagtttcctttctttctgcccttgaggaatacacaaaaaaactcaatacacag

SEQ ID NO: 6454 - DNA, 801 bp, synthetic construct
  misc_feature 1..801: note = source = /note="Description of Artificial Sequence: Synthetic coding sequence"
  source 1..801: mol_type = other DNA
atgaaagcagcagtccttactttggcggtcttgtttctcactggctcacaggcaagacatttctggcagcaagatgaaccacctcagagcccctgggatcgcgtgaaggacctggcaaccgtctacgtggatgtcttgaaggattcgggacgcgattacgtttcgcaatttgaagggtccgccctgggaaagcagctcaacctgaagctcctcgacaactgggattccgtgacttcaaccttcagcaaactcagagaacagctgggtccggttacccaagagttttgggataacctcgaaaaggaaacggaaggtttgcgacaggagatgtcgaaggatcttgaagaagtgaaggcaaaggtgcaaccttatcttgacgattttcaaaagaagtggcaagaggaaatggaactttaccgtcaaaaagtggagcctctgcgggcggagcttcaagaaggcgccaggcaaaagctgcacgaacttcaagaaaaactttccccgcttggggaggaaatgcgtgatagggcccgcgcacacgtggacgccctgcgaacccacctggcaccctactcggatgaactgagacagcggcttgcggcgcgcctggaagcgctgaaggagaatggaggtgcacggcttgcagaataccatgcaaaagccactgagcacctttcaactttgagcgagaaggccaagcctgcactggaggacctgcgacaagggctccttcctgtgttggagagcttcaaagtctcctttctgtcagcactcgaagagtacactaagaaacttaacacgcag

SEQ ID NO: 6455 - DNA, 801 bp, synthetic construct
  misc_feature 1..801: note = source = /note="Description of Artificial Sequence: Synthetic coding sequence"
  source 1..801: mol_type = other DNA
atgaaggcagccgtgctcaccttggcagtgctgtttctcactgggagccaggcgaggcacttctggcagcaggatgagccaccacagtcaccatgggaccgggtgaaagatctggccaccgtgtatgtcgatgtgttgaaggatagcgggcgggactacgtttcccagtttgagggcagtgcgctgggtaagcagctgaatttgaagctacttgacaattgggatagcgtgacctctaccttcagtaagctgcgggaacagctaggccctgtgactcaggagttttgggataatctggagaaagaaacagagggccttaggcaagagatgagcaaggacctggaggaggtcaaggccaaggtgcagccttatctggatgactttcagaagaaatggcaagaggagatggaactgtacaggcagaaagtggaacccctgagggcggaattacaggaaggagcccggcaaaaactacacgagctgcaggagaagttgtcacccctcggggaagaaatgcgagatcgtgctcgagcacacgtagatgccctccggacccatctggccccctactctgacgaactgcgccagagacttgccgcaagacttgaagcactcaaggagaacgggggggccaggcttgcggagtaccatgcgaaggctaccgaacacctgtctaccctgtctgaaaaagctaagccggcattggaggatctcagacagggcctactcccggtgcttgagtcattcaaagtgtcttttctgtcagcgttggaggaatataccaagaagttgaatacccag

SEQ ID NO: 6456 - DNA, 801 bp, synthetic construct
  misc_feature 1..801: note = source = /note="Description of Artificial Sequence: Synthetic coding sequence"
  source 1..801: mol_type = other DNA
atgaaagcagcagtgttgactctggccgttctgttccttaccggatcacaagcacggcacttttggcaacaagatgaacccccacagagcccttgggacagggtcaaggatcttgctactgtctacgtcgacgtccttaaggattcgggtcgtgactacgtgtctcagttcgaaggatcggcactcggtaagcaactcaatttgaagctcctcgataattgggactcagttacttcgaccttctccaagctgcgggaacaactcggtcccgtgacccaggagttttgggacaacctggaaaaggaaaccgaaggtctgcggcaggaaatgtcgaaggaccttgaagaagtgaaagcgaaggtgcaaccatacctggatgattttcagaagaagtggcaggaggagatggaactttacaggcaaaaagtcgaacctctgcgggcagaactccaggaaggtgcacggcagaagctgcatgagctccaggagaagttgtccccccttggagaggaaatgcgagatagagctagggcacatgtcgacgcactgcgtacccatctggcaccgtacagcgatgaactcagacaacgcttggccgcaagattggaggcgctcaaggagaacggtggcgctcggttggcagaataccatgccaaggcgactgaacacctgagcaccctttccgaaaaggcaaaaccagcgctggaggaccttcgacagggacttctgcctgtccttgagtcattcaaagtgtcattcctgtccgcactggaagaatatactaagaagctcaacactcaa

SEQ ID NO: 6457 - DNA, 801 bp, synthetic construct
  misc_feature 1..801: note = source = /note="Description of Artificial Sequence: Synthetic coding sequence"
  source 1..801: mol_type = other DNA
atgaaagcggcagtgcttacccttgcagtgttgtttcttacggggtcacaggcacggcacttttggcagcaagatgagcctccccagtccccttgggatagagtgaaggatcttgccaccgtgtacgtcgacgtgttgaaggattcgggacgtgattacgtgtcgcagttcgaaggctccgcacttggaaagcaacttaatcttaaactgcttgataattgggattccgtcacctcgactttttccaaactgcgagaacagttggggcctgtgactcaggaattctgggataacctcgaaaaggagactgagggactgaggcaagaaatgagcaaggatcttgaagaagtgaaggcaaaggtgcaaccctacctggacgattttcaaaagaagtggcaagaagaaatggaattgtaccggcagaaagtggaacctctgcgagcagaactgcaggaaggtgcaaggcagaaacttcacgagctccaagaaaagctcagcccactcggggaagaaatgagagatcgagcaagagcacatgtcgacgcgctccgcacccatctcgcgccatactccgacgaactgaggcagcgccttgccgctcgcctcgaggcactgaaagaaaacggtggtgcccgcctggcagagtatcacgccaaggcaaccgagcatctttccacgctttcagagaaggctaaaccagcactggaagatcttagacaaggactgcttcccgtcttggaatcattcaaagtgtcatttctgtcagcccttgaagaatacactaaaaagctcaatacccaa

SEQ ID NO: 6458 - DNA, 801 bp, synthetic construct
  misc_feature 1..801: note = source = /note="Description of Artificial Sequence: Synthetic coding sequence"
  source 1..801: mol_type = other DNA
atgaaagcggccgtgctgaccctcgctgtgttgttcctgactggcagccaggctcggcatttctggcagcaagacgagccgccacagagcccgtgggaccgcgtcaaagatctcgccactgtgtacgtggatgttctgaaggactccggaagagactacgtgagccaattcgaaggctcggctctgggaaaacagctcaacctgaagctgctggacaattgggattcggtgacctcaaccttctccaaattgcgcgagcagctcgggccagttacgcaggaattctgggacaacctggaaaaggaaaccgagggactgagacaagaaatgtcaaaggacctcgaagaagtgaaggccaaagtccagccatacctcgacgattttcagaaaaagtggcaggaagagatggaactgtacaggcagaaagtggaaccgctccgggctgaactccaggaaggagcgcggcaaaagctccatgaactgcaagaaaagctgagcccgttgggggaggagatgagagacagagcacgcgcccacgtggacgcgttgcggactcacctcgccccctacagcgacgagctccgccaacgcctggctgcaagactggaagccctgaaggagaatggaggagcgaggctggccgaataccatgcaaaggcaacggagcacctctcgaccctctccgagaaggcaaagccggctctggaggatctgagacaaggcctcctgccagtgctggagagcttcaaggtcagcttcctgtccgccctggaagaatacactaagaagctcaacacgcag

SEQ ID NO: 6459 - DNA, 801 bp, synthetic construct
  misc_feature 1..801: note = source = /note="Description of Artificial Sequence: Synthetic coding sequence"
  source 1..801: mol_type = other DNA
atgaaggcagcagtgttgactctcgctgttctgtttctgacgggttcacaggccagacatttttggcagcaggacgagccaccgcagtccccctgggacagagtgaaagatctggctaccgtgtatgtggacgtactgaaagattctggaagggattacgtatctcagttcgagggcagcgcgcttggaaagcagttgaatctaaagttactagacaactgggactctgtcacttccacctttagcaaactacgggaacagcttgggcccgttacccaggagttctgggacaatctggagaaagaaaccgagggcttgcgccaggaaatgtccaaggatctcgaggaggttaaagccaaggtgcaaccgtacctggacgactttcaaaagaagtggcaagaagaaatggaattgtatcgccagaaggttgagccgctgagggccgagcttcaggagggcgcgcggcagaagttgcatgagctccaggaaaaactgtcgccgctaggggaggagatgagggaccgtgcccgagcacatgttgatgcgctgcgcacccatctagcaccttactctgacgagctgcgccaacgtttggcggcccgcctggaagcgcttaaggagaacggcggggctagacttgccgaataccacgccaaggctaccgaacatctctccactctgtccgagaaagctaaacctgccctagaagacctgcggcaaggcctcctccccgtgctggaaagtttcaaggtctccttcctgtccgccctggaggagtacaccaaaaaactgaacacccaa

SEQ ID NO: 6460 - DNA, 801 bp, synthetic construct
  misc_feature 1..801: note = source = /note="Description of Artificial Sequence: Synthetic coding sequence"
  source 1..801: mol_type = other DNA
atgaaagctgccgtgctaactctggctgtgctgttcctcacagggtcccaggctaggcacttttggcagcaggatgaaccaccacagtccccctgggaccgagtaaaggacctcgcaactgtgtacgtcgatgtccttaaggatagcggccgtgactatgtgagtcagttcgaggggtccgcgctaggcaaacaactgaatctgaaactcctggacaactgggatagtgttacatctactttctccaagcttagggagcagctgggacccgttacccaggaattttgggataacctggaaaaggagacggagggccttcgacaggagatgagcaaagacctggaagaggtgaaagccaaagtgcaaccctaccttgacgatttccagaagaagtggcaggaagagatggaactctacaggcagaaggtcgaacctctgcgtgcagagctgcaagagggggccagacaaaaactacatgagctgcaggaaaagttatctcccctgggtgaagagatgcgagaccgtgcgcgagcacacgtcgatgcactacgaacccatctggccccttattccgacgagttgcgacagaggttggctgcacggctggaagcacttaaggaaaatggtggggctaggctcgccgagtatcacgccaaggccaccgaacaccttagtacactttctgagaaggctaagccagcactcgaggatttaaggcaaggactcctgcccgtactcgaaagttttaaggtgagcttcttgtccgctctagaagagtacacaaagaaactgaacacccag

SEQ ID NO: 6461 - DNA, 801 bp, synthetic construct
  misc_feature 1..801: note = source = /note="Description of Artificial Sequence: Synthetic coding sequence"
  source 1..801: mol_type = other DNA
atgaaggcagctgtgttgactttggcagtcctgttcctgactggttctcaggcaaggcacttctggcagcaagatgaaccaccccaaagtccatgggacagggtgaaggacctagccaccgtttatgtagacgtgctcaaagatagtggtagagattacgtgagccagtttgaaggcagcgccctgggaaaacagctcaacctcaagcttttagacaactgggatagtgtgacaagcactttctctaagctccgggagcagctgggtccagtgactcaggagttctgggacaacttggagaaagaaactgagggtctgagacaggaaatgtccaaggacctcgaagaggtcaaggcgaaggtgcaaccctacctggacgacttccagaagaaatggcaagaggaaatggagctgtaccgacagaaggtcgagcctctcagggccgagcttcaagagggggcgaggcagaagctgcatgaattacaggagaagttgtctcccctcggggaagagatgcgagatagagccagggcccatgtggatgccctgcggacacatttagccccctactctgatgagctgcgccaaaggctcgcagcccgccttgaggcgttgaaggagaacgggggagccaggttggccgagtaccatgctaaagccactgaacacctaagtacccttagtgagaaagccaaaccagcgctcgaggacctccggcaaggactgctgcccgtcctggaatcatttaaggtaagttttttatcagctcttgaggagtacaccaagaagctgaacactcag

SEQ ID NO: 6462 - DNA, 801 bp, synthetic construct
  misc_feature 1..801: note = source = /note="Description of Artificial Sequence: Synthetic coding sequence"
  source 1..801: mol_type = other DNA
atgaaggcggctgtgctcaccctcgccgtgctttttctcaccggctctcaagccaggcatttttggcaacaggatgagccgccccagagcccttgggatagggtgaaggatctggcaactgtgtacgtggatgtcttgaaggattctggacgggattacgtgtcgcagttcgagggatcagccctgggaaagcagctgaaccttaagctgctggacaattgggacagcgtgactagcacgttctcaaagctccgcgaacagctcgggccggttactcaggaattttgggacaaccttgaaaaggaaaccgagggactgcgacaggaaatgtcaaaggatcttgaagaagtgaaagcaaaggtccagccataccttgacgatttccaaaagaaatggcaagaggagatggagctttatcgccaaaaggtggaaccccttcgggcagaattgcaagagggagcgcgtcaaaaactgcacgagttgcaagagaaacttagccctttgggtgaagagatgcgggacagggcacgtgcacatgtcgacgcactccgtactcacctcgctccatactcggatgaacttcgtcaacgactggcagcgcgcttggaagcactgaaagaaaacggcggggccaggcttgcagaataccatgccaaagccaccgagcatctgagcaccctgtccgaaaaagcaaagcccgctttggaggacttgcggcaggggctgctgcccgtgctcgaatcctttaaagtgtcattcctgtccgcgcttgaagaatacaccaaaaagctgaatacgcag

SEQ ID NO: 6463 - DNA, 801 bp, synthetic construct
  misc_feature 1..801: note = source = /note="Description of Artificial Sequence: Synthetic coding sequence"
  source 1..801: mol_type = other DNA
atgaaagcagctgtgctgacccttgcagtcttgttcctgactggatcccaagccaggcacttttggcagcaggacgaaccgcctcagtccccttgggatagagtgaaagacctggccactgtgtacgttgacgtgctcaaggatagcggaagagactacgtgagccaatttgagggcagcgcgctcggtaagcagctcaatctgaaacttctggataactgggattctgtgacctcgacgttctcgaaactccgggaacagctcggaccagtgacgcaggaattttgggacaacctcgaaaaggaaactgagggattgaggcaagagatgtcgaaggacctggaagaggtgaaagccaaggtgcagccgtatctggacgacttccaaaagaagtggcaggaagaaatggaactgtaccgtcagaaggtggaaccactccgggctgaactccaggaaggcgcccgccaaaaactgcatgaattgcaggaaaagctcagccccctgggagaggaaatgcgggatcgagcaagagcacacgtggacgccctcaggacccatctggccccatattccgacgaattgcgccaacggctcgcggcacgcttggaagctctcaaagaaaacggtggagcccgactcgccgagtaccacgcaaaggctacggagcacctgagcactctctcagaaaaggccaagcctgcactggaagatctgaggcagggcctcctgcctgtgctggaatcgttcaaggtcagcttcctgtccgcgctggaggaatacaccaagaagctcaacacccaa

SEQ ID NO: 6464 - DNA, 801 bp, synthetic construct
  misc_feature 1..801: note = source = /note="Description of Artificial Sequence: Synthetic coding sequence"
  source 1..801: mol_type = other DNA
atgaaagcagccgtgcttacccttgcagtgctgtttcttactggctcccaagcacggcatttttggcagcaagatgaaccccctcaatcgccctgggatcgtgtgaaggaccttgcgacggtgtacgtggacgtcctgaaggattcaggaagagattacgtgtcgcaattcgaagggagcgccctgggtaagcaactgaacttgaagctccttgacaactgggatagcgtgacgtcaacctttagcaagctgcgcgagcagctcggaccagtcacgcaagaattttgggataacttggagaaggaaaccgagggccttcggcaggaaatgagcaaagacctggaggaagtgaaagctaaagtccaaccatacctggatgatttccagaaaaagtggcaggaagagatggaattgtatcgacaaaaggtcgagcctcttagggcagagctccaagagggtgcaagacaaaagctgcatgagctgcaagaaaagctgtcaccactcggagaggaaatgagggatcgagcaagggcacacgtggatgcactgcgtacccatctggccccctactccgatgagcttaggcaaagattggccgcacgtctggaagcactgaaagaaaacggtggagctcggcttgcagagtaccatgcaaaggcaaccgaacatttgtccactctttccgaaaaggctaagccagccctcgaggatctccgccagggccttctgccagtccttgaatcgtttaaggtgagcttcctctcagcactggaagaatacactaagaaactcaatacccaa

SEQ ID NO: 6465 - DNA, 801 bp, synthetic construct; identical to SEQ ID NO: 6434
  misc_feature 1..801: note = source = /note="Description of Artificial Sequence: Synthetic coding sequence"
  source 1..801: mol_type = other DNA

SEQ ID NO: 6466 - DNA, 801 bp, synthetic construct
  misc_feature 1..801: note = source = /note="Description of Artificial Sequence: Synthetic coding sequence"
  source 1..801: mol_type = other DNA
atgaaggccgcagtgctgaccctggctgtcctgtttcttaccgggtcacaggcgcgccacttctggcagcaggatgaaccgccacaatcgccgtgggaccgcgtgaaagacctggccaccgtgtatgtcgacgtcctcaaggacagcggacgggactacgtgtcccaattcgaaggaagcgcactgggcaagcaacttaacttgaagctgttggacaactgggattccgttacttcaactttttcgaagttgagggaacagctgggaccagtgacccaggagttctgggacaatctcgaaaaggaaaccgagggactgaggcaggagatgagcaaggatctggaagaggtgaaagcgaaagtgcaaccttacctcgatgacttccagaaaaagtggcaggaagaaatggagctctaccgccagaaggtggaaccgctgcgggctgagctgcaagaaggagcgagacaaaagctgcacgagctccaagagaaactgtcgccgctgggtgaggaaatgcgcgatagagcacgcgcccacgtcgacgccctgcgcacccatctcgctccctacagcgacgagcttcggcagcgactggcggccagactggaggcactgaaggaaaatgggggcgctcggctggccgagtaccatgcgaaggccacggaacacctctctactctctccgaaaaggccaaacctgcactcgaagatctccggcagggcctgctcccagtcttggagtcattcaaggtgtccttcctctcggccctggaagagtacactaagaaacttaacactcag

SEQ ID NO: 6467 - DNA, 801 bp, synthetic construct
  misc_feature 1..801: note = source = /note="Description of Artificial Sequence: Synthetic coding sequence"
  source 1..801: mol_type = other DNA
atgaaagcggccgtgctgactctggcagtcctgttccttactgggagccaagcccgacacttctggcagcaggacgagccgccgcaatccccgtgggaccgggtgaaggatctggccaccgtgtacgttgatgtcctcaaggattcaggacgggactacgtgtcacagtttgagggaagtgcgctgggaaaacaactgaaccttaagttgctcgataattgggactccgtgactagcacgttctcgaaacttcgggagcagctcggaccagtgacccaggaattctgggataatctggaaaaggaaaccgagggtctgcgacaagaaatgtcaaaggacctcgaggaggtgaaggcgaaggtgcagccatacctggacgactttcagaagaagtggcaggaagaaatggaattgtacaggcaaaaggtggaaccgcttcgggccgaactgcaggagggtgccaggcagaaactgcacgaactgcaagaaaagctctctcctctgggggaggaaatgagagatagggcgcgggctcatgtcgacgcccttagaactcatcttgctccttactccgatgagcttcgtcagcgcctggctgccagactggaggctctgaaagaaaacggaggagctagacttgctgagtatcacgcgaaggcaacggaacatctcagcactttgtccgaaaaagctaaacccgccttggaggaccttaggcaaggcttgctcccagttctggagtccttcaaggtgtcctttctgtcagccctcgaagaatacaccaagaagctgaacacccag

SEQ ID NO: 6468 - DNA, 801 bp, synthetic construct
  misc_feature 1..801: note = source = /note="Description of Artificial Sequence: Synthetic coding sequence"
  source 1..801: mol_type = other DNA
atgaaagcggctgttctcacccttgctgtcctctttctgacaggtagccaagctagacacttctggcagcaagacgaacctccccagtcaccttgggatcgggtcaaagacttggccactgtttatgtggatgtgttgaaggatagcgggcgcgattatgtcagccagtttgagggcagcgcccttggcaagcagcttaacctcaaactgctggataactgggactctgtgacaagtacattctccaagctgcgggagcagttaggtcccgtaacgcaggaattttgggataatctcgagaaggagacagaaggcctccgtcaggagatgagtaaggacctggaagaggtcaaagctaaagtgcagccctatctggatgacttccagaagaagtggcaggaagaaatggaactttatcgacaaaaggtcgagcctctgagagccgagctgcaagagggggctcgtcaaaagctgcacgagctgcaggagaagctatcacctttgggagaggaaatgcgcgaccgggcgagggcgcacgtggacgctctacgaacacacctagctccttattctgatgaactgcgccaacgattggccgcacggctggaagccttgaaggagaacggtggcgcacgcctagctgagtaccacgccaaggcgacagaacatttgtctactctgtccgaaaaggctaagccagccttagaagacttgaggcagggactcctacccgtcctggaatcattcaaggtctcttttttgagcgctctcgaggagtataccaaaaaattgaacacccag

SEQ ID NO: 6469 - DNA, 801 bp, synthetic construct
  misc_feature 1..801: note = source = /note="Description of Artificial Sequence: Synthetic coding sequence"
  source 1..801: mol_type = other DNA
atgaaagccgccgtcctgactttggccgtgctttttctgactggttctcaagctcgccatttctggcaacaggacgagcctccccagagcccttgggaccgcgtgaaggatctcgcaacggtctacgtggatgtactgaaggactccggacgggactacgtgtcgcaatttgagggttccgccctcggcaagcaattgaacttgaagctgttggataactgggactccgtcacttctaccttctcgaagttgcgtgagcagctgggtccggtcacccaggagttttgggataatctcgagaaggaaaccgagggcctgcgccaggagatgagcaaggacctcgaagaagttaaggctaaggtccagccctaccttgatgactttcagaagaagtggcaggaggaaatggaactttaccgtcagaaggttgaacctttgcgtgccgaactccaggagggggcccgtcaaaagttacatgagcttcaggagaagctgtccccgctgggagaggagatgagggatcgtgctcgcgcgcatgtcgacgctttacggacccaccttgccccttattcggatgagctccgacagcggttggccgcacgcctcgaggccctgaaggagaatggcggcgctcggctggccgagtaccacgccaaggcaaccgaacacttgtcgacgctgtcggaaaaggctaaaccggctttggaagacctccggcagggtctgttaccggtgcttgagagttttaaggtgtctttcctatctgctctggaggaatatacaaagaagttgaacacccag

SEQ ID NO: 6470 - DNA, 801 bp, synthetic construct
  misc_feature 1..801: note = source = /note="Description of Artificial Sequence: Synthetic coding sequence"
  source 1..801: mol_type = other DNA
atgaaggcagccgtgctcaccctcgcagtcctgtttctgactggaagccaggcgcgccatttctggcagcaggatgaacctccgcagtccccttgggatagagtcaaggatttggcaacggtgtacgttgatgtgctgaaagactcgggaagagattacgtgagccaattcgagggatccgcactgggaaaacagctgaatctgaagctgctcgataactgggacagcgtgacttccactttttcaaagctgcgagaacaacttgggcccgtcacgcaagaattctgggataacttggagaaagagactgaaggtctgcggcaggaaatgtcaaaagatctcgaggaggtgaaggccaaggtgcaaccatacctggatgacttccagaagaaatggcaggaagaaatggagctctaccgacaaaaagtggaaccacttagagccgaactgcaagagggagcaagacaaaaactgcatgagttgcaggaaaaactgagtcctcttggtgaagagatgcgcgatcgtgcgcgcgcccacgtggacgcgctgagaacccatctggcaccgtactccgacgaactgcgccaacggctggcggcccgtcttgaagcacttaaggaaaatggtggggcacgacttgcggaatatcacgccaaggctactgagcacctgagcactctttcagaaaaggcaaagccagcacttgaagatcttcgacagggccttcttcctgtgcttgaatccttcaaggtgtcctttctgtccgcacttgaggaatacactaagaaattgaacactcag

SEQ ID NO: 6471 - DNA, 801 bp, synthetic construct
  misc_feature 1..801: note = source = /note="Description of Artificial Sequence: Synthetic coding sequence"
  source 1..801: mol_type = other DNA
atgaaggctgcagtgctgactcttgccgtgcttttcctgactggatcccaagcacgccatttctggcagcaggatgagccgccgcaatcgccgtgggaccgcgtgaaggacctggccaccgtgtacgtcgacgtgctgaaggattcaggtcgagactacgtgtcccagtttgagggatccgccctgggaaaacagctgaatctgaagctgttggacaactgggacagtgttacgtcaaccttctcaaagctgagggagcagctgggaccagtcactcaggaattctgggacaacctggagaaagaaactgagggactgagacaagagatgagcaaggacctggaggaagtgaaggcaaaagtgcagccatacctggacgacttccaaaagaagtggcaggaggagatggagctgtaccgccaaaaggtggaacccctccgggcggagctgcaggagggggctcgtcagaagctgcatgagcttcaagaaaaactgtccccgctcggggaagagatgcgcgaccgcgcgagggcccacgttgacgccttgagaactcacctcgccccatacagcgacgagctgagacaacggttggcggcacggctggaagccctgaaggagaacggaggagccagactcgccgagtatcatgccaaggcgaccgaacacctctcgaccctgtcggaaaaggccaaaccagcactcgaggatcttcggcagggactgctcccggtgctcgaatccttcaaggtgtcttttctgtcagcactggaggaatacactaagaagctgaatactcag

SEQ ID NO: 6472 - DNA, 801 bp, synthetic construct
  misc_feature 1..801: note = source = /note="Description of Artificial Sequence: Synthetic coding sequence"
  source 1..801: mol_type = other DNA
atgaaggcggccgtactgactctcgccgtgctttttttaactggatcccaagccagacatttctggcaacaagatgagccccctcaatctccctgggaccgagtgaaagaccttgccacagtgtacgtggatgtcctgaaggatagtggacgggattacgtgagccagtttgagggaagtgcattgggcaaacagctgaacctgaagctactcgataattgggactctgtaacttccaccttcagcaagctgagggagcagctcggacccgtgactcaggaattttgggacaaccttgaaaaagaaaccgaggggttgcggcaagaaatgtctaaagatctggaagaggttaaagcaaaagttcagccatacttagacgacttccaaaagaaatggcaagaggaaatggagctatatagacagaaggtggagcccctgagggcggagctgcaggagggtgctcgccagaaactgcatgaactgcaagaaaagctgagtccactgggagaggaaatgagagaccgggcgcgggctcatgtggatgccctgcgaacccacttagcgccctatagcgatgaactgcgccagagactggccgcgcgtctggaagcccttaaggaaaatgggggcgcaagactggcagaataccatgccaaggctactgagcacctgtcaacactaagcgaaaaggctaaaccagctttagaagatctgcgacaggggctcctacctgtgctggaatcctttaaggtttcgttcctcagtgctctggaggaatacacgaaaaagttgaacacacag

SEQ ID NO: 6473 - DNA, 801 bp, synthetic construct
  misc_feature 1..801: note = source = /note="Description of Artificial Sequence: Synthetic coding sequence"
  source 1..801: mol_type = other DNA
atgaaagctgccgtattgaccctcgcagtcttgttcctgacaggatctcaggcccggcacttttggcagcaagacgaaccaccacagagcccatgggaccgtgttaaagacctcgctactgtttatgtagacgtcttaaaagactcaggaagagactacgtttctcaattcgagggttcagcccttggaaaacagctgaacctcaagttgttagataattgggactctgttacctccaccttttcaaaacttcgtgagcagctaggaccagtgacccaggaattctgggacaatctggaaaaagaaacagaagggttgagacaggaaatgtcgaaagatctcgaggaagtgaaggcaaaagtccaaccgtaccttgacgacttccaaaaaaagtggcaagaagaaatggaactttatcgtcaaaaggttgagccgcttcgagcagagcttcaagaaggagctaggcagaagcttcacgagttgcaagagaaattgtcacctcttggcgaagaaatgcgggatagggctagggcccatgttgatgcacttcgcacacatctcgcgccctatagtgatgaactcagacagcgtttggctgccaggttggaagcacttaaagaaaacggaggagcgcgactggcagaatatcatgcaaaagctacagaacatctgtctactctttctgaaaaagcaaaaccagccttggaagatcttagacaaggtttattaccagtcctcgaatctttcaaagtatcatttttgtctgcacttgaagaatacacaaaaaagttgaatacacaa

SEQ ID NO: 6474 - DNA, 801 bp, synthetic construct
  misc_feature 1..801: note = source = /note="Description of Artificial Sequence: Synthetic coding sequence"
  source 1..801: mol_type = other DNA
atgaaggccgccgtgttgacactcgctgtgctcttccttactgggtctcaagcccgacatttctggcagcaagatgaaccaccacagagcccctgggacagagttaaggaccttgccaccgtatatgtggatgtgttgaaggattccggccgagactatgtcagccagttcgaggggtctgcgctgggtaaacagctgaacctgaaacttctcgacaattgggatagcgtcacctccacctttagcaagttgcgagagcagctgggtccagtgactcaggagttttgggacaacctggaaaaagagactgaaggcttgcgccaggaaatgtccaaggacctggaggaggttaaggcaaaggttcagccatatttggacgacttccagaagaagtggcaagaggaaatggagctctacagacagaaggtggaaccacttagggctgagctccaggagggtgctaggcaaaagctccatgagctccaggagaagctgtctcctcttggggaagagatgagagaccgggcccgcgctcacgtggacgcgctgagaacccatctggctccctactccgacgagctgagacagaggctggctgcgaggctggaggctttgaaagaaaacggcggagctcggctggccgagtaccacgccaaagccactgaacacctttcaacactgtccgaaaaggctaagcctgccctcgaagatctccggcaggggttgctccctgtcctggaatctttcaaggtttcattcctgtctgccctggaggagtatactaaaaaactgaacactcaa

SEQ ID NO: 6475 - DNA, 801 bp, synthetic construct
  misc_feature 1..801: note = source = /note="Description of Artificial Sequence: Synthetic coding sequence"
  source 1..801: mol_type = other DNA
atgaaggcagccgtgttgaccctggctgtgctgttccttactggcagtcaagctcgccacttctggcagcaagatgagccccctcaaagcccctgggaccgtgttaaagacctggcaaccgtgtacgtggatgtgcttaaggactccggacgtgactacgtgagccagttcgagggcagcgccctaggaaagcagctaaacctcaagctgttggacaactgggatagcgtcacttctactttttccaagttacgtgagcagctgggaccagtcacacaggaattctgggacaatctggagaaggaaaccgagggactccgtcaagaaatgagtaaggacctggaggaagttaaggcaaaagtgcagccctacctcgatgattttcaaaaaaagtggcaggaagagatggagctgtatcgccagaaggtggagccattacgagccgagttacaggaaggggcccgccaaaaactgcatgagctgcaagagaagctgtcacctttaggtgaagagatgagagatagagcaagggcccacgtggacgctctccgcacccacctggccccctatagtgatgagctgagacagcgtctggccgcccgcctcgaggccctgaaggagaatggaggggctaggctggccgagtatcacgccaaagccactgagcatctcagcaccctgtctgagaaagccaagccagccctggaggatttacgccaggggctccttcctgttctggaatcattcaaagtttcttttctaagtgctttggaggagtataccaagaaactgaatacacag

SEQ ID NO: 6476 - DNA, 801 bp, synthetic construct
  misc_feature 1..801: note = source = /note="Description of Artificial Sequence: Synthetic coding sequence"
  source 1..801: mol_type = other DNA
atgaaggccgccgtcctcaccttggcagtactcttcctgactggttcccaagcccgccacttctggcagcaggatgagccccctcaatccccttgggacagggtcaaagacttggccactgtctacgtggatgtcctgaaggacagcggtagagactatgtctcacagttcgagggctccgcgctgggaaaacagctcaacctcaaacttctcgacaattgggattctgtgacttcaactttctccaagctgagggagcaacttggccccgtaacacaggaattctgggacaacctggagaaggagacggagggcctcaggcaagagatgtcaaaagacttggaagaggtaaaggcaaaagtccagccctacctcgacgactttcagaagaagtggcaggaagaaatggagctttatcgccagaaggtagaacctctcagagctgaactccaggagggagcacgccagaagctccacgagctgcaggaaaagttgtctccactgggcgaagagatgagagatagggcgagggctcacgtggatgcccttagaacccacttggccccctattctgatgagctgaggcaacgcctggccgcgaggctcgaagcactgaaggagaacggtggcgccagactcgcggaataccacgctaaggccacggaacatctcagtacactctctgaaaaggcaaagcctgctctggaagatttgagacaaggactgctgcctgtgttggagagcttcaaggtcagcttcttgagcgcccttgaggagtacaccaaaaagctgaacacccag

SEQ ID NO: 6477 - DNA, 801 bp, synthetic construct
  misc_feature 1..801: note = source = /note="Description of Artificial Sequence: Synthetic coding sequence"
  source 1..801: mol_type = other DNA
atgaaggcagccgtgctcactctggccgtgttgtttcttaccggttcccaagcacgccatttttggcaacaagatgagcctccccaatcgccttgggatcgcgtcaaagatttggctactgtgtacgtggatgtgctgaaggattcagggcgcgactacgtctcacagtttgaaggtagcgccctgggcaagcaactcaacctgaaacttctggataactgggatagcgtgactagcactttctcaaaacttagagaacaactcggacctgtgactcaggaattttgggacaacttggagaaggaaactgagggccttcggcaggaaatgtcgaaggacctggaggaggtcaaggcaaaggtgcagccatatctggatgactttcaaaagaagtggcaagaggaaatggaactttaccgccagaaggtcgagccacttcgcgcagagctccaagaaggagcaagacaaaaactgcatgagttgcaagaaaaactgtcacctctgggagaggagatgcgcgatagggcacgcgcccatgtcgatgcccttcgaacccacctggcgccctactcagacgaactccggcaatgcttggcggcacgacttgaagcactcaaggaaaatggaggggcaagacttgcagaataccatgcgaaggcaaccgaacacctgtcaaccctgtcagaaaaagcaaagcctgcccttgaagatcttcggcagggactgcttccagtgctggaatcattcaaggtcagcttcctgtcggcgcttgaagagtacaccaaaaaactcaatacccaa

SEQ ID NO: 6478 - DNA, 801 bp, synthetic construct
  misc_feature 1..801: note = source = /note="Description of Artificial Sequence: Synthetic coding sequence"
  source 1..801: mol_type = other DNA
atgaaggccgctgtcctgacacttgccgttctcttcctcacaggctcacaggcccgtcacttctggcagcaggacgaacctccccaaagcccttgggatagggtgaaggatcttgccactgtgtatgtcgacgtgcttaaggactcaggtcgcgattatgtatcccaatttgaaggaagcgcattaggcaaacaacttaacctgaaattactggataattgggactctgttaccagcaccttttcgaaactccgggagcagttggggcccgttacccaggagttctgggataacctcgagaaggagaccgaggggcttcgccaggaaatgagcaaagacctggaagaggtcaaggctaaggtgcagccctacctggacgacttccagaaaaaatggcaggaagaaatggaactctacaggcaaaaagtcgaacccctgagggcggagttgcaggaaggcgcacgccagaaacttcacgaactccaggaaaagcttagcccgttgggcgaggagatgagggatcgcgctagggcgcacgttgacgcgcttcggacacatctggccccatatagcgacgaacttcgacagtgcctggctgcccggctcgaggcgttaaaggagaacggtggcgcaaggctcgctgaatatcatgccaaggctaccgagcatctgagcaccctctcagaaaaggcgaagcccgcactcgaagaccttaggcaaggcctgcttcccgtcctcgagtctttcaaggtgagctttttgagcgctttggaggagtacacgaagaagctcaatacacag

SEQ ID NO: 6479 - DNA, 801 bp, synthetic construct
  misc_feature 1..801: note = source = /note="Description of Artificial Sequence: Synthetic coding sequence"
  source 1..801: mol_type = other DNA
atgaaagcagcagttctaaccctggcggtgttgttcttaactggttcgcaagctcgtcacttctggcagcaggatgagccaccccagagcccctgggacagggttaaagatctggccactgtatacgtggatgttttaaaggattctggtcgggattacgtatctcagtttgagggttctgcgctcggaaagcagctgaatcttaaattactcgacaactgggactccgtgactagcacattctccaaattgcgagagcagctgggccccgtcacgcaagagttctgggataacttagaaaaggaaacagagggcctcaggcaagaaatgtccaaagatctcgaggaagtgaaagcgaaggtgcagccatatctcgatgactttcaaaagaagtggcaggaggaaatggaactttaccggcaaaaggtggaacccttgagggccgagctgcaggaaggcgctcgacagaagctacacgaacttcaggagaagctatctcctctgggcgaagagatgcgcgaccgagctagagcccatgtggatgcgctcaggacacatctggcgccgtacagcgatgagttgcggcagtgcctagctgctaggctggaggcactcaaagagaacgggggcgcgcggctcgctgagtatcatgcgaaagccaccgagcacctgtccacacttagtgagaaggcaaagccggcccttgaggatttacggcagggccttttgcccgtcctcgagtctttcaaggtaagtttcctgtcagcgctggaggaatacaccaaaaagctgaatacccaa

SEQ ID NO: 6480 - DNA, 801 bp, synthetic construct
  misc_feature 1..801: note = source = /note="Description of Artificial Sequence: Synthetic coding sequence"
  source 1..801: mol_type = other DNA
atgaaggccgccgtgctgaccctagcagtgctcttcctaaccggctcccaagctcgccacttctggcagcaagatgaacctccccagtcaccatgggacagagtgaaggacttggcgaccgtgtatgtggacgtgcttaaggactcaggccgtgactacgtatcgcagtttgaaggatccgcactgggaaagcagctaaatcttaagctgctagataattgggattctgtgaccagcacatttagtaaacttcgagaacagctaggccccgtgacacaggagttttgggataaccttgaaaaagaaaccgaagggttaaggcaggaaatgtcgaaagatttggaggaagtcaaggcaaaggtgcagccatatttggacgatttccaaaaaaagtggcaagaggagatggagttgtatagacaaaaggttgaaccgctacgcgccgaactgcaggagggggctcgacagaagttacatgaattgcaggaaaaattgtcaccactcggggaagaaatgcgagaccgagctagggcccatgtcgacgctttaagaacccacctggcaccttactccgacgagcttcgacagtgcctcgccgctaggttggaggcccttaaagagaacggaggagctcgattggcagagtaccacgccaaggcgaccgagcacctttctaccttatccgagaaggccaagccagcccttgaagatctgcgtcaggggctgctgccagtgttggagtccttcaaagtatctttcctgtcagccctggaggaatatacaaagaaactgaacacacag

SEQ ID NO: 6481 - DNA, 801 bp, synthetic construct
  misc_feature 1..801: note = source = /note="Description of Artificial Sequence: Synthetic coding sequence"
  source 1..801: mol_type = other DNA
atgaaggccgccgtactgaccttggccgtactttttctgacaggaagccaggcccggcatttttggcaacaggacgaaccacctcaatctccgtgggatagggtgaaagacttggcaaccgtgtacgtggatgttctcaaggattccgggcgagattacgtgtcacagttcgagggaagcgccctggggaagcagctgaatctgaaattgttggataactgggattcagtaacttccaccttttctaaactgagggaacagctgggacccgtcacacaagagttctgggacaacttggagaaggaaacagagggtctgcgacaagaaatgagtaaggatctcgaagaggtaaaggcaaaagtgcagccttaccttgatgacttccagaagaaatggcaggaagagatggaactctacaggcagaaggttgaaccgcttcgcgccgagctgcaggagggagctaggcaaaagctgcacgagctccaggaaaagctctcacctctgggagaagaaatgagagaccgcgccagagcccatgtggacgcgctccgcacccaccttgccccttatagcgatgagctgcggcagtgtctggctgcgcggctggaagctcttaaagaaaacggtggcgccagactggctgagtatcatgcaaaggcaacagagcatctctccacactctcagagaaggcgaaacctgcgttggaggatcttagacaaggtctcctgcctgtgcttgaaagcttcaaagtcagctttctcagcgcactcgaagagtataccaagaagcttaatactcaa

SEQ ID NO: 6482 - DNA, 801 bp, synthetic construct
  misc_feature 1..801: note = source = /note="Description of Artificial Sequence: Synthetic coding sequence"
  source 1..801: mol_type = other DNA
atgaaagctgcagtgttgaccttggctgttttgttcctgactgggagccaggcgaggcatttctggcaacaggacgaaccacctcaatccccctgggaccgggtgaaagacctcgccacagtgtacgtggacgtgctcaaggacagcggcagagattacgtctcacaattcgaggggtcagccctgggaaagcagctgaacctcaagctgctggataattgggattccgtgacaagtacattttcaaagctccgggaacagttagggcctgtgacccaggaattctgggacaacctggagaaggagaccgagggactgcgacaagagatgagcaaggacttggaagaagtgaaagccaaagttcagccatacttggacgacttccaaaagaaatggcaagaggagatggaattgtatagacagaaggtggaacctttgagggcagaactgcaggagggagcccgccaaaagctgcacgagcttcaagagaaactgtctccacttggcgaagaaatgagggacagagctagagcgcacgttgacgcacttcgcacacacctggctccatactccgacgagttgagacagtgcctggctgccagactggaggcactgaaggagaacggtggagccagattagctgaatatcatgcgaaagccaccgaacatttgagtactctgtccgaaaaggccaagcccgctctggaggatttgcgtcagggtctactccccgtactagaatcatttaaagtgagtttcctgtcagcattagaggaatacaccaagaaactgaatactcaa

SEQ ID NO: 6483 - DNA, 801 bp, synthetic construct
  misc_feature 1..801: note = source = /note="Description of Artificial Sequence: Synthetic coding sequence"
  source 1..801: mol_type = other DNA
atgaaagcagccgtgttgacccttgccgtccttttcctgaccggttcgcaggcaagacatttttggcagcaagatgagccccctcagtccccttgggacagagttaaggacttggcaaccgtgtacgtggatgtcctgaaggatagcggacgtgattacgtgtcacaattcgaaggttccgcactgggcaagcagctgaacctgaagctgctggataattgggattccgtgacgagcacgttttcgaagctgagagaacaacttggacccgtgacccaagaattctgggacaatctcgaaaaggagactgagggccttcgtcaagaaatgagcaaggatctggaagaagttaaagccaaggtccaaccatacctggatgacttccaaaagaagtggcaggaggaaatggaactctaccgtcagaaggttgaacctcttcgggcagagctgcaagaaggtgcacggcaaaaacttcatgaactgcaggagaagctgtcacctctgggagaagaaatgcgcgatcgtgcccgggcccacgtggacgcgcttagaacccatctggctccctattcagatgaacttaggcagtgcctcgcagcgcgcctggaggccctgaaagaaaacggtggagcgagactggccgaataccacgccaaagcaactgaacatctgagcactctctccgagaaagcaaagccagcgcttgaggaccttcgccagggactgctccctgtcctggagtcgtttaaggtttcgtttctttccgcgctggaggaatacaccaagaagctgaacacccaa

SEQ ID NO: 6484 - DNA, 801 bp, synthetic construct
  misc_feature 1..801: note = source = /note="Description of Artificial Sequence: Synthetic coding sequence"
  source 1..801: mol_type = other DNA
atgaaagcggcggttctgacactcgcagttctctttctgaccggatcgcaagctcggcacttttggcagcaggacgagcctccccagtccccatgggaccgagtaaaggacctcgcaacggtgtacgtcgatgtcctgaaggactccgggagagattacgtgtcccagttcgaaggctctgctctgggaaagcagctgaacctgaaactgttagataactgggattctgttaccagtacattctccaagctgcgggaacagctgggacccgtaacacaagagttctgggataaccttgaaaaggaaaccgaaggcctcagacaggagatgtctaaggaccttgaggaggtcaaggccaaagtgcagccgtatctcgacgatttccaaaaaaagtggcaggaagaaatggagttgtacaggcagaaagtcgaacccctgcgtgccgagcttcaagaaggcgctagacaaaaactgcatgagctccaggagaagttgtcacctttgggagaggaaatgagggatagggcccgcgctcacgtggatgcgctgcgaacccatctagctccctactcggacgaactgcgtcagtgtctggccgcgaggttagaggcactaaaagaaaacggtggagctagactcgcagagtaccatgccaaggccaccgagcatctctccactctttccgagaaggccaaacccgcgctcgaagacctcaggcagggcctgctgcctgtgctggagtcattcaaggtgtctttcctgtccgccctggaggaatatacaaagaagctgaacacccag

SEQ ID NO: 6485 - DNA, 801 bp, synthetic construct
  misc_feature 1..801: note = source = /note="Description of Artificial Sequence: Synthetic coding sequence"
  source 1..801: mol_type = other DNA
atgaaagccgccgttctgactttagcggttcttttcctgaccgggagtcaggctcgccatttttggcagcaggacgagcctcctcagtctccgtgggacagagtgaaggacctggccaccgtttacgtcgacgttttgaaggactctgggagagattacgtctcacagtttgaggggagcgctcttgggaagcagctgaatctgaagctgttagacaactgggacagtgtgacctccacctttagtaagctgcgtgagcagctgggccccgtgactcaagaattttgggataatcttgaaaaagagacagagggcttgcgccaagaaatgtcaaaagacctggaagaggtcaaagcgaaagtccagccctacctggacgatttccagaagaagtggcaagaggaaatggaactgtatagacaaaaagtcgaaccgctccgcgccgagctacaagagggtgcccgacagaaactgcacgagctccaggagaaactgagccccctcggagaggagatgcgagatcgcgcacgggcacacgtggacgccctgcgaacacacctagcaccgtactctgacgagcttcgccaatgcctcgccgcccgcctggaagctctgaaagagaatggcggggctcggctggccgagtatcacgccaaagcaaccgaacacttgtctactctaagtgagaaagctaagcctgcattggaagaccttcggcagggtttgctgcccgtgctcgagagctttaaggtgtctttcctatctgccctggaagagtacacaaagaaactaaatacacaa

SEQ ID NO: 6486 - DNA, 801 bp, synthetic construct
  misc_feature 1..801: note = source = /note="Description of Artificial Sequence: Synthetic coding sequence"
  source 1..801: mol_type = other DNA
atgaaagctgctgtcttgacgcttgcggttttatttcttactggcagccaggctcgtcacttctggcaacaggatgaacctccacaatcaccgtgggatagagtcaaggatctagctacggtgtatgtagatgtcctgaaggattctggtagagattatgttagccaatttgaaggttccgctctgggaaaacaactaaatcttaaactgctggataactgggattccgtgacgtccactttcagcaaactgcgtgagcaacttggaccagttactcaagagttttgggataacctggagaaggaaacagagggtctaagacaagaaatgtccaaggatcttgaagaagtgaaagcgaaggtacaaccgtatcttgacgactttcagaaaaagtggcaagaggaaatggagttataccggcagaaagtggagccacttagagcggagctccaagagggagcgcgtcaaaagctccatgagcttcaggagaaattgtcaccattgggtgaggagatgcgagatcgagctcgggcacatgtggatgcgctgcgtactcacttggctccgtacagtgatgaattgcgccagtgtttggctgcccgattggaagccttgaaagaaaacggtggtgccagattagctgaataccatgctaaggcaacggagcatctctcaaccctctcagaaaaggccaagccggcccttgaggatctccgtcaaggacttctgccagtgcttgaaagcttcaaggtgtcattcctgtcagcacttgaggaatatacgaaaaagttgaatacacag

SEQ ID NO: 6487 - DNA, 801 bp, synthetic construct
  misc_feature 1..801: note = source = /note="Description of Artificial Sequence: Synthetic coding sequence"
  source 1..801: mol_type = other DNA
atgaaggctgctgtgttgacccttgcagtactctttttgaccggatctcaggctcgtcatttctggcagcaggatgaacccccacaaagcccgtgggaccgagtcaaagacctcgccactgtatatgtggacgtgctcaaagacagtggccgagactatgtgtcccagttcgaggggtctgccctaggtaaacagcttaatttgaagctcctggataactgggactccgtcacctctacgttctcaaagcttcgggaacagctcggccctgtgacgcaggagttttgggacaatttggaaaaagagactgaggggctgcgacaggagatgtcgaaagacctggaagaggtgaaagctaaagtccagccctacttagacgacttccagaagaagtggcaagaagaaatggagctctaccgccagaaagtggagccattacgagccgagctccaggaaggcgcaagacagaagctccacgagctgcaggagaagctgtccccacttggggaggaaatgcgcgatagagccagagcccacgtcgatgcacttagaacccatctggcaccctactcagacgagctgcggcagtgtttggcggcccgcctagaggcactgaaggagaacggcggagcgaggctggccgagtaccacgccaaagcaaccgaacacctttccacgcttagtgagaaggctaaaccggccctggaagaccttagacaaggcttgcttcctgtcctggagagtttcaaagttagctttctaagcgcgctggaggagtacactaaaaagcttaacacccag

SEQ ID NO: 6488 - DNA, 801 bp, synthetic construct
  misc_feature 1..801: note = source = /note="Description of Artificial Sequence: Synthetic coding sequence"
  source 1..801: mol_type = other DNA
atgaaggcagcagtcctgactctggctgttttatttctgacgggatcgcaggcgagacatttttggcagcaggatgaaccgccccaaagtccctgggaccgcgtaaaggatctggcgacggtgtacgtggatgtgttgaaggattctggaagagattatgtgtcccagttcgagggaagtgctttagggaagcagcttaacctgaaactgctggacaattgggacagcgtgacatcaactttttccaagcttcgagagcaactaggcccagtcacccaggagttctgggataacctggagaaagaaacagaaggcctccgccaggaaatgagcaaagacttggaggaggtaaaggccaaagtacagccttatttggatgactttcagaagaaatggcaggaggaaatggaactgtatcggcaaaaagtggagcccctgcgcgccgagttacaggagggggcccgacagaaactgcacgaactgcaagagaaactgtctcccctgggggaggaaatgcgcgacagggcccgcgcgcacgtggacgccctccgcactcacctagctccgtattccgatgagctgcggcaatgtcttgccgcacgtttggaggctctcaaagaaaacggaggagccagactagctgagtaccacgctaaagccacggagcatttgagcactttgtccgaaaaggctaagccggcactcgaagatctccggcagggattactcccggttctggaaagctttaaggtgtccttcttgagcgccctcgaggagtacacgaaaaagcttaatacccaa

SEQ ID NO: 6489 - DNA, 801 bp, synthetic construct
  misc_feature 1..801: note = source = /note="Description of Artificial Sequence: Synthetic coding sequence"
  source 1..801: mol_type = other DNA
atgaaggccgcagtgctcacactggccgtgctgttcctaaccgggtcccaggcccgacatttttggcagcaggacgaacccccacagtcaccatgggatcgggtcaaagacctggctactgtgtacgtggacgtactgaaggacagtggcagagactacgtctcacaattcgaagggtctgcactgggcaaacagctaaatcttaaactgctcgacaactgggactcggttacgagcacgttctctaagctgagggagcagcttggcccagtcacacaggaattctgggacaacctagagaaagagacagaggggctcaggcaggagatgtcgaaagacctagaagaagtgaaggctaaggtacagccatatctggatgactttcagaaaaagtggcaggaggaaatggaattgtataggcagaaagtggagcctctgagggccgagctgcaggaaggcgcacggcagaaacttcacgaattacaagaaaaactttcccccttaggggaggaaatgcgcgatcgcgcccgagcccacgtggacgccttgaggacacatctcgcaccatatagcgatgagttgcgtcagtgcctggcagctcgactagaagcattgaaggagaacggcggagcccgactggcggaataccatgccaaggccaccgagcaccttagtacattaagtgagaaggccaagccagccctggaggacctgagacaggggctgctgccagtactggagtcctttaaggtgagcttcctatccgccctcgaggaatatacaaagaagctaaacacacaa

SEQ ID NO: 6490 - DNA, 801 bp, synthetic construct
  misc_feature 1..801: note = source = /note="Description of Artificial Sequence: Synthetic coding sequence"
  source 1..801: mol_type = other DNA
atgaaggccgctgtgttgactctcgccgtgctcttcttgactggttcccaagccaggcacttctggcaacaggatgagcctccgcagagcccatgggatcgcgtcaaggacctcgctactgtgtacgtggatgtgctcaaagatagtggacgcgattacgtgtcgcagttcgaggggagcgcgctgggtaagcaattgaatttgaagctgctggacaactgggattcggtcacttcgactttcagcaaactgcgggagcagctcggaccagtgactcaggagttctgggacaatctggaaaaggaaaccgagggcctccgccaagagatgtccaaagatctggaagaagtgaaggctaaagtccagccttatctggacgacttccaaaagaagtggcaggaggagatggaactgtacagacaaaaggtggaaccgctgcgggcagaactgcaggagggcgctcggcaaaaactccacgaactgcaggaaaagctctcccctttgggagaggagatgcgggaccgtgccagagctcacgtcgacgcacttagaacccaccttgccccgtattcagatgagctgcgccagtgcctcgccgcaagattggaagccctgaaagaaaacggcggagcgcgcctcgcagaataccacgctaaggctaccgagcatctcagcactctctcggagaaagccaagccggcactcgaggaccttcgccaaggacttctgccggtcctcgaatcctttaaggtttctttcctgtcggccctggaagagtacaccaagaagctgaacacccaa

SEQ ID NO: 6491 - DNA, 801 bp, synthetic construct
  misc_feature 1..801: note = source = /note="Description of Artificial Sequence: Synthetic coding sequence"
  source 1..801: mol_type = other DNA
atgaaggcagcggtgctcactctcgcagtgttgtttctgaccggatcccaagccaggcacttttggcagcaagacgagcccccgcaatccccctgggacagggtgaaggacctcgccacggtgtacgtggacgtgctgaaggattcagggagagactacgtgagccagttcgaggggagcgcactcggaaaacaacttaatctgaaacttcttgacaactgggacagcgtcaccagcaccttttcgaaactccgcgaacaacttggcccagtcactcaagagttttgggataaccttgaaaaggaaactgaagggcttagacaggaaatgtcgaaggacctggaagaggtgaaagcaaaggtgcagccttacctggatgacttccagaagaaatggcaagaagaaatggagctttaccgtcagaaggtggaacctttgagagcagaactgcaggagggcgcacgccaaaagctgcatgagctgcaagaaaagttgtcacctctgggagaagaaatgcgagatcgtgcgagagcacatgtggacgcactgcgaacccatcttgcaccatacagcgatgaactgcgtcaatgccttgcagcacggctcgaggcactcaaggaaaatggtggtgccagacttgcggaataccatgcaaaagcaactgaacacttgtcgaccttgtcggagaaggccaagcctgcactcgaagatctgagacaaggtttgcttccagtgctggagtccttcaaagtgtcattccttagcgcattggaggagtacactaagaagctgaatacccaa

SEQ ID NO: 6492 - DNA, 801 bp, synthetic construct
  misc_feature 1..801: note = source = /note="Description of Artificial Sequence: Synthetic coding sequence"
  source 1..801: mol_type = other DNA
atgaaggcagccgtgctcacgttggcagtccttttcctcaccgggagccaagcccgccacttctggcaacaggacgagccgccacagagcccgtgggatcgcgtcaaggatctcgcgaccgtgtacgtggacgtgctgaaagactcaggaagagattacgtcagccagtttgagggttcggcccttggaaaacagctgaatctcaaacttctggacaactgggactccgtgacctcgacctttagcaagctcagagagcaactcgggccggtgactcaagagttctgggataacctggaaaaagagactgaggggctgcggcaggaaatgtccaaggatctcgaagaagtcaaggcaaaggtccagccatacctggacgacttccagaagaaatggcaggaagaaatggaactttaccgccagaaagtggagccgcttagagctgaattgcaagaaggagcccggcagaagctgcacgagctccaggaaaagctgtcgccacttggtgaggagatgcgcgaccgagctagagcacatgtggatgcactcagaacccatctggcgccgtactccgacgagctccggcagtgcctggcagcccgcctcgaagcgttgaaggagaacggaggagcccggttggcggaataccacgcaaaggcaaccgagcatctgtcgaccctttccgagaaggccaagcctgcactggaggacctgcgccaaggattgctccccgtgctggagtccttcaaggtgtcgttcctgtctgccctggaagagtacaccaagaaactcaatacccag

SEQ ID NO: 6493 - DNA, 801 bp, synthetic construct
  misc_feature 1..801: note = source = /note="Description of Artificial Sequence: Synthetic coding sequence"
  source 1..801: mol_type = other DNA
atgaaggcagctgtgctgacactggctgtgttattcctgacaggatctcaggcccgccacttttggcagcaggatgaacccccacagtctccctgggatagagtaaaggacctcgctaccgtgtacgtggatgtgctgaaagacagcggtagggactacgtgtcacaatttgagggatcagccctaggcaagcagctgaatctcaagctgctcgataactgggactccgtgacatccacatttagcaagctgagggagcaactcggaccggttacccaggaattctgggacaaccttgaaaaggagactgaaggtttaagacaggagatgagtaaagatctcgaggaagtgaaggccaaagtccaaccttacctcgatgacttccaaaaaaagtggcaagaggagatggagctctatcgccagaaggtggagcccttaagagccgagttacaggaaggggctaggcagaagttgcacgagctgcaggagaagctgagcccactgggcgaagaaatgcgcgatagggcccgggctcacgtcgatgcactccgcacgcacctggcaccatactcagatgaattgcgacagtgcctcgcagcaaggcttgaagccctcaaagaaaatggcggcgccagactggccgaataccacgcaaaagccactgaacacctttccaccttatcagaaaaagccaaacccgcgctcgaggatctgcggcaagggcttctgcctgtgttggagagtttcaaggtgtcgtttctcagcgctcttgaagaatacactaagaaactgaatacccaa

SEQ ID NO: 6494 - DNA, 801 bp, synthetic construct
  misc_feature 1..801: note = source = /note="Description of Artificial Sequence: Synthetic coding sequence"
  source 1..801: mol_type = other DNA
atgaaggccgcggtgctgaccctcgccgtgctgttccttacgggaagccaggcgcgccacttctggcaacaggatgaaccgcctcagtcaccctgggatagagtgaaggacctggctaccgtgtacgtcgacgtgctgaaggacagcgggcgcgattacgtgtcacaattcgagggatccgcgttgggaaagcagctgaacctcaagctcctggataactgggactcggtgacctcgacgttctcgaagctgcgggagcaactcggcccggtgactcaggagttttgggataatctggaaaaggaaaccgaaggactccgccaagaaatgtcgaaggatctggaggaggtgaaggccaaggtccaaccttacttggacgactttcagaagaaatggcaggaagagatggaactgtatagacaaaaggtcgaaccgctgcgagcggaattgcaggaaggcgcaagacagaaactccacgagcttcaggaaaaactttcaccgcttggagaggagatgagggacagggcacgggctcacgtcgatgcgctgagaacccatctcgcgccgtactccgacgagctccgacagtgcctggccgcgagacttgaagcacttaaagagaatggcggggctcggctggccgagtaccatgccaaggccaccgagcacttgtcgacgctctccgagaaagccaaacccgccttggaggacctgcgccagggactgctgcctgtgttggaatccttcaaggtgagcttcctgtcggcactggaggagtacaccaagaagctgaatacccaa

SEQ ID NO: 6495 - DNA, 801 bp, synthetic construct
  misc_feature 1..801: note = source = /note="Description of Artificial Sequence: Synthetic coding sequence"
  source 1..801: mol_type = other DNA
atgaaggcggcagtgctgaccctggccgtccttttcctgactggatctcaggcgaggcatttctggcagcaggatgaaccgccccaatcaccttgggatagggttaaggatctggcaaccgtgtacgtggacgtgctgaaagattctggacgtgattatgtgtcccaattcgaaggatcagcactgggtaagcagcttaacttgaaactgctcgataactgggacagcgtcacctctaccttttccaagctccgagaacaactcgggcctgtgacgcaagaattttgggataatctcgagaaggaaacggaaggccttcggcaagaaatgtcaaaggaccttgaagaagtgaaggcgaaggtgcagccatacctcgatgactttcaaaagaaatggcaagaagaaatggaactctacagacaaaaagtcgagccactgagagcagaactgcaagaaggtgctagacagaagctgcatgaacttcaggaaaaactttcacctcttggtgaagaaatgagggaccgggcgagagcacatgtggatgcccttcgcactcatctggcaccatacagcgatgaacttcgccagtgtctcgcggcgcggcttgaagcactgaaagaaaatggaggagcacgcctggctgagtaccacgcaaaggccaccgagcatctctcaactctctcggagaaagcaaagccagctttggaggacctccgtcaaggactgctgccagtgctcgagagcttcaaggtgtcatttctttcggcattggaggagtacactaagaaacttaacactcaa

SEQ ID NO: 6496 - DNA, 801 bp, synthetic construct
  misc_feature 1..801: note = source = /note="Description of Artificial Sequence: Synthetic coding sequence"
  source 1..801: mol_type = other DNA
atgaaagccgctgtactgactctagctgtactttttctcaccggcagccaggcccggcacttttggcaacaggatgagccccctcagtctccctgggacagagtaaaggacctcgccaccgtttacgtggacgtattaaaagacagtgggagggactatgtgagccagttcgaaggaagcgctctcggtaaacagttgaacctgaagctgttagacaactgggattccgtgacttccacattcagcaagcttcgtgaacagttgggccccgtgactcaggagttttgggataacctggagaaagagactgaagggctgcgccaagagatgagtaaggacctggaggaggtgaaggctaaagtccagccctatctcgatgactttcagaaaaaatggcaggaggagatggagctgtacagacagaaggtcgagcctctgcgggccgagctacaggagggggccaggcagaaacttcacgaactgcaggaaaagctgtcaccactgggggaggagatgcgggatagagcccgcgctcacgtcgacgctcttcgcacccacctcgccccctacagcgacgagctgagacagtgcctggccgccaggctcgaagctttaaaggagaatggaggagccagacttgccgaatatcatgccaaggccacggagcacctgtcgaccctctcagagaaagctaagcctgccctcgaggatctgaggcaggggttgctccctgtccttgagtccttcaaggtttcctttttaagtgcgctggaagagtacacaaaaaagctgaatacacag

SEQ ID NO: 6497 - DNA, 801 bp, synthetic construct
  misc_feature 1..801: note = source = /note="Description of Artificial Sequence: Synthetic coding sequence"
  source 1..801: mol_type = other DNA
atgaaggccgcggtgcttactctggcggtgttgttcctcactggctcacaggccaggcatttttggcaacaggacgagcctccgcagagcccgtgggaccgggtcaaggatctcgctactgtgtacgtggacgtcttgaaggactcgggacgcgattacgtgtcacagtttgaaggaagcgcgttgggaaagcagctcaatctgaagttgctggacaactgggattcagtgaccagcactttctcaaagctgcgggaacagctgggacctgtcactcaggaattttgggacaatctggagaaggaaaccgaggggctgagacaggaaatgtccaaggaccttgaagaagttaaggccaaggtgcagccttacctggacgatttccaaaagaaatggcaggaagaaatggagctctacagacaaaaagtggagccgctgcgggcggaactgcaggaaggcgcccgccaaaagctgcacgagctccaggagaaactgtctccactgggcgaagaaatgcgagatcgggctcgcgcccacgttgacgctctgcgcacccacctcgctccatactccgacgagctgaggcagtgccttgccgccagactggaagccctgaaggagaacggtggagctcggttggcggaataccatgctaaagccactgaacatttgtcgactctgtcggagaaggctaaaccagctctcgaggaccttcgccagggactgcttccggtgctcgagtcattcaaagtgagcttcctttcagcgctggaagagtacaccaagaagctgaatactcag

SEQ ID NO: 6498 - DNA, 801 bp, synthetic construct
  misc_feature 1..801: note = source = /note="Description of Artificial Sequence: Synthetic coding sequence"
  source 1..801: mol_type = other DNA
atgaaggccgcagtgctgacgctggccgtccttttcctgaccggctctcaggctcggcacttttggcaacaggatgaacccccgcaatcgccttgggatagagtgaaggatctcgcgactgtctatgtggatgtgctgaaggatagcggccgagactacgtgtcccaattcgagggatccgcgcttggtaagcagctgaatcttaaacttcttgacaactgggactcagtgacttcgaccttttccaagctcagagaacagctgggtcctgtcacccaggagttctgggataacctggaaaaggaaacggaaggattgcgccaggaaatgtccaaggacctcgaagaggtgaaagcaaaagtccaaccctacttggatgatttccagaagaaatggcaagaagagatggaactctataggcaaaaggtggaaccactgcgcgcggaactgcaagaaggggccagacaaaaacttcatgaacttcaagaaaagctgtcgccgctgggagaagagatgagagatcgggcccgagcgcacgtcgacgcactccgtactcatttggccccatactcggatgaactgagacaatgtctcgctgcaaggctcgaagcgctgaaggaaaatgggggcgcacgccttgcagaataccacgccaaagcaactgaacacctttccacccttagcgagaaggctaagcctgccctcgaggatctccggcaaggactgctgcctgtccttgaatcgtttaaagtgtcctttctgtcagctctggaggaatacaccaaaaagctcaacactcaa

SEQ ID NO: 6499 - DNA, 801 bp, synthetic construct
  misc_feature 1..801: note = source = /note="Description of Artificial Sequence: Synthetic coding sequence"
  source 1..801: mol_type = other DNA
atgaaggccgcggttctcaccctggctgttctgttcctcacaggttcccaggcccggcatttttggcagcaggatgagcccccccagagcccttgggaccgtgttaaggacctggcgactgtctatgtggacgtgctgaaagacagtggcagggattatgtctcgcaattcgagggctccgccctcggcaaacagcttaacctcaaattgttggacaattgggatagtgtaacttccaccttctctaagttaagggaacaactgggacccgtgacgcaggaattttgggacaatctggaaaaagaaacagaagggctcaggcaggaaatgagcaaagatctcgaggaggtgaaggccaaagtgcagccgtatttggatgacttccaaaaaaagtggcaggaggagatggagctgtaccgtcagaaggtcgagcctctgcgggctgaactgcaggagggcgcccgacaaaaattacatgagctacaggaaaagctgtcacccctgggagaggagatgagggaccgcgctcgggctcacgtggacgcgctgcggacccacctagccccatactctgatgaattaaggcagtgtctggcagctagacttgaagccttgaaagagaacggcggtgctcgcttggccgagtatcacgccaaggctaccgagcaccttagtacgctgtccgagaaagcaaagcccgcactggaagatctccggcaaggcctgttacccgtgctggaatcattcaaggtaagcttcctgagtgccctggaggaatataccaagaaactaaacacccag

SEQ ID NO: 6500 - DNA, 801 bp, synthetic construct
  misc_feature 1..801: note = source = /note="Description of Artificial Sequence: Synthetic coding sequence"
  source 1..801: mol_type = other DNA
atgaaggcggccgtcctcactctggccgtcctcttcttgactggatcacaggctcgccacttttggcagcaagatgagccaccgcagtcgccgtgggatcgggtgaaggacttggcgaccgtgtacgtggatgtcttgaaggactcgggacgggattacgttagccagtttgaaggtagcgccctgggaaaacagcttaacctgaagctgctggacaattgggactccgttacctcaactttcagcaagctgagagaacaactgggaccggtcactcaggagttctgggataacctggaaaaagaaactgagggactgcgccaggagatgtcaaaagacctcgaggaggtgaaggcaaaagtgcaaccatacctggatgacttccagaaaaagtggcaggaagagatggagctctacagacagaaagttgaaccgctccgggcggaactgcaggagggagcccgacaaaagctgcatgaactccaggaaaagctctctccactgggcgaggagatgcgcgacagggcccgggcgcacgtggatgcgttgagaactcatctggccccttacagcgatgagttgcggcagtgccttgccgcccggctggaggcccttaaagaaaatggaggagcaagattggcagaataccatgcaaaagccaccgaacacctgtcaactctgtcggagaaggctaagccagccctggaggacctgcggcagggtctgctgcccgtgctcgaatcgttcaaggtgagcttcctctcggccctggaggagtatactaaaaagctgaacactcaa

SEQ ID NO: 6501 - DNA, 801 bp, synthetic construct
  misc_feature 1..801: note = source = /note="Description of Artificial Sequence: Synthetic coding sequence"
  source 1..801: mol_type = other DNA
atgaaggctgcagtgctcacgctcgccgtgctgttcctgacgggatcccaggcacggcatttttggcagcaggatgaaccaccgcagagcccgtgggacagagtgaaagatctggccactgtgtatgtggacgttctgaaagattcagggagagattacgtgtcccaattcgagggtagcgcccttggcaagcagctcaaccttaagctcttggacaactgggactccgtgacttcgacgttctccaagctccgcgaacagctgggcccagtgacccaggagttctgggacaatctggagaaggagactgaaggactccgccaggagatgtcaaaggacctggaggaggtgaaggctaaagtccaaccgtacctggacgattttcaaaagaagtggcaggaagagatggaactgtaccgccagaaggtggaacctttgcgggcggagctccaggaaggagcccgccagaagctccacgagctgcaagaaaaactttcccccctcggcgaagagatgcgcgaccgggcccgcgctcacgtggacgcgctgcgaacccatctggcgccatactcagacgagctgcggcagtgcctggctgcgcgccttgaggcccttaaagaaaatggtggcgctcgcctggccgaataccacgccaaggccaccgagcatctctccacgctgtctgaaaaagccaaacccgcattggaggacctgcggcaggggctgttgccggtcctggagagcttcaaggtgtccttcctgtccgcactggaagaatataccaagaagctgaacactcag

SEQ ID NO: 6502 - DNA, 801 bp, synthetic construct
  misc_feature 1..801: note = source = /note="Description of Artificial Sequence: Synthetic coding sequence"
  source 1..801: mol_type = other DNA
atgaaagcggcggtactaacgctagcggtattatttttaacgggttcgcaagcgcgacatttttggcaacaagatgaaccgccgcaatcgccgtgggatcgtgtaaaagatttagcgacggtatatgttgatgttctaaaagattcgggtcgagattatgtatcgcaatttgaaggttcggcgttaggtaaacaattaaatttaaaactactagataattgggattcggtaacgtcgacgttttcgaaattacgtgaacaattaggtccggtaacgcaagaattttgggataatttagaaaaagaaacggaaggtttacgacaagaaatgtcgaaagatttagaagaagtaaaagcgaaagtacaaccgtatctagatgattttcaaaaaaaatggcaagaagaaatggaactatatcgacaaaaagtagaaccgctacgtgcggaattacaagaaggtgcgcgacaaaaattacatgaattacaagaaaaactatcgccgttaggtgaagaaatgcgtgatcgtgcgcgtgcgcatgttgatgcgctacgaacgcatctagcgccgtattcggatgaattacgtcaatgtctagcggcgcgactagaagcgctaaaagaaaatggtggtgcgcgactagcggaatatcatgcgaaagcgacggaacatctatcgacgttatcggaaaaagcgaaaccggcgttagaagatttacgacaaggtctattaccggtactagaatcgtttaaagtttcgtttttatcggcgttagaagaatatacgaaaaaactaaatacgcaa

SEQ ID NO: 6503 - DNA, 801 bp, synthetic construct
  misc_feature 1..801: note = source = /note="Description of Artificial Sequence: Synthetic coding sequence"
  source 1..801: mol_type = other DNA
atgaaagcagccgttcttaccctcgccgtgctgttcctcaccggaagccaggcgaggcacttctggcaacaggacgaaccgccacaaagcccttgggacagagtgaaggacctcgctaccgtgtatgtggacgtcttgaaggattcaggccgggattacgtgtcacagtttgagggatccgcgcttgggaagcagctcaacctcaagctgttggataactgggactccgtgacctcaactttttcgaaactgcgggagcagctgggaccggtgacgcaggaattttgggataacctcgagaaggaaaccgagggactgcgccaggaaatgtccaaggacctcgaagaggtcaaggctaaggtgcagccgtaccttgatgatttccagaagaaatggcaggaagaaatggagctgtacagacaaaaggtcgagcctctgagagccgaactccaggaaggggcccggcagaaacttcacgagctccaggaaaaactgtccccgctgggggaagaaatgcgcgaccgcgcgcgggcccacgtggatgcattgaggacccatctggcaccatacagcgacgaactgcgacaatgcttggcagcccggttggaagccctcaaagaaaacggaggagctcggctcgcggaataccacgccaaagcaactgaacacctctcaaccctgtcagaaaaagccaagccagctcttgaggacctgcgccaaggtctgctcccagtgctggagtccttcaaagtgtcgtttttgagcgccctcgaggaatacacgaagaagctgaatactcag

SEQ ID NO: 6504 - DNA, 801 bp, synthetic construct
  misc_feature 1..801: note = source = /note="Description of Artificial Sequence: Synthetic coding sequence"
  source 1..801: mol_type = other DNA
atgaaggctgccgtcttgaccctggcggtgcttttcctgacaggctcccaggctcgtcatttctggcagcaggatgaacccccacaatctccctgggatagggtcaaagatctagcaaccgtgtatgtggacgtgctgaaggattcgggaagagattacgtaagtcagttcgaaggttcggccctaggtaagcagctcaatttgaagctcttggataattgggactccgtaacatcaacgttctcgaaactacgtgagcagctgggtcctgttactcaggagttttgggataatctggaaaaggaaactgaaggactgcgacaggaaatgtctaaggatctggaggaagtgaaggcaaaggtccagccgtaccttgacgacttccaaaagaagtggcaagaagagatggagctttaccgccagaaagtcgaacccctacgagcggagctccaggagggcgctagacaaaaactccatgaactccaggagaagctgtcccccttgggtgaagagatgcgggatcgcgcgagagcccacgtggatgcgctgcgcacacacttggccccatactcggacgaacttcgacagtgccttgctgcccgtcttgaagctctcaaggagaatggcggagccaggttggctgaataccatgccaaggcgacagaacacctcagcactctatctgagaaggccaagcccgcactggaagatctgcgacagggactgctccctgtcctcgagagcttcaaagtatcgtttctcagtgcccttgaagagtacacaaaaaagctcaatactcag

SEQ ID NO: 6505 - DNA, 801 bp, synthetic construct
  misc_feature 1..801: note = source = /note="Description of Artificial Sequence: Synthetic coding sequence"
  source 1..801: mol_type = other DNA
atgaaggccgcagtgctgaccttggcagtactgttcctgaccggttcccaggcacgccacttctggcaacaggacgaaccgccccaatccccttgggatcgagtgaaggatctggcaaccgtgtatgtggatgtccttaaagactcgggacgggattacgtttctcaatttgaagggtccgcgctcggcaagcaacttaatcttaaactgctggataattgggactcggttacttctacgttttccaagctgcgcgaacagttgggaccggtcacccaagaattctgggacaaccttgaaaaagaaactgagggactcagacaggagatgtccaaagatctcgaagaagtcaaggcgaaagtccagccttaccttgatgactttcagaagaagtggcaagaagagatggagctgtaccggcagaaagtggaacctcttagagcagaactgcaagaaggtgcgagacaaaagctccatgaacttcaagagaagctctctcctctcggcgaagagatgagggatagagccagggcacatgtggacgcacttagaactcatctcgccccatactcggacgagctgaggcagtgtctggcagctcgcctggaagctctgaaggaaaacgggggagcacgactggctgaataccatgccaaggcaacggaacacctttcgacccttagcgagaaggccaagccagccctggaggatctccgtcaaggactgttgccggttctcgagagttttaaggtgtcctttctttcggcacttgaggaatacaccaagaagttgaacactcag

SEQ ID NO: 6506 - DNA, 801 bp, synthetic construct
  misc_feature 1..801: note = source = /note="Description of Artificial Sequence: Synthetic coding sequence"
  source 1..801: mol_type = other DNA
atgaaggcagcggtccttacccttgcagtgctgtttctgaccgggtcccaggcccgccatttttggcagcaggatgagcccccgcagtcaccatgggaccgggtgaaggatctggcgactgtctacgtcgatgtgctgaaggatagcgggcgagattacgtctcccaattcgagggaagcgccctcggaaagcaacttaaccttaaactgctcgataattgggatagcgtgacgagcacgttctcgaaacttcgagaacagcttggccctgtgactcaggaattttgggataacctcgaaaaggaaaccgaggggctccggcaggagatgtcaaaggaccttgaagaagtgaaagcaaaggtgcaaccgtacctggacgatttccaaaagaagtggcaggaggaaatggaactttaccgacaaaaagtggaacctcttagggcagaactgcaggagggggcacgccaaaaacttcatgagctgcaggaaaaactttcccccctgggtgaagaaatgcgtgatagggcgagagcgcatgtcgacgcccttaggacccacctggccccttatagtgacgaacttcgtcaatgcctcgcagcaagactcgaggcacttaaggagaacggaggagcaagactggcagaataccatgcgaaggcaaccgaacacctctctaccctttcagaaaaagcgaagccagcacttgaggatcttaggcagggattgcttccagtgctcgaatcctttaaggtttcatttctttcggccttggaagagtacaccaagaaacttaatactcag

SEQ ID NO: 6507 - DNA, 801 bp, synthetic construct
  misc_feature 1..801: note = source = /note="Description of Artificial Sequence: Synthetic coding sequence"
  source 1..801: mol_type = other DNA
atgaaggcggccgtactgactctcgccgttctcttcctgaccgggtcacaggcacgccatttttggcagcaggacgaaccacctcagagcccctgggatagggtcaaggatctggcaactgtctatgtggatgtgttgaaggattccggccgggattacgtgagccagttcgaggggagcgcattaggaaaacagttgaatctcaaactgctggacaactgggactctgtcactagtactttttccaaactaagggagcagctaggccccgtcacccaggaattttgggacaacttagagaaggagaccgagggccttagacaggaaatgagtaaagacctggaggaggtgaaagcaaaggtccagccctacctcgatgatttccagaaaaagtggcaagaggagatggaattgtaccggcagaaggtggaacctctgagggcagaactgcaagaaggagctaggcaaaagctgcatgagctgcaggagaaattgagccctctgggcgaagagatgcgagaccgcgcacgtgcacacgtagatgctcttagaactcaccttgcaccttactctgatgagctgagacagtgtctggctgccagactagaggcactcaaagaaaatggaggcgccagattggcagaatatcacgctaaagccacagagcatttgtctacacttagcgagaaggcaaagcctgcactcgaggacctccggcaggggctgctgcccgtacttgagtcattcaaggttagttttcttagtgctctggaagagtatactaagaagctgaatacccag

SEQ ID NO: 6508 - DNA, 801 bp, synthetic construct
  misc_feature 1..801: note = source = /note="Description of Artificial Sequence: Synthetic coding sequence"
  source 1..801: mol_type = other DNA
atgaaggctgcagttcttactctcgctgtgctcttccttactggatctcaggctagacacttctggcagcaggacgaaccacctcaatccccctgggatcgcgtcaaggatctcgcaaccgtctacgtcgacgtgctgaaggactctggtcgtgattacgtttcccagttcgagggatcagccctgggcaaacagctcaacctgaaactcctcgacaactgggactctgttaccagcaccttcagcaaactccgtgaacagctgggaccagttacacaggaattctgggataatctggaaaaggaaaccgaaggcctccgtcaggagatgtctaaggatctggaggaggtaaaggccaaggttcagccctacttggacgacttccaaaaaaagtggcaggaagagatggagttgtaccgccaaaaagtggaaccccttcgtgccgaacttcaggagggagccagacagaagctgcacgaactgcaggagaagctctctcccctgggtgaggagatgcgtgatagagcccgcgctcatgtggacgccctgaggacccatctggcaccctactcagacgagctcagacagtgtcttgctgcccgtctggaagccctcaaggaaaacggcggagcaaggctggccgagtaccatgctaaggccactgagcaccttagtaccctgtccgagaaggcaaaaccagctctcgaggacttgaggcagggtctgctcccagtcctggaatcttttaaggtgtccttcctcagcgcattggaggagtatacaaagaagctgaatacccag

SEQ ID NO: 6509 - DNA, 801 bp, synthetic construct
  misc_feature 1..801: note = source = /note="Description of Artificial Sequence: Synthetic coding sequence"
  source 1..801: mol_type = other DNA
atgaaagctgccgtgctgaccctggctgtactgttccttactggcagtcaggcgcgccatttctggcaacaagatgaaccaccacagtctccctgggatagagtgaaagacctcgccactgtatacgtggatgtattgaaggactcaggccgcgattacgtgtctcagttcgaaggcagcgccctgggaaaacagctcaacttgaagctgttggacaattgggatagtgtgacgagcacattctccaaactcagggagcagcttggccccgtgacccaggagttctgggataaccttgagaaggaaaccgagggcctgcggcaggaaatgagcaaggatcttgaggaagtcaaggccaaggtccagccatatctagacgattttcagaagaaatggcaagaagaaatggagctttatcgtcaaaaggtggagccattgagagcagagctacaggagggcgccagacaaaaactacacgagcttcaggaaaagctgagtccattgggggaagagatgcgggacagggctcgcgcacacgtagatgcacttcgaacacacctggccccttattcagatgagctgagacagtgtcttgctgctcggctggaagcactgaaagagaacggcggtgcccggctggccgagtatcacgcaaaagccaccgagcacctgagcaccctcagtgagaaggccaagcccgccctagaggatctgagacagggtcttctacccgtgctagagtcctttaaagtaagcttcctgtccgccctggaggaatatactaaaaaactgaatacccag

SEQ ID NO: 6510 - DNA, 801 bp, synthetic construct
  misc_feature 1..801: note = source = /note="Description of Artificial Sequence: Synthetic coding sequence"
  source 1..801: mol_type = other DNA
atgaaggcagctgttctgactttggccgtgctttttctgactgggtcccaagcacgccacttctggcaacaagatgagccacctcaatcaccctgggacagagtgaaagatctagcaacagtgtatgtcgacgttctgaaggattctggaagagactacgtctcccagttcgagggatcggcactgggcaaacagctaaatctcaaattgctcgacaattgggatagtgttacctccactttcagtaagcttcgggaacaacttggcccagtgacacaggaattctgggataatctcgagaaagagactgagggcctcaggcaggagatgagtaaagatcttgaggaggttaaagcaaaagtgcagccatacctggacgatttccagaaaaaatggcaggaggagatggagctgtataggcagaaagtggagccacttagggccgaactccaagaaggggccagacagaaactgcacgaactccaagaaaagctctctccactgggggaggagatgcgagaccgggcaagggcccacgtcgacgcactgaggactcacttagccccttactccgacgagcttagacaatgcctagcggcgcgactggaagccctgaaggaaaacggcggggcccggctggcagagtatcatgccaaggccacggagcacctctctaccctatcagagaaagccaaacccgcgctggaggatctcagacaggggctcctgcctgtccttgagtcctttaaagtatccttcctcagcgcattggaagaatatacaaagaagttgaacacccaa

SEQ ID NO: 6511 - DNA, 801 bp, synthetic construct
  misc_feature 1..801: note = source = /note="Description of Artificial Sequence: Synthetic coding sequence"
  source 1..801: mol_type = other DNA
atgaaagcagctgttctgacactagcagtgctgtttctcacaggatctcaggctcgccacttctggcagcaggatgagcctccccagtctccttgggatcgggtaaaagatctggcaactgtgtatgtggatgtcctgaaggattctggaagagattatgtctctcagttcgaagggtccgcccttggaaaacagctaaaccttaaactcctagacaactgggacagtgtgacatctactttttcaaaactgcgggaacagttgggacctgtaactcaggaattctgggacaacctggaaaaagaaacagaagggttacggcaggaaatgagtaaagatctcgaagaagtgaaggctaaagtacagccctatctcgatgatttccagaagaaatggcaggaagaaatggaactgtatagacagaaagtggaacctctgagagcagaacttcaggagggagcccgtcagaaattacacgaacttcaggagaaactttctcccctcggggaagaaatgagggatcgggccagggctcacgtggatgcgctacgcactcatctcgccccatactcagatgaacttagacagtgtttggcagcaaggctagaagctctgaaagaaaacggaggggcacggctcgccgaatatcatgctaaagcaactgaacatctgagtacactgtcagaaaaagctaaacccgcgctcgaagatcttagacaggggctattacccgttcttgaatccttcaaagtgagtttccttagtgctcttgaagaatacacaaaaaaactcaacacacaa

SEQ ID NO: 6512 - DNA, 801 bp, synthetic construct
  misc_feature 1..801: note = source = /note="Description of Artificial Sequence: Synthetic coding sequence"
  source 1..801: mol_type = other DNA
atgaaagccgcggtactgacccttgccgtcctgttccttactgggagccaagctcggcatttctggcagcaggacgagcctcctcagtcgccttgggatagagtgaaagacctcgcaaccgtctacgtcgatgtcctgaaagatagcggtcgcgattacgtgtctcaatttgaaggatcggcgttgggaaaacagctgaacctcaagctgctcgataactgggactcggtgacttcaacttttagcaaactgagagagcaactgggaccagtgacgcaggaattctgggacaacctggaaaaggaaactgagggactgagacaggagatgtccaaggatctcgaggaggttaaagcgaaggtgcagccgtacttggacgacttccaaaagaaatggcaggaagagatggaactgtatagacaaaaagtggaaccactgcgggccgaacttcaggaaggtgcacgacaaaaacttcatgaactgcaagagaagctctctccactgggcgaagaaatgcgcgatagggcacgcgcccatgtggatgcccttagaacgcaccttgcaccatactcagatgaacttaggcaatgtttggcggcccggcttgaagcactgaaggagaacggaggagcgcggcttgctgaataccacgctaaggcaactgaacacctgagcactctgtccgaaaaggccaaaccggcgctcgaggatctgcgccaaggtctgttgcctgtcttggagtcgtttaaggtgagctttctgagcgcactcgaggaatacaccaagaagctgaatacccag

SEQ ID NO: 6513 - DNA, 801 bp, synthetic construct
  misc_feature 1..801: note = source = /note="Description of Artificial Sequence: Synthetic coding sequence"
  source 1..801: mol_type = other DNA
atgaaggccgcagtgctgaccctggcggttctctttctcactggatcgcaggcacggcacttttggcagcaggatgaaccacctcaatcgccatgggacagagtcaaggacctcgcaaccgtgtacgtggacgtcctgaaggactcaggccgtgactacgtgagccagttcgaaggatcggcgcttggtaagcaacttaacttgaaactgctggacaattgggactcggtgacctccaccttctcgaagctccgcgaacagctgggtccggtgactcaggagttctgggacaatcttgagaaagagactgaagggcttcggcaagagatgtctaaggacctggaagaggtgaaagccaaggtgcaaccgtacttggatgactttcagaagaaatggcaagaggagatggagctctaccggcagaaagtggaaccactcagggcagagttgcaggaaggggccagacaaaagctccatgagctgcaggaaaaactctcaccgctcggagaagaaatgcgcgatcgagccagagcccatgttgacgcgctgcgcactcatctggccccttatagcgatgaattgagacaatgtctggcggctcggctcgaggcactcaaggaaaacggcggtgcgaggttggctgaataccacgccaaggcaactgaacacctgagcaccctgagcgagaaggccaagccagccctggaagatctgaggcagggactgctgccagtgctggaatcattcaaggtgtccttcctctcggccctggaggaatacaccaaaaagctcaatactcag

SEQ ID NO: 6514 - DNA, 801 bp, synthetic construct
  misc_feature 1..801: note = source = /note="Description of Artificial Sequence: Synthetic coding sequence"
  source 1..801: mol_type = other DNA
atgaaagccgcggtccttactctggcggtcctgttcctgaccggctcccaggcaagacacttctggcaacaggatgagccacctcaatctccttgggatcgtgtcaaggacttggcgactgtatatgtcgatgttctgaaagattcgggtagggactatgtttcccagttcgagggcagtgccctcggtaagcagctcaacctgaagcttctcgataactgggattccgtgacctcgaccttctctaagctccgggagcaactcggccctgttactcaggagttctgggacaacctggagaaagagaccgaaggcctcaggcaggaaatgtccaaggatttggaggaggtcaaggccaaggtgcagccttacctggacgacttccagaagaagtggcaagaggagatggaactgtaccgccagaaggtcgagccgctacgcgctgagctgcaggagggcgcacggcagaagctccacgagcttcaggaaaagctctctccacttggagaggagatgcgcgatcgagctcgcgcccatgtcgatgcactgcgcacccacctggcaccttacagtgacgagcttcgtcagtgtctcgccgctcgcctggaggctctgaaggagaacggtggcgcccgacttgccgagtaccacgccaaggctaccgagcacttgagcaccctctcggagaaggccaaaccggctttggaggacctccggcagggactcttgcccgtcctcgagtccttcaaggttagtttcctgagcgcgctagaggagtacaccaaaaagttgaacactcag

SEQ ID NO: 6515 - DNA, 801 bp, synthetic construct
  misc_feature 1..801: note = source = /note="Description of Artificial Sequence: Synthetic coding sequence"
  source 1..801: mol_type = other DNA
atgaaggccgcagtgctcactctggctgtcctgttcctgaccggaagccaagctcgacacttctggcagcaagatgaaccgccgcagtccccgtgggacagggtgaaggatctggcgactgtgtatgtggacgtgttgaaggactccggcagagattacgtcagccaattcgagggatcggccttgggaaagcagctcaacctgaaattgctggacaactgggattcggtgacttccactttctcaaagctgcgggaacaacttggacctgtgacccaggaattctgggataatctggaaaaggaaactgaggggctgcgccaggaaatgtccaaggatcttgaagaggtcaaggctaaggtgcagccatacctggacgattttcaaaagaagtggcaggaagagatggagctgtatcgccagaaggttgaaccgctcagagcagagctgcaagaaggagcgcgccagaagctccatgagctgcaggaaaaactgtccccgctcggagaagaaatgcgggaccgggctcgggcccacgtggacgcactccggacccatcttgccccgtattcagatgaacttagacagtgcttggcagctcgcctggaagccctcaaggagaacggaggagcgcgcttggccgagtaccacgcaaaggctactgagcacctgagcacgctgtcggaaaaggccaaaccagccctcgaagatctgcgccaagggctgcttccggtgctcgagtccttcaaggtgtcgttcctgagcgctctcgaagagtacactaagaagctcaacactcag

SEQ ID NO: 6516 - DNA, 801 bp, synthetic construct
  misc_feature 1..801: note = source = /note="Description of Artificial Sequence: Synthetic coding sequence"
  source 1..801: mol_type = other DNA
atgaaagcagctgtgcttaccttggcagtcctgtttctgaccggatcacaggcaagacatttttggcaacaggatgaaccgcctcagtcgccttgggatcgagtgaaagacctggcgactgtgtacgtggatgtgcttaaagatagcggtagagattacgtctcccaattcgaaggatccgcactcggaaagcagctcaacctgaagctgctggataactgggactcggtgacttccactttttcgaaactcagagaacaacttggtcccgtcacccaagaattctgggataacctggaaaaggaaactgagggactgcgacaagagatgtccaaagatctggaagaggtgaaagccaaggtgcagccataccttgacgactttcagaagaagtggcaagaagagatggaactgtacagacagaaggtcgagccattgagagcagaacttcaggagggtgcgaggcagaagttgcacgagctccaagaaaagctgtcgcctcttggcgaagaaatgagagatcgagcgagagcacatgtcgacgctcttaggacccaccttgccccgtactccgacgaactgagacagtgcctcgcagctcgcctggaagcactgaaggaaaacggaggggcccgcttggcagaataccatgcaaaggcaaccgagcatctttccacgctgtcagaaaaggccaagcccgccctggaggatctcagacaaggactgctgcctgtactcgagtcctttaaagtgtcgttcctgagcgcactggaggagtacactaaaaagctcaacacgcag

SEQ ID NO: 6517 - DNA, 801 bp, synthetic construct
  misc_feature 1..801: note = source = /note="Description of Artificial Sequence: Synthetic coding sequence"
  source 1..801: mol_type = other DNA
atgaaagcggcggtgttgacattggctgtgctcttcctgaccggaagccaggccagacatttttggcaacaggatgaaccaccacaatctccatgggatcgtgtgaaggacctggccaccgtttatgttgatgtgctcaaggatagcggaagagactacgtctcgcaatttgaagggtctgctcttggcaagcagttgaatctgaagttattggataactgggattcagtgacctctaccttttccaagttacgggagcagctgggccccgtcacccaggagttttgggataacctcgagaaagagaccgagggcttgagacaggagatgagcaaagatttggaggaagtgaaggctaaagtgcagccgtatctcgacgactttcagaagaaatggcaggaggagatggagctctaccgtcagaaggtggagccgttaagagcagagctccaggagggcgctcggcagaagctacacgagctgcaggagaaactctcaccactcggagaggagatgcgtgatcgggcccgggctcacgttgacgccctaaggacccacttggccccctacagcgacgagctacgccaatgcctcgcagcaaggctcgaggcgctgaaagagaacggcggggctcggttggccgagtatcatgcgaaggcaacggagcatctcagcactctgtctgaaaaggccaagcccgccctggaagacctgagacaaggactgctgcccgtgctagagtcatttaaggtttcttttctgtccgccctggaggaatacaccaaaaaactcaacacccag

SEQ ID NO: 6518 - DNA, 801 bp, synthetic construct
  misc_feature 1..801: note = source = /note="Description of Artificial Sequence: Synthetic coding sequence"
  source 1..801: mol_type = other DNA
atgaaggctgccgtgttgactttggcagtgctttttcttacggggagccaagctcgtcacttctggcaacaagacgaacccccacaaagcccttgggatcgcgtcaaggacctggcgactgtttacgtcgatgtgctcaaagacagcggtcgggattatgtctctcaatttgaaggatcggcactgggtaagcagcttaacctgaagctcctggataattgggattccgttacctcaaccttctctaagctcagagagcagttgggacctgtaacccaagaattttgggacaatctggagaaggaaactgaagggcttcgacaggagatgagcaaggatctggaagaggtgaaagcgaaagtgcagccatacctcgacgatttccagaagaagtggcaggaggaaatggaactgtataggcagaaggtcgagcccctccgtgccgaactgcaagaaggagccaggcaaaagctgcatgagctccaggagaaactctcgcctcttggcgaagagatgcgagatagagcccgtgcacatgtggatgcccttcgtacccacctcgcaccctactcagatgagttgcgccaatgtctggcagctcggctcgaagcactgaaagaaaacggaggggccagactggcagagtaccacgcaaaggcaactgaacatctgagcacgcttagcgagaaagccaagcccgcgcttgaggacctcagacagggcctgctgccagtgcttgaatcgttcaaggtgtcgtttcttagtgcactcgaagaatacactaagaagctgaacacccag

SEQ ID NO: 6519 - DNA, 801 bp, synthetic construct
  misc_feature 1..801: note = source = /note="Description of Artificial Sequence: Synthetic coding sequence"
  source 1..801: mol_type = other DNA
atgaaagccgcggtgctcacgttggccgtactgtttcttactgggtctcaggcacgacacttttggcagcaggacgaaccaccccagtctccttgggaccgtgtgaaggacttggccacagtttatgtggacgttctgaaggactctgggcgagattatgtttcccaattcgaaggatcggcattaggcaagcaactcaacctgaagctacttgacaactgggattcagttacatccacgtttagcaagttgcgtgaacagttgggccctgtgacccaagagttctgggacaatctcgaaaaggagacggagggtctgaggcaggaaatgagcaaggaccttgaagaggtaaaagctaaggttcaaccatatctcgacgactttcagaaaaagtggcaggaagaaatggagttgtatcgacagaaggtagagccgcttcgagctgaactgcaggagggcgcacgccagaagttgcatgagcttcaagagaaactgtctcccttgggtgaggagatgagagacagagcccgtgctcacgtcgatgcgctaagaacccacctggccccatatagcgacgagctccggcagtgtttagcagcccgattggaggcactcaaagaaaacgggggagcacgcttggctgagtatcacgctaaagctactgagcacctctccactctatctgaaaaagctaagccggctcttgaggatctccgtcagggcctactaccagttttggagtcgttcaaggtgtcgtttctatccgccctcgaagaatatacaaaaaagctcaatacccag

SEQ ID NO: 6520 - DNA, 801 bp, synthetic construct
  misc_feature 1..801: note = source = /note="Description of Artificial Sequence: Synthetic coding sequence"
  source 1..801: mol_type = other DNA
atgaaagcagccgttttgacgttggcggttctctttttaaccggaagtcaagctcggcatttttggcaacaggacgagcccccacagagcccatgggatcgcgtcaaagacctcgccacagtctacgttgatgtgctgaaagactccggcagagactacgttagtcaattcgaggggtcagctttgggaaaacagctcaatttaaagctgctggacaattgggactcagtcacatctactttcagcaagctgcgagagcagttgggccccgtgacacaggaattctgggacaacttggagaaagaaacagaggggctgaggcaggagatgtctaaagacctggaggaagtgaaagcaaaggtccagccctatctcgatgatttccagaagaagtggcaagaggagatggaactataccgccagaaagtggaacctctgcgcgccgagctccaagagggagcgcgccagaaattgcatgagctgcaggaaaaactctctcccctgggagaggagatgagagatcgcgcccgagcacacgttgatgccttacggacccacctcgcaccatattctgatgagcttcggcagtgcttggccgcacggctggaagcccttaaggagaatggaggcgcccgtctcgcggagtatcacgctaaagcgaccgaacatctttccactctgagtgagaaggccaaacccgccctggaggacctgcgccagggtttacttccggttttagagtcttttaaggtcagcttcctgagcgcgctcgaggagtacaccaagaaactgaatactcag

SEQ ID NO: 6521 - DNA, 801 bp, synthetic construct
  misc_feature 1..801: note = source = /note="Description of Artificial Sequence: Synthetic coding sequence"
  source 1..801: mol_type = other DNA
atgaaagccgccgtgctgacccttgcagtcctgtttcttactggatcgcaggcacgccacttctggcagcaggatgaaccgcctcagtccccttgggaccgggtgaaggatctggcaactgtgtatgtcgatgtgctcaaggattccggaagggattacgtgagccagtttgagggttcggcacttggcaagcaactcaatctgaagctgctcgataattgggactcggtcacctcgaccttttcaaagctgcgtgagcagctgggacctgtgactcaagaattttgggacaacttggaaaaagaaactgagggactgcgccaagagatgtcgaaggatcttgaagaagtgaaagcaaaggtgcagccatacctggacgatttccaaaagaagtggcaagaagaaatggagctgtaccgacagaaggtggagcccctgcgtgccgagttgcaggaaggggcgcggcaaaaacttcatgagcttcaagagaagctgtcacctttgggagaagaaatgagagatagagcacgtgcccatgtggatgcgcttaggacccacctggcgccttactccgatgagctccgccaatgcctggcagcgcgcctcgaagcacttaaagaaaacggtggtgcacgcctggcagaataccatgcaaaggcaaccgaacacctttcaactcttagcgaaaaggcaaaacctgccctcgaagatctcaggcagggactgctgccagtcctggaatcttttaaggtgtcgtttcttagcgcgctcgaggaatacaccaagaagctgaacacccaa

SEQ ID NO: 6522 - DNA, 801 bp, synthetic construct
  misc_feature 1..801: note = source = /note="Description of Artificial Sequence: Synthetic coding sequence"
  source 1..801: mol_type = other DNA
atgaaggcagcagtgctgactctggccgtgctgttccttaccggaagccaagcaagacatttttggcaacaagatgaacccccacaatccccttgggatagggtgaaagaccttgcaaccgtgtacgtggatgtgctgaaggattcaggaagagattacgtgagccagttcgagggttcggccttgggaaagcagcttaacctgaagctcctggataactgggattcggtgacctcgactttttcaaagctgcgtgaacagttgggaccagtgacccaagaattttgggataatctggaaaaggaaactgagggactcagacaagagatgtcaaaagatcttgaagaagtcaaggctaaggtgcagccctacctcgatgatttccagaagaaatggcaagaagaaatggagctgtaccggcagaaagtcgaaccacttcgggccgagcttcaggaaggagccagacagaagctccatgaattgcaagaaaagctgagccctcttggcgaagagatgagggaccgggcgcgagcccatgtggatgctctccgcacgcacctggctccatactccgatgaactgagacagtgtctggctgcacggctggaagcactcaaagagaatggaggggcccgccttgcagaataccacgctaaggcaacggaacacctttccactctgagcgagaaagcaaagccagcactggaggatctcagacagggcttgcttcctgtgcttgaatcattcaaggtgtctttcttgtcggcattggaagaatacaccaagaagctgaacacccag

SEQ ID NO: 6523 - DNA, 801 bp, synthetic construct
  misc_feature 1..801: note = source = /note="Description of Artificial Sequence: Synthetic coding sequence"
  source 1..801: mol_type = other DNA
atgaaggcagctgtgctcactcttgcagtcctgtttcttacggggtcacaggctcggcatttttggcagcaagatgaacctccacaatcgccatgggacagagtgaaggatctggcgaccgtgtatgtggacgtcctgaaggattccggccgcgattacgtgtcccagttcgaaggatcagcacttggaaaacaacttaacctgaagctgctggataattgggattcagtgacgagcaccttcagcaagctgagggaacaactggggccggtcacccaagaattttgggataacctcgaaaaggaaaccgagggactgcgtcaagaaatgagcaaggatctcgaggaagtgaaagcaaaggtccagccttacctcgacgacttccagaagaagtggcaagaagagatggaactctacaggcagaaagttgagcccctcagagcagaactccaagagggtgcgagacaaaagctgcatgaacttcaagaaaaactttcgccattgggagaggagatgagagatagagctagggcccacgtcgacgcactccgtacccatcttgcaccttacagtgacgaactgaggcagtgtttggcggcacgccttgaagcattgaaagaaaatggtggagcaaggctggctgaataccatgccaaagccaccgagcacttgtccactctttccgagaaggcaaaacctgccttggaagatctgcggcaaggcttgctccccgtactcgaatcgtttaaggtatcgtttctttcggccctggaggagtacaccaagaagctgaacactcag

SEQ ID NO: 6524 - DNA, 801 bp, synthetic construct
  misc_feature 1..801: note = source = /note="Description of Artificial Sequence: Synthetic coding sequence"
  source 1..801: mol_type = other DNA
atgaaagccgccgtgctgaccctcgccgttcttttcctgacagggagtcaggcccgacacttctggcagcaggatgagcctccacaatccccctgggatcgggtaaaggatctcgcgacagtgtatgtggatgtgttgaaagattcaggaagggactatgtctctcagtttgaagggtcagctttgggtaagcaactgaatctgaagctgctggataactgggacagcgttacctctacgttctctaaacttagggaacaactgggccccgttactcaggaattctgggataatcttgaaaaggagaccgagggtctgcgacaagaaatgagtaaggacctcgaggaggttaaggctaaggtgcagccatacctcgacgatttccagaaaaagtggcaggaagaaatggagctgtaccgacaaaaggtggagccactgcgcgccgagctccaagagggggcgcggcaaaagcttcacgagctgcaagagaagctgtcacctctcggcgaggagatgagggacagggccagggcccacgtggatgcactcagaacgcacctcgctccctacagcgatgaactgcggcaatgcctggccgccaggctggaggccctgaaggaaaacggtggggccaggctcgccgaatatcacgctaaggcaactgaacacttgagtactctgagcgaaaaggccaaaccggctctggaggatctgagacagggacttcttccagttttggagtcctttaaagtgtctttcctttccgctctcgaggagtacactaaaaagctgaacacccag

SEQ ID NO: 6525 - DNA, 801 bp, synthetic construct
  misc_feature 1..801: note = source = /note="Description of Artificial Sequence: Synthetic coding sequence"
  source 1..801: mol_type = other DNA
atgaaggcagccgtgctcactctcgctgtgcttttcctgacagggtcacaggcaagacatttctggcaacaagacgagccaccacagtccccttgggacagagtaaaggacttagccaccgtctacgtggatgtcctcaaagatagcgggcgcgattacgtctcgcagttcgaagggagcgccctaggaaaacagctgaacctgaagctgctggataactgggatagcgttaccagcactttctcaaagctgcgtgaacagttgggcccagtgacacaggaattttgggacaacctcgagaaggagacagaaggcttgaggcaagagatgtcgaaagacttagaggaggtcaaggccaaggtgcagccatacctcgatgatttccagaagaaatggcaggaagaaatggaattatatcgccaaaaggtggagcctttgcgggccgaacttcaggagggtgccagacagaaactccatgagctccaagagaagttgagcccactgggcgaagaaatgagggatcgagcccgagcacatgtcgacgccctaaggacacatctggcgccgtactctgacgagcttaggcaatgcttggcagctagactggaggccctcaaagagaatggaggggccagacttgccgaataccacgctaaggctactgagcatctatcaacactgtcagagaaggccaaacctgcccttgaggatctgcggcaagggctcttgcccgtcctggaatccttcaaggtgtcgttcctatctgctctcgaggaatatacaaagaaactgaacactcag

SEQ ID NO: 6526 - DNA, 801 bp, synthetic construct
  misc_feature 1..801: note = source = /note="Description of Artificial Sequence: Synthetic coding sequence"
  source 1..801: mol_type = other DNA
atgaaagcagccgtgctgacactggcagtgctcttcctgacaggctcccaggcgcggcacttctggcagcaggatgagcccccacagagcccctgggaccgagtaaaagatctggcaactgtttatgtagacgtgctcaaggactctgggagggattatgtgagtcagtttgaaggtagtgcccttgggaaacagttaaacctcaagctcctggacaattgggattctgttactagcactttctccaaactgcgtgagcaactgggacctgttacgcaagagttctgggataatctggagaaggaaaccgaaggcttaagacaggagatgtcaaaggatctggaggaggtcaaagccaaggtccagccatatcttgatgatttccagaagaagtggcaagaagagatggaactgtaccggcaaaaggtggaacccctgagggcagaactccaagaaggggctaggcagaaattgcatgagttacaggagaaactcagcccactcggtgaagagatgagggatcgagctagagcccacgtggacgctttgcgcacacacctggctccgtactccgacgaattgcgacagtgcctcgccgccagactggaagccctgaaagaaaatggaggtgctagactggccgaataccacgctaaggcgaccgagcatttatcaactctcagtgaaaaggcaaagccagccttggaggacctacggcaaggccttttgccagtgcttgagagcttcaaggtcagttttctctctgcattggaggagtacactaagaagcttaatactcaa

SEQ ID NO: 6527 - DNA, 801 bp, synthetic construct
  misc_feature 1..801: note = source = /note="Description of Artificial Sequence: Synthetic coding sequence"
  source 1..801: mol_type = other DNA
atgaaggccgcagttttaacattagcggtgctgttcttgacagggtctcaggcaagacatttttggcagcaggacgaaccaccccagagcccttgggatagggtaaaggatctggcaaccgtgtatgttgacgttctgaaggacagtggccgggactacgtatcacagtttgaaggatctgctctcgggaaacagctgaatctcaagctcttggacaactgggacagcgttacaagcacttttagcaagttgcgggagcaacttggacccgttacacaggaattttgggataacttagagaaggaaactgaaggccttcgtcaggagatgagtaaggatctggaagaagtaaaagccaaagttcagccttacctggacgatttccagaagaagtggcaggaggaaatggagttgtataggcagaaggtggagcccctccgggctgagctgcaggagggggctagacaaaagctccacgagctccaggagaagctgtctcccctcggtgaggaaatgagggatagagctcgggcccatgtggacgctttaaggacccacctggctccttatagtgacgaactccgccagtgtctggcagcgcggctggaggcgttgaaagagaatggcggcgctcggttagctgaatatcatgcgaaagccaccgaacacctgtctacactctctgagaaggccaaaccagcactggaggacctaagacagggcctacttcctgtactagaaagtttcaaagtgtcgttcctctccgctctggaagagtataccaagaaactaaatacgcag

SEQ ID NO: 6528 - DNA, 801 bp, synthetic construct
  misc_feature 1..801: note = source = /note="Description of Artificial Sequence: Synthetic coding sequence"
  source 1..801: mol_type = other DNA
atgaaggcagcagtcctgaccctggccgtgctgttcctgacggggagccaggcgcggcatttttggcagcaagacgagccgccgcagagcccctgggaccgcgttaaagatctggccacggtgtacgtcgatgtgttgaaggacagcggccgtgactacgtctctcaatttgaaggtagcgctttgggaaagcaactgaacctaaagctcctggataattgggattctgtgacctccaccttcagtaaactgcgggagcaactgggccccgtaacacaggagttttgggacaacctggagaaggaaaccgaaggtctgcgtcaggagatgtcaaaggatctggaggaggttaaggcaaaagtgcaaccttacctcgacgattttcagaaaaagtggcaggaggaaatggagttataccgccagaaggtggaaccgctgagggccgagttacaggaaggcgcgcgccagaagctgcacgagctgcaggagaagttgtctcctctgggagaagagatgcgcgatcgcgcgcgcgcccatgtggatgcacttcgtacccacttggccccgtactccgacgagctgcgccaatgcctggctgcacggctggaggccctcaaggagaatggtggggctagactcgcagagtaccacgctaaagcgaccgagcatctttccaccctgtccgagaaggctaagcctgcgcttgaagatctgcgacagggtttgctgccagtcctggagagctttaaagtttcattcttgagcgctcttgaggagtataccaaaaaattgaacactcag

SEQ ID NO: 6529 - DNA, 801 bp, synthetic construct
  misc_feature 1..801: note = source = /note="Description of Artificial Sequence: Synthetic coding sequence"
  source 1..801: mol_type = other DNA
atgaaagctgccgtcctcactctcgcggtgctgttcctcactgggtcacaggcgaggcacttctggcagcaggatgaacctccgcagtccccatgggacagagtgaaagatctggctaccgtctacgtggatgtcctgaaggattccggtagagactacgtctcacagtttgaaggatccgcattgggaaaacagctcaacctgaagctgctcgataactgggatagcgtaacgtccacgttcagcaagctgcgggaacagttggggccggtaacacaagagttctgggacaacctggagaaagagacagagggcctccgccaggaaatgtccaaggacttggaagaggtgaaggccaaagtacagccttacttggacgacttccagaaaaaatggcaggaggaaatggagttgtaccggcagaaggtcgagcccttgcgagcagaactgcaagaaggggctcggcagaaactgcacgaactccaggaaaaactttcacccctcggtgaggagatgcgcgacagggcaagggctcacgtggacgccttgcggacacatctcgctccatattcagatgaactgagacagtgtcttgccgctaggttggaagcgctgaaggaaaacggtggggcgagattggccgagtatcacgctaaggctaccgaacatctcagtaccctgtccgaaaaggccaagcctgctttggaagatctccgccagggcctgcttcccgtgcttgaaagcttcaaagtatcttttctcagtgccctggaggaatatacaaaaaagttgaacacccag

SEQ ID NO: 6530 - DNA, 801 bp, synthetic construct
  misc_feature 1..801: note = source = /note="Description of Artificial Sequence: Synthetic coding sequence"
  source 1..801: mol_type = other DNA
atgaaagccgcagttctcactcttgctgtgctgttcctgaccggatcgcaggcgcggcacttctggcagcaagacgaaccgccgcagtcgccgtgggacagggtgaaggaccttgcgacggtgtacgtggacgtgctgaaggactcgggacgcgattacgtgtcacaatttgaggggagcgctcttggcaagcaactgaacctgaagttgctcgacaactgggactcggtaacttcaaccttctccaagctgagagaacagctcggcccggtcacccaggaattctgggacaatctggaaaaggaaaccgaaggcctcaggcaggaaatgagcaaagatctggaagaagtcaaggccaaggtgcaaccctacttggacgacttccaaaagaagtggcaggaagaaatggagctgtaccgccagaaggtcgaacctctcagagccgagctccaggagggagcgcgccagaagctgcacgaactgcaggaaaaactctcccccctcggagaggaaatgagagacagagcaagggcccatgtggacgccctccgcacccatctggccccgtactcggatgaactgcggcaatgcctcgcagccaggctcgaagccctgaaggaaaacggcggagccaggctggccgagtaccacgcgaaggccactgaacacctgtccactctcagcgaaaaggcgaagccggccctggaggatctgagacagggactcttgcctgtcctggagtcgttcaaagtcagcttcctttcagccctggaagagtatactaagaaattgaacacccaa

SEQ ID NO: 6531 - DNA, 801 bp, synthetic construct
  misc_feature 1..801: note = source = /note="Description of Artificial Sequence: Synthetic coding sequence"
  source 1..801: mol_type = other DNA
atgaaagcagcagtattgacgctcgcagtactatttttgaccggctcacaagcacgccatttctggcaacaggatgagccaccacagagcccgtgggaccgtgtcaaagatttagctacagtctacgtggatgtcctgaaagattcaggtcgtgattatgtgtctcagtttgagggcagcgcgttgggtaaacagctgaacttgaagctgcttgacaactgggattctgtaacaagcacttttagtaaacttagagaacaactgggacctgtgacgcaggaattctgggacaaccttgaaaaagaaacggaaggacttcgtcaggaaatgtctaaagatcttgaggaagtaaaagctaaagtgcagccttacctcgatgactttcaaaaaaaatggcaagaagagatggaattgtacagacaaaaggtggaaccgttaagagcggaattgcaggagggagcaagacaaaaactccatgaattacaagaaaaactctcaccgcttggggaggaaatgcgcgacagagcgcgcgcacatgttgacgcccttagaacacatcttgccccgtatagcgacgaattgaggcaatgcctggcagcacggcttgaggctttaaaagaaaacggaggggcgcgcttagccgaatatcatgctaaagcaactgaacatcttagtacattgtcagaaaaagccaaaccggcgcttgaagatttgcggcagggactgctgcctgtacttgaaagctttaaggtctccttcctaagcgctttagaagagtatacgaagaaattaaatacacag

SEQ ID NO: 6532 - DNA, 801 bp, synthetic construct
  misc_feature 1..801: note = source = /note="Description of Artificial Sequence: Synthetic coding sequence"
  source 1..801: mol_type = other DNA
atgaaagccgctgtgctgaccctggctgtgttattcctcaccgggtcccaggctaggcacttttggcagcaggatgaacccccacagagcccctgggatcgagtaaaggacctcgcgactgtctatgtggacgtgttgaaggacagcggacgcgactacgtgtcccagttcgaaggaagcgcccttggtaagcagctaaacttgaaactgctagacaattgggacagcgtgacaagcacgtttagtaagctcagggagcagctgggaccagtgacccaggagttttgggataatttggagaaagaaacagaggggctgagacaagaaatgtccaaagaccttgaagaggttaaggctaaggtccaaccctaccttgacgacttccagaagaagtggcaagaagagatggaattgtatcgacagaaagtggagcctttgcgcgccgaactccaggaaggcgcaagacaaaagctccacgagcttcaggagaagttatctcccctgggcgaggagatgcgcgaccgtgctagagctcacgtggatgcccttcgcactcacttggctccttatagtgacgaattgcgccagtgcctggccgctcggctggaggcgctgaaggaaaacggtggagcacggcttgctgagtatcacgctaaggcaactgaacacctcagcacactctccgaaaaggctaagccagctttagaggaccttcgacagggcttgctgcctgtgctggaatcgttcaaggtgtccttcttaagtgccctagaggagtacactaagaagctgaacacacaa

SEQ ID NO: 6533 - DNA, 801 bp, synthetic construct
  misc_feature 1..801: note = source = /note="Description of Artificial Sequence: Synthetic coding sequence"
  source 1..801: mol_type = other DNA
atgaaggcagcagtcctgacactggcagtgctatttttgaccgggagccaagccaggcatttctggcaacaggacgaacctccacagtcaccctgggacagggtaaaggatctagccacagtgtacgtcgatgtactgaaagattccggacgagattacgtgagccaatttgaaggcagtgcattaggaaagcaattaaatcttaagttgctcgacaattgggatagcgtgacgagcaccttttctaagttgcgcgagcaattgggtcccgtgacacaggagttttgggataatctggagaaagagaccgaaggtctccgtcaggaaatgagcaaggaccttgaagaagtgaaggcaaaagtgcagccttacctcgatgactttcagaagaaatggcaggaggaaatggagctttaccggcagaaggtggagccccttagggctgaactgcaggaaggcgctagacaaaaactgcatgagctgcaggaaaaactgtctccactcggggaagaaatgcgagaccgcgcccgggcccatgttgacgccctgcgtacccatctagccccctacagcgacgaactgcgccagtgcttggcagcccggttggaggcactcaaggaaaatggaggagcaagactcgctgaatatcatgctaaggccaccgagcacctatccactctgtcggagaaagcaaaaccagctctggaggaccttcgacaggggttgctaccagtattggagtcgttcaaggtgtcctttttatctgctctggaagaatatacgaagaagctgaacactcaa

SEQ ID NO: 6534 - DNA, 801 bp, synthetic construct
  misc_feature 1..801: note = source = /note="Description of Artificial Sequence: Synthetic coding sequence"
  source 1..801: mol_type = other DNA
atgaaagcggctgttctgactctggcggttttgttcctgaccggttctcaagccaggcatttttggcagcaggatgagccaccccaatccccttgggacagagtaaaagacctggcaaccgtgtacgtggatgtactgaaagacagtgggcgggactacgtgtctcagtttgaagggagtgccctgggcaagcagctgaatctgaaactattagacaattgggattctgtgaccagcactttctcaaagctgagggaacagctcggccctgtcacacaggagttttgggacaacctggagaaggagactgaaggcctgcgtcaggaaatgagcaaggatctagaagaggtcaaagctaaggtgcagccgtatctggacgactttcaaaagaagtggcaggaggagatggagctctatagacagaaggtagagcctctgcgggcagagctgcaggaaggcgcccgtcagaagctgcatgagttgcaggaaaagttaagccctcttggagaggaaatgcgcgaccgggctagagcccacgtggatgcactgcgcacccatctggcgccttactccgacgagcttcgacagtgcctcgcagcgaggctggaggctctgaaggagaacgggggcgctcgcctggccgaatatcacgccaaagctaccgagcacttgtcaactctcagcgagaaggccaagcccgctctcgaggacctgagacaggggctgctaccggttttagaaagcttcaaagtgtctttcctgtccgccctcgaagaatacacgaagaagctcaacacccag

SEQ ID NO: 6535 - DNA, 801 bp, synthetic construct; identical to SEQ ID NO: 6527
  misc_feature 1..801: note = source = /note="Description of Artificial Sequence: Synthetic coding sequence"
  source 1..801: mol_type = other DNA

SEQ ID NO: 6536 - DNA, 801 bp, synthetic construct
  misc_feature 1..801: note = source = /note="Description of Artificial Sequence: Synthetic coding sequence"
  source 1..801: mol_type = other DNA
atgaaagcggccgtgctgaccctcgcggtgctgtttctcaccggaagccaggccaggcatttctggcagcaagacgagcctccacagtcgccgtgggacagagtcaaggatctcgcgaccgtctacgttgatgtcctgaaagactccgggagagattatgtctcgcagttcgagggatcagcgctgggaaagcagctgaaccttaagctgctcgacaattgggactccgtgacgtccaccttctccaagctccgcgaacaactgggaccggtgactcaggaattttgggataatctcgaaaaagagacggaagggttgaggcaggaaatgtctaaagatttggaggaagtcaaggctaaggtgcaaccgtacctggatgactttcaaaagaagtggcaggaagaaatggaactctaccggcagaaggtggagcccttgcgggccgaactccaggaaggagcccgccaaaagctccacgagctccaggaaaagctgtctccgctgggagaagaaatgcgggaccgcgcccgcgctcacgtcgacgctctgaggactcatttggccccttactcggacgagctgcggcaatgcctcgccgcgcggctggaggcgctcaaagaaaacggaggagcgcgactcgcagaataccacgccaaggcgaccgaacacctctccaccctctcggagaaagccaaacctgcgctcgaggatctgagacaggggctgctgccagtgctggaatcattcaaggtgagcttcctgtcggctctggaagagtacaccaagaaactcaacacgcag

SEQ ID NO: 6537 - DNA, 801 bp, synthetic construct
  misc_feature 1..801: note = source = /note="Description of Artificial Sequence: Synthetic coding sequence"
  source 1..801: mol_type = other DNA
atgaaagcggctgtattaactcttgcggtactttttttaacagggtctcaggcacgacacttctggcagcaggacgagcctccacagtctccctgggaccgtgttaaagatctggccactgtgtacgtggatgtcctcaaagatagtgggcgcgattatgtgtcgcagttcgaagggtccgctctgggaaagcagctcaatctcaagcttttagataactgggattccgtcacttctactttctccaagctgcgagaacagctcggacccgtcacgcaggaattttgggataacctggaaaaggaaactgaagggttaaggcaggaaatgtctaaggatctagaagaagtcaaggccaaagtccagccctacttggatgatttccagaaaaaatggcaggaagaaatggaactgtatagacaaaaggtcgaacctcttagagctgaactgcaagaaggagcccggcagaagctgcacgaactacaggaaaaactcagtcccctcggggaggagatgagggatcgcgcacgggctcacgtcgatgccctacggacacacctggctccatacagtgatgaattacggcaatgcctggccgcacggctcgaagccctgaaagaaaacgggggggctcgcctggcagaataccatgcaaaggccacagaacacctctcaactttatctgagaaagccaagcccgcattagaagatctaagacaggggctcctccccgtactagaatcctttaaagtgtctttcctgtccgcgcttgaagaatatactaaaaagctgaatacacag

SEQ ID NO: 6538 - DNA, 801 bp, synthetic construct
  misc_feature 1..801: note = source = /note="Description of Artificial Sequence: Synthetic coding sequence"
  source 1..801: mol_type = other DNA
atgaaggccgcagtgctgactctggctgttctttttctgacaggcagccaggcccggcacttctggcagcaggacgaacctccacaatcaccctgggacagagttaaggatctggcgaccgtatacgtagacgtgctgaaagattccggcagagactacgtatctcaatttgagggaagcgctcttgggaagcagcttaacttaaaattattggacaactgggatagcgtcacgagcacctttagtaagctgagagagcagttaggccccgtgacacaggagttttgggacaaccttgaaaaggagacagagggactgcgccaggaaatgagcaaagacctcgaagaggtgaaggcaaaggttcagccttaccttgacgactttcagaaaaagtggcaggaggagatggagttgtaccgccagaaagtggaacctttgagagccgagttgcaggagggcgcacgccaaaagttgcatgaactccaggaaaagctctcaccacttggagaggaaatgagagacagggcacgcgctcacgttgatgctttacgcacccatttggctccttattcggacgagctgaggcaatgcttagcagcgcgcttagaggcactgaaagaaaacggtggagctcgtctggcagaatatcatgcaaaagccacagaacatctcagcacactgtcagagaaggctaagccagcacttgaggaccttcggcagggcctccttccagttctcgaaagcttcaaggttagtttcctatccgcactcgaggagtataccaagaagctcaacactcag

SEQ ID NO: 6539 - DNA, 801 bp, synthetic construct
  misc_feature 1..801: note = source = /note="Description of Artificial Sequence: Synthetic coding sequence"
  source 1..801: mol_type = other DNA
atgaaggccgcagtcctgaccctggcagtgctcttcctgaccggaagccaggcgcgacacttctggcagcaggacgaaccaccacaaagcccgtgggaccgggtgaaggacctggccaccgtgtacgtggacgtgttgaaagactcaggcagagactacgtgtcgcagttcgaaggatctgctctcgggaagcagctcaatctcaaactgctggataactgggattccgtgacttccactttctcgaagttgcgcgaacagctgggaccggtcactcaggagttctgggacaacctcgaaaaggaaactgagggcctgaggcaagagatgtcaaaggatctcgaagaggtcaaagccaaagtgcaaccgtacctggacgactttcaaaagaagtggcaggaggagatggagctttacagacaaaaagttgagcctctccgggccgagcttcaggaaggcgcacgccagaaactccacgaactgcaagagaagctgtccccactgggtgaagaaatgcgtgatagagcccgggcgcacgtcgacgccttgcgcacccacttggcgccgtattcagatgagctgcgccaatgcctggccgcacgcctggaagccctgaaggaaaatgggggagcccggctggctgaataccatgcgaaggctactgagcatctctcgaccctgtccgaaaaggcgaagcctgcactggaagatctcaggcagggacttctgcccgtcctggaatcgttcaaagtgagctttctcagcgctcttgaggagtacaccaagaagctcaacacgcag

SEQ ID NO: 6540 - DNA, 801 bp, synthetic construct
  misc_feature 1..801: note = source = /note="Description of Artificial Sequence: Synthetic coding sequence"
  source 1..801: mol_type = other DNA
atgaaagcagctgtgctgaccctggctgtgttgtttctaaccggaagccaggcccgacatttttggcagcaagatgagccccctcaatctccatgggatagagtgaaagacctggccaccgtttacgttgacgtgttaaaagatagcggcagggattacgtatctcaatttgagggcagtgccctgggaaagcagttgaacctcaagctgctggataactgggactcagtcacctccacctttagcaagcttagagaacagctgggtcctgttacccaggagttttgggacaatctggaaaaggaaactgaaggtcttcgtcaggaaatgagtaaggatctggaagaagtcaaagccaaggtgcagccttatctggatgacttccaaaagaagtggcaggaagaaatggaactgtacaggcagaaggtcgaacccctgagggcagagctccaggaaggcgctagacagaaactacacgaacttcaagaaaaactctctccactgggagaggaaatgcgggaccgcgctagggcacacgtcgacgcgcttcgcacccacctggctccttatagcgacgagctgcgccaatgtctggctgctcgcctggaggcgttaaaagaaaatgggggcgcacgtctcgcggaatatcacgcaaaggcaaccgaacacctgtctaccctttctgagaaagccaagcctgcactggaagatctgagacagggtctgttaccagtgttggaaagcttcaaggtgtccttcttgtctgcacttgaagagtacaccaaaaagctgaacactcaa

SEQ ID NO: 6541 - DNA, 801 bp, synthetic construct
  misc_feature 1..801: note = source = /note="Description of Artificial Sequence: Synthetic coding sequence"
  source 1..801: mol_type = other DNA
atgaaggccgcggtcctcacactggccgttctatttcttactgggtcacaagctcgtcacttttggcaacaggatgaaccccctcagtccccttgggatagagttaaggatctggccaccgtttatgtggacgtacttaaggactctgggagagattatgtctctcagttcgagggcagcgcgttaggaaagcagctcaacttgaagctgctggacaactgggactccgtgaccagtactttttctaaactgcgcgagcaattgggccccgtgacccaggagttttgggacaacttggagaaggaaacggaaggcctgagacaggaaatgagcaaggacctggaagaagttaaggcgaaggtgcaaccctacctcgacgatttccaaaaaaagtggcaggaagagatggaactgtaccgccagaaggtcgagcccctgcgagctgagctccaggaaggagctagacagaagcttcatgagttacaggagaagttgagccccctaggcgaagaaatgcgcgatcgagcccgagctcatgtggatgccctccgcacccaccttgctccgtattctgacgaactacggcagtgccttgcagcccgattagaggccctcaaggagaacggtggcgcacggttagctgagtaccacgctaaagctaccgaacatttatcaacattgtctgagaaggctaaacccgcgctggaagatttaaggcaggggctccttcccgtcctggaaagcttcaaagtttcgtttctgagtgctctcgaagagtatactaaaaaactgaacacgcaa

SEQ ID NO: 6542 - DNA, 801 bp, synthetic construct
  misc_feature 1..801: note = source = /note="Description of Artificial Sequence: Synthetic coding sequence"
  source 1..801: mol_type = other DNA
atgaaagctgctgtcctgacactagccgtgctgttcctgaccggctcccaggcaagacatttctggcaacaagacgaacccccccaatccccatgggaccgcgtaaaggacctggctaccgtttatgtagacgtgctgaaggactcaggacgcgattatgtatcccagtttgagggctccgctctgggaaaacagttgaacttaaagctactagataactgggatagcgttacttctaccttctccaagctgcgtgaacagctaggaccagtgactcaagagttctgggacaatttggaaaaagagacagagggcctgaggcaggaaatgtctaaagatctcgaggaggtcaaagcaaaagttcagccctacctcgacgactttcaaaagaaatggcaggaagaaatggagctatacagacagaaggtcgaaccactgcgggcagagctgcaagaaggtgctaggcagaagctgcacgagctgcaggaaaaactgagtcctctgggggaagaaatgagagatagggcccgagctcatgtggatgctttacgcacccacctggctccctacagcgatgaactgcgccaatgtctggcagcaaggctggaggctctaaaggagaacggcggggctcgactcgccgagtaccatgccaaggcaaccgagcacctgagtactctgtctgagaaggccaagccagctctcgaagatctgcggcagggactgctacctgtgctagaaagcttcaaagttagttttctatctgctctagaggagtatactaaaaaactgaacacacag

SEQ ID NO: 6543 - DNA, 801 bp, synthetic construct
  misc_feature 1..801: note = source = /note="Description of Artificial Sequence: Synthetic coding sequence"
  source 1..801: mol_type = other DNA
atgaaggcagcggttttgactctggcagtcctcttcttgacgggaagccaagcgcgtcatttctggcagcaggatgaacctccacagtcaccttgggacagggttaaagatctcgccactgtttacgtcgatgttctaaaggactcaggacgagattatgtttcacaattcgagggatccgcactgggtaaacaactgaatttgaaacttttagataactgggacagcgtgacatcaacgttttcgaagctaagagagcagttgggtcctgttacccaagaattctgggacaacctcgaaaaagagacggaggggctgcgtcaggaaatgtcaaaggatcttgaggaggtcaaggccaaagttcagccatatttagatgatttccagaaaaaatggcaagaagaaatggagctttacagacagaaagttgaaccattgcgagcagaacttcaggagggggcccgtcagaagctccacgagttgcaagaaaagttgtcgccattaggagaggagatgagggacagagccagagctcatgtcgacgccctgcgtacccatcttgccccttacagtgatgaactccggcagtgtttggctgcaagactagaagctctcaaggaaaacggcggtgccaggctcgccgagtatcacgcgaaggcgaccgagcatcttagtaccttatcggaaaaagcaaagcctgctcttgaggacctgagacagggactccttcccgttttggaaagcttcaaagtgtcgttccttagtgcccttgaagagtacactaaaaagttaaacactcaa

SEQ ID NO: 6544 - DNA, 801 bp, synthetic construct
  misc_feature 1..801: note = source = /note="Description of Artificial Sequence: Synthetic coding sequence"
  source 1..801: mol_type = other DNA
atgaaggcagcagtgctgaccctcgcagtgttgttcctgactggatcgcaagcacggcatttctggcagcaggacgagccgccgcaaagcccgtgggaccgtgtgaaggacctggctaccgtgtacgttgatgtgctgaaggacagcggacgggactacgtgtcgcaattcgaaggtagcgcactgggtaagcagctgaatctcaagctgttggataactgggattcagtcacctcaaccttttcgaaactgcgcgaacagttgggtcccgttactcaggagttctgggataacctggaaaaagaaactgaagggctgcgccaggaaatgtcgaaagacctcgaagaagtgaaagcgaaggtccaaccttacttggacgatttccaaaagaagtggcaagaagaaatggaactgtaccgccagaaggttgaacctcttagagccgagctgcaagagggcgcgaggcaaaaactgcacgagctgcaggaaaagctgagtccgctgggcgaagaaatgagagacagggctcgcgcgcacgtcgacgctctccggacccacctggcaccctattccgacgagctccgacagtgtctcgccgccaggctcgaggccctcaaggagaacggaggagcgcggctggcagagtaccatgctaaggcgactgaacacctgagcactctgtcagagaaggcgaaaccggcactggaggaccttcgccaagggcttctgccggtcttggaatcctttaaggtgtcattcctgtccgcgcttgaggagtacactaagaaactcaatacccag

SEQ ID NO: 6545 - DNA, 801 bp, synthetic construct
  misc_feature 1..801: note = source = /note="Description of Artificial Sequence: Synthetic coding sequence"
  source 1..801: mol_type = other DNA
atgaaggccgcagtcctcaccctggcagtgctctttctgactggatcccaggcgcggcacttctggcagcaggatgaacctccccagtccccgtgggatagggtgaaggacctggcgaccgtgtacgtggacgtgctgaaggactcgggacgcgactacgtgtcccagttcgagggatccgctctgggaaagcaactgaatcttaagctgctggataactgggactcggtgactagcacttttagcaaacttagagagcaactcgggccggtcacccaggagttctgggataacctggaaaaggaaacggaaggcctgcggcaagagatgtcgaaagacctcgaagaagtgaaggcaaaggtccagccgtacctggacgactttcagaagaaatggcaagaggagatggaactgtaccggcagaaagttgaaccgctgagggcggagctgcaagaaggggctcgccagaagctgcacgaactccaggagaagctctccccactgggagaggagatgcgcgatcgggccagagcacacgttgatgcgttgcggacccacctggccccttactccgacgagctccggcagtgcctggccgcaaggcttgaagccctcaaggaaaacggtggagcacgcttggcggaataccacgccaaggctactgagcatctttcgaccctgagtgaaaaggcgaaaccggcactcgaagatctccggcagggactcctcccagtgctggaatccttcaaggtgtcattcctgtctgctttggaagaatacactaagaagctgaacactcag

SEQ ID NO: 6546 - DNA, 801 bp, synthetic construct
  misc_feature 1..801: note = source = /note="Description of Artificial Sequence: Synthetic coding sequence"
  source 1..801: mol_type = other DNA
atgaaggcagccgtgcttactctcgctgtgttgttcctcaccggtagccaagctagacacttctggcaacaagacgagcccccgcaaagcccttgggatcgggttaaggaccttgcgactgtctacgtggatgtgctcaaggactccggccgggactacgtctcacaattcgagggatcggccctcggaaagcaactgaatctgaagctgctggacaactgggactcggtgacgagcacgttctccaagctccgcgagcagctggggcctgtgactcaagagttctgggacaatcttgaaaaggagacggaaggactgagacaggaaatgtccaaagaccttgaggaggtgaaggccaaagtgcaaccatacttggatgattttcagaagaagtggcaagaggaaatggaactgtaccgccagaaggttgaacccctgcgcgcggaacttcaggaaggagcgcgccagaaattgcacgaactgcaggagaagctgtcaccgctcggcgaagaaatgagggatagagcacgcgcacacgtggacgcgcttcgcacccaccttgcaccgtattcggacgagctgcgccagtgtctggccgccaggctggaagccctgaaagagaacggtggggcacgcctggcagagtaccacgctaaggcgaccgaacatctttcgacgctgtcggagaaggccaagccggcactggaggacctgcgccagggactcctgccggtgctggagtctttcaaagtctcctttctgtccgccctggaggagtacaccaagaagctgaatactcag

SEQ ID NO: 6547 - DNA, 801 bp, synthetic construct
  misc_feature 1..801: note = source = /note="Description of Artificial Sequence: Synthetic coding sequence"
  source 1..801: mol_type = other DNA
atgaaagctgcagtgctaactctggctgtactgtttttgaccgggtctcaggctcggcacttctggcaacaagatgagcctccgcaatctccatgggaccgggtgaaggacctcgccactgtctatgtcgatgtattaaaggactctgggcgcgattatgtgtcccagttcgaagggtcggcgctcggaaagcaactgaaccttaaattgcttgataactgggactccgtgacgagcacttttagcaagttgcgggagcagttaggccctgtcacacaggaattctgggacaacctagaaaaggagacagagggtctgcgacaggaaatgagtaaagaccttgaggaagtgaaggctaaagtgcagccataccttgacgactttcagaaaaaatggcaggaggagatggaattgtataggcagaaggttgagccgttgcgcgctgagctgcaagagggtgcgcggcagaagctgcatgagctgcaggaaaagctgtcccccctgggagaggagatgagagatcgcgcccgtgcacatgtcgatgccctgcgcactcatctcgccccatatagcgatgaattgcgacagtgtctggccgccagactcgaagcactcaaggaaaatgggggtgcacggctggcagagtaccacgccaaagctacagaacatctctctaccctgtcggagaaagccaagccagccctggaagatctgcggcaaggtctcctccccgtgctggaatcctttaaggtgagcttcctctcagcgctagaggagtacacaaagaagttgaacacacag

SEQ ID NO: 6548 - DNA, 801 bp, synthetic construct
  misc_feature 1..801: note = source = /note="Description of Artificial Sequence: Synthetic coding sequence"
  source 1..801: mol_type = other DNA
atgaaggcggccgtgctgacccttgcggtgctgttcttgaccggttcgcaagcccggcacttttggcagcaagacgaaccgccgcagtcaccttgggaccgcgtcaaggatctggcgactgtctatgttgacgtgctcaaagattcaggtagggactatgtgtcccaatttgaagggtccgccctgggcaagcaactgaacctgaagctccttgataactgggactcggtgacctccactttcagtaaactccgcgaacagctggggcctgtgacccaggaattttgggacaacttggaaaaggaaaccgaagggctgcgccaagaaatgtctaaagacctggaggaggtgaaagccaaggtgcaaccgtacctggacgactttcagaagaagtggcaagaggaaatggagctctaccgccagaaagtggagccgctgcgcgcagaactgcaagagggagcgaggcagaagctgcacgaactgcaggagaaactgtcgccgctcggagaagaaatgcgggatagggcgcgggcgcacgtggacgctcttagaacccatctggccccatactctgatgagttgagacagtgcctggctgcccggctcgaagccttgaaggaaaatggcggagcaaggctggccgaataccacgcaaaagccactgagcatctctccactctgtcagagaaagctaaacctgctctcgaagatctccgccagggattgctgccagtcctggaatcatttaaagtttcattcttgagcgccttggaggagtacaccaagaagctgaatactcag

SEQ ID NO: 6549 - DNA, 801 bp, synthetic construct
  misc_feature 1..801: note = source = /note="Description of Artificial Sequence: Synthetic coding sequence"
  source 1..801: mol_type = other DNA
atgaaggccgcggtgttaactctggcggtgctcttcctgacgggtagccaagctagacacttctggcagcaggatgagccgccgcaatcaccctgggatagagtgaaagatcttgcaaccgtttatgtggatgtcctcaaggatagcgggcgggattatgtgtctcagttcgaagggtctgctttgggcaagcaactgaatttgaagttattggataattgggacagcgtcacgtcaacgttctctaagctacgcgagcagcttggaccagtgacacaagagttctgggacaatctggagaaggagacagagggattacggcaggagatgtccaaagacctggaagaagtaaaagcgaaggtgcagccatacctcgatgatttccaaaagaagtggcaggaagagatggaactctaccgtcaaaaagttgagcccctgcgagctgaactccaggaaggagccagacagaagttgcatgagttgcaagaaaaactgagccctttaggagaggagatgcgcgaccgggcacgggcccacgtggatgctctcagaacccatctcgccccctacagcgatgaactccgtcagtgcctagccgccagactggaggccctgaaggaaaatggaggagcccggttagccgagtatcacgcgaaggcgactgaacatttgtcaactctgagcgagaaagcaaagccagctctagaagatctaagacaagggctactgcctgttctggaaagcttcaaagtatccttcctatctgctttggaggaatacaccaaaaaactcaatacacag

SEQ ID NO: 6550 - DNA, 801 bp, synthetic construct
  misc_feature 1..801: note = source = /note="Description of Artificial Sequence: Synthetic coding sequence"
  source 1..801: mol_type = other DNA
atgaaggctgccgtccttaccctcgcagtgctgtttctcacgggatcacaagcaagacatttttggcaacaagatgagccccctcagtcaccgtgggatcgagtcaaagatttggcgaccgtgtacgtggatgtcctgaaggacagcggtcgagattacgtctcccagttcgagggtagtgcgcttggaaagcaattgaacctgaaactgctggacaactgggatagcgtgacgtccacgttctccaaacttagggaacagctgggtcctgtgacccaagaattctgggataaccttgaaaaagaaactgaaggtttgagacaggaaatgtccaaagatctggaagaggtgaaagccaaagtccagccttacttggatgacttccaaaagaagtggcaggaagaaatggagctgtatagacaaaaagtggagccactcagggctgaacttcaggagggagcacgccagaaactgcatgaacttcaagaaaagttgtccccacttggcgaagagatgcgtgatagggcccgtgcgcacgtcgatgccctgcgtacccacctggcgccttactcagatgagcttcgacagtgtcttgctgcacggctggaggccctcaaggagaatggaggagctcgcctggccgaataccatgcaaaggcaactgaacatctctcgaccctctcggagaaggcaaaacccgcactggaagatctccggcaggggctcctgccagtgcttgagtcgtttaaggtatcgtttctgagcgcacttgaagaatacaccaagaagttgaatactcag

SEQ ID NO: 6551 - DNA, 801 bp, synthetic construct
  misc_feature 1..801: note = source = /note="Description of Artificial Sequence: Synthetic coding sequence"
  source 1..801: mol_type = other DNA
atgaaggcagcagtgctgaccctggctgtgttgtttcttaccgggtcgcaggcaagacacttctggcagcaggacgaaccccctcagtctccctgggatcgcgtgaaggaccttgctaccgtttatgtcgatgtcctcaaagacagtggtagggactatgtgtcccagttcgaggggtcagcactgggtaaacagctgaatctaaaactcctagataattgggactctgttacgtcaaccttctctaagctgagagaacagttaggtcccgtgacccaggaattttgggataatctcgagaaggagactgagggtctcagacaagagatgagcaaggatttggaggaagtgaaagccaaggtgcaaccctaccttgatgactttcagaagaaatggcaggaggaaatggagctgtatcgccagaaagtcgagcccctgagagcagagctccaagagggcgccaggcagaagttgcacgaactgcaggaaaagctgtcccccttaggggaggagatgagagatcgagctcgcgcccatgtcgacgccttgagaacccacctcgctccctactctgatgaactgcgacaatgccttgccgcccggctcgaagcccttaaagagaacggcggcgccagactggcagaataccacgccaaagcaacagagcacctctccacactgagtgaaaaggctaagcccgcactggaagatctcagacaggggctgctaccagtgctcgagtctttcaaggtcagcttcctttctgcgttagaggagtacactaagaagcttaatacgcag

SEQ ID NO: 6552 - DNA, 801 bp, synthetic construct
  misc_feature 1..801: note = source = /note="Description of Artificial Sequence: Synthetic coding sequence"
  source 1..801: mol_type = other DNA
atgaaagctgcggttctgacacttgcagtcctgttcctgacgggatcacaggctaggcacttctggcagcaagatgagccgccccagagcccctgggaccgcgtgaaggatcttgccacagtgtacgttgatgtcctaaaggactccggtcgcgactatgtgtcccagtttgagggttcagccttgggaaagcaactgaacctgaagctgctcgataattgggactccgttacgtcaacgttcagtaagctacgagaacaactgggcccagtaacgcaggaattctgggataacctcgagaaggagaccgagggtctacgacaggagatgtccaaggatttggaagaagtgaaagcgaaggtgcaaccatacctggatgacttccagaagaagtggcaggaggagatggagttgtataggcagaaggttgagcccctgcgcgccgagctccaagagggcgctcggcagaagctgcacgagttgcaggaaaagttatcgcctctgggagaagaaatgcgggaccgcgcaagagctcatgtcgacgcgctacgaacccatttggccccgtatagcgacgagcttcgccagtgccttgccgcccgtctggaagctcttaaggagaacgggggggcacggctggccgagtatcacgccaaggcgactgagcatctgtcgacgctgagcgaaaaggccaagcccgcactggaggatttgcggcagggtctgcttccagtgttggagtctttcaaggtgagcttcctgagtgctctagaggagtataccaagaagctgaacactcag

SEQ ID NO: 6553 - DNA, 801 bp, synthetic construct
  misc_feature 1..801: note = source = /note="Description of Artificial Sequence: Synthetic coding sequence"
  source 1..801: mol_type = other DNA
atgaaagccgccgtgttgacactggctgtcctttttctgacaggaagccaagctagacacttttggcaacaggacgagccacctcaaagtccctgggacagggtgaaagacctggctacggtttacgttgatgtgttgaaggactctggaagggattacgtctcacaattcgagggctccgctctcggaaaacagctcaacctgaaactgcttgacaattgggacagcgtgactagtacatttagcaagctccgcgagcagttgggccccgtgacccaggaattttgggacaatctggagaaggagacagaaggtcttcgccaggaaatgtccaaggacctggaagaggttaaagccaaggtgcagccttatctcgatgactttcagaaaaagtggcaagaagaaatggagctgtatcgccagaaggtggaacctctcagggccgaacttcaggaaggcgctcgccagaagctccatgagctgcaagaaaaattgagccctttgggcgaagagatgagagatcgcgctcgcgcccacgtcgatgctctgaggactcatctcgccccctactctgacgaattgaggcagtgtctcgcagccaggcttgaggcattgaaggagaacggtggcgcaagactggccgagtatcacgccaaggctactgaacatctttcaactttgtcagaaaaagctaagccggcgttggaggatttgcgccagggtctgctgccagtgctggagtcttttaaggtgtcctttctctctgctctggaagagtacacgaagaagctgaacacccag

SEQ ID NO: 6554 - DNA, 801 bp, synthetic construct
  misc_feature 1..801: note = source = /note="Description of Artificial Sequence: Synthetic coding sequence"
  source 1..801: mol_type = other DNA
atgaaggcagcggtgctgaccctggcagtcctgtttctgactgggtcgcaagcgaggcatttttggcaacaggatgagccaccccaatccccttgggaccgtgtgaaggatctcgcaactgtgtacgtcgatgtgcttaaggactctggtcgcgattacgtctcgcaattcgaaggatcagccctcggtaagcaactcaacctcaagctgcttgataattgggactcagttacctctaccttctcgaaacttagggaacagcttggaccagtgactcaggaattttgggacaatcttgaaaaggaaactgaaggtctgcgccaggagatgagcaaagatttggaagaagtcaaagcaaaggtgcaaccttacctggacgatttccagaaaaagtggcaagaagaaatggaattgtataggcaaaaggtcgaaccgctgagagcggagctgcaagagggcgcccgtcaaaagttgcatgagctccaggaaaaactttcccctcttggagaggagatgagggaccgagcacgcgcacatgtggatgcgttgagaactcacttggcaccttacagcgacgagcttagacagtgtcttgccgcacggcttgaggccctcaaggagaacggaggagctagactcgctgaataccacgcgaaggcgaccgagcatctttccacgctgagcgaaaaagcgaaaccggcactggaggatttgcgccaaggtttgctgcctgtgttggaatcctttaaggtgagctttttgtcggctctggaagaatacaccaagaaacttaacacccag

SEQ ID NO: 6555 - DNA, 801 bp, synthetic construct
  misc_feature 1..801: note = source = /note="Description of Artificial Sequence: Synthetic coding sequence"
  source 1..801: mol_type = other DNA
atgaaagctgccgtcttgacattggcagtcctctttctgacgggctcgcaggctcgacacttttggcagcaggatgaaccaccacagagtccctgggacagagtaaaggatcttgccaccgtgtatgtggacgtgttgaaggactctggccgggattacgtgtcccagtttgaaggaagtgccctggggaaacaactcaatctgaaacttctggataattgggactctgtgaccagcacattcagcaaactgagagagcagctcgggcctgtcacacaggaattttgggacaacctagaaaaagagactgaggggttgcggcaagaaatgtctaaagatttggaagaggttaaggcaaaggttcagccctaccttgacgactttcagaagaaatggcaggaggagatggaactataccgccaaaaggtggagcctctgcgcgccgaactccaggaaggcgcaaggcagaagttgcatgagctgcaggagaaattgagtcccctgggcgaggagatgcgtgatagggcccgcgcccacgttgatgcccttagaacgcacctagcgccctattcggacgagctgagacagtgtcttgccgccaggctcgaagctctgaaagaaaatggcggagctcgcctagctgagtaccacgctaaggccacagaacaccttagtactctgtcggagaaggcaaagccggccctggaagatctacgacagggacttctgcccgtgctcgagtccttcaaggtcagtttcttaagcgcccttgaggagtatactaagaagcttaatacacag

SEQ ID NO: 6556 - DNA, 801 bp, synthetic construct
  misc_feature 1..801: note = source = /note="Description of Artificial Sequence: Synthetic coding sequence"
  source 1..801: mol_type = other DNA
atgaaagctgcggttttgacactcgccgtgctgttcctcaccggtagccaagcccgccacttttggcaacaggatgaaccgccccagagtccgtgggaccgggtgaaggacttagcgaccgtatatgtggatgtgctgaaagactctggacgtgattatgtgagtcagttcgaaggtagcgcactcggcaaacagctcaacctaaaactgctcgataattgggattctgtcacatctacgttctctaagctccgcgagcagctgggaccagtcacacaagagttctgggataacctggagaaggaaaccgagggtctgcggcaggaaatgagcaaggatctagaagaagtcaaagcaaaagttcagccgtacttggacgatttccagaaaaaatggcaggaggaaatggagctataccgtcagaaggtagagcctctcagagcagaattgcaggagggcgccagacaaaaacttcacgagctgcaggaaaagctgagcccactcggagaggaaatgcgggacagggctcgtgcacacgtcgatgccttgagaacacacctggccccctactcagatgagctgcgccagtgtctagcagctcggctcgaagcactgaaggagaacggcggtgcacgcctggctgagtaccatgcgaaagccaccgaacacctcagtacccttagcgaaaaagcaaaaccagctctggaagatctgagacaggggctcctacccgtgttggaatcatttaaagtaagcttcttgagcgcacttgaggaatatactaaaaagctcaatacacag

SEQ ID NO: 6557 - DNA, 801 bp, synthetic construct
  misc_feature 1..801: note = source = /note="Description of Artificial Sequence: Synthetic coding sequence"
  source 1..801: mol_type = other DNA
atgaaagcagccgtgcttactctggccgtcctcttcctgactggttcacaggcccgccacttctggcaacaggacgagccgccgcagtcgccatgggatcgggttaaggatctggccactgtgtatgtggatgtcctgaaggattccggacgcgattacgtctcccagtttgaaggatcggcgttgggaaaacaactgaatctcaagctgctggacaattgggactccgtgaccagcaccttctcgaagctgcgggagcaacttggtccggtcacccaggaattttgggataacctggaaaaagagacggagggactcagacaggaaatgtccaaggatctggaagaggtgaaagctaaagtgcagccgtacctcgacgatttccagaagaagtggcaggaagaaatggaactgtaccggcagaaggtggaaccgttgcgcgcggagctgcaggaaggcgcacgccagaagctccatgaactccaggaaaagctgtcgccgctgggggaagagatgcgcgacagagctcgcgcccacgtcgatgccctgaggactcatctggccccatatagcgacgaactgcgccagtgcctggcggccagattggaagcgctcaaggaaaatggaggagcgcgacttgcggaataccacgcaaaggcaaccgaacacttgtccactcttagcgagaaggcaaagcctgccctggaggacctccgacagggcctgctgccggtgctggagtccttcaaagtgtcgtttctctcagccttggaagagtacaccaaaaagctgaacactcag

SEQ ID NO: 6558 - DNA, 801 bp, synthetic construct
  misc_feature 1..801: note = source = /note="Description of Artificial Sequence: Synthetic coding sequence"
  source 1..801: mol_type = other DNA
atgaaagcagccgtgctcacccttgcggttctgtttcttacggggagccaagctagacacttttggcaacaggacgagcctccccaatctccgtgggatagggtgaaggatcttgcaacggtctacgtggatgtgttgaaggattcgggtcgtgattacgtctcgcagttcgaaggaagcgccctgggcaagcaacttaacctgaagctcttggataactgggactcagtcacctcgactttctctaagctgagagaacaactggggcccgtcactcaggagttttgggataacctcgagaaggaaaccgaaggattgcgccaagaaatgtcaaaggatcttgaagaggtgaaggccaaagtgcaaccatacctggacgactttcaaaagaaatggcaggaagaaatggaactgtatcgacagaaggtcgaaccactgcgggcagagttgcaggaaggcgccaggcaaaaactccatgaactccaggaaaaactttcgccgctgggtgaagaaatgagggaccgagcaagagcacacgttgatgcactccggacgcatctcgcaccctacagtgacgaacttagacaatgtttggctgcccgccttgaggcactgaaagagaatggtggtgcgcggctggcagagtaccatgcaaaggccaccgaacatctgtcaaccctctctgagaaggcgaaaccagcgcttgaggacttgcgccagggcctgctgccagtgcttgaatcgtttaaagtgtcattcctttcggcgcttgaagaatatactaagaagttgaatactcag

SEQ ID NO: 6559 - DNA, 801 bp, synthetic construct
  misc_feature 1..801: note = source = /note="Description of Artificial Sequence: Synthetic coding sequence"
  source 1..801: mol_type = other DNA
atgaaggcggcagtgctgactctcgctgtgctgttcctgaccggatcacaggcccggcatttttggcagcaggacgagcccccgcagagcccttgggaccgggtaaaagatcttgccaccgtgtacgtggacgtgctgaaggacagcgggcgcgactatgtgtcccagttcgagggatccgcactgggcaagcagctgaacctgaaactgctggacaattgggactctgtcacctcgactttttcaaaactgcgcgagcagctcggacctgtcactcaagagttttgggataacctggaaaaggaaaccgagggcctgagacaggaaatgagcaaggatctcgaggaagtgaaggcgaaagttcagccatacctggacgacttccaaaagaaatggcaagaggagatggaactctacagacagaaagtggagccactccgcgcggaacttcaagaaggtgccagacaaaagctgcacgagctgcaggagaagctctcccccctgggtgaggagatgcgcgaccgggcgcgggcgcacgtggatgcgttgagaacgcacctggcgccgtatagcgatgaactgcgccagtgtctggctgcccggctggaagcactcaaggaaaacggaggagcacgtctcgcggagtaccacgcgaaggccaccgagcacctttcgacgctctccgaaaaggcgaagccggctctggaagatctccggcagggcctgctgccggtcttggagtcgttcaaggtgtcgtttctgagcgccctcgaagagtacactaagaagctgaacacccag

SEQ ID NO: 6560 - DNA, 801 bp, synthetic construct
  misc_feature 1..801: note = source = /note="Description of Artificial Sequence: Synthetic coding sequence"
  source 1..801: mol_type = other DNA
atgaaggcggcagtgctgactctggccgtgctgtttttgactggttcgcaagcgcgccacttctggcaacaggacgagccgcctcagtccccctgggaccgagtgaaggatctcgcgaccgtctacgtggacgttctgaaggattctgggcgggactacgtctcccagttcgaagggtcagcacttggaaaacagctcaatctcaagctcctggacaactgggactcagtgactagcaccttttcgaagctccgcgaacaactcgggcccgtgactcaggaattctgggacaatctcgaaaaggaaaccgagggactccgccaggaaatgtcgaaggatctcgaggaggtgaaggcaaaggtgcagccgtacctggacgatttccagaagaagtggcaggaggagatggagctctaccgccaaaaagtcgaaccgctgagagcggaattgcaagagggagcccgccaaaagttgcatgaactccaagaaaaactgtcccctctgggggaagaaatgcgggaccgggctagagctcatgtcgacgctctgcgcacccaccttgcgccttactcggacgaactgaggcagtgcctggcggcaaggctcgaagccctgaaagaaaatggaggggctcggctcgcggaatatcacgctaaggccactgaacacctgagcaccctctcggagaaggccaagccagcgcttgaagatcttagacagggactcctcccagtgctggagtcctttaaggtttcgttcctgtccgctctcgaagagtacactaagaagctcaacactcag

SEQ ID NO: 6561 - DNA, 801 bp, synthetic construct
  misc_feature 1..801: note = source = /note="Description of Artificial Sequence: Synthetic coding sequence"
  source 1..801: mol_type = other DNA
atgaaggctgcagttttaacacttgctgttttatttcttactggatcacaagctcgtcatttttggcaacaagatgaacctccacaaagtccatgggacagagttaaagatttagctacagtatatgttgatgttcttaaggattcaggaagagattatgtttcacaatttgaaggttcagcattaggtaagcaattaaatttaaaattgctagataattgggattctgttacatcaacattttcaaagttgagagaacaattaggacctgtaacacaagaattttgggataatcttgagaaagaaactgaaggtcttcgacaggaaatgtctaaagatttagaagaagttaaagcaaaagttcaaccatatttagatgattttcaaaaaaaatggcaagaagaaatggaattatatagacagaaagttgaacctcttagagctgagttacaagaaggagcaagacaaaagttacacgagttacaagaaaaattaagtccattaggagaagaaatgagagatagagctagagcacatgttgatgctttgagaactcatttggctccatattcagatgaattgcgacaatgtctagccgctagacttgaagcacttaaagaaaatggaggagctagattagctgaatatcatgctaaagctacagaacatctatcaactctttcagaaaaggctaaaccagcattagaagatttaaggcaaggacttcttccagttttagaatcatttaaagtttctttcctttctgctcttgaagaatatacaaagaaattaaatacacaa

SEQ ID NO: 6562 - DNA, 801 bp, synthetic construct
  misc_feature 1..801: note = source = /note="Description of Artificial Sequence: Synthetic coding sequence"
  source 1..801: mol_type = other DNA
atgaaggcagcagtcctcacccttgcggtgctcttcttgacgggatcacaagcgagacacttttggcagcaagacgaaccgccacagtcaccatgggacagggtgaaagaccttgccaccgtctacgttgacgtcctcaaggattcaggacgcgactacgtgagccaatttgaagggtccgcacttggtaagcaacttaatctgaagctgttggataactgggattcggtcaccagcactttctccaaactcagagaacagctgggtcctgttactcaggaattttgggataaccttgagaaggagacggaagggcttaggcaggagatgagtaaggatctggaagaggtgaaagccaaagtgcaaccatacctggacgatttccaaaagaagtggcaggaggagatggagctctaccggcaaaaggttgaaccgttgagagctgagttgcaagaaggggcgagacaaaaacttcacgaacttcaagagaagttgtcgcccctcggagaagagatgcgggaccgtgcacgagcacatgtggatgcgctgcggacccatcttgctccgtactcagacgaactgcgacaatgtctggcagcgcgccttgaagcactgaaagagaatggtggagccagacttgcagagtatcatgcaaaggcaaccgaacatctgtccactcttagcgagaaggcgaagccagccctcgaagatctgcgacaaggactgcttcccgtgcttgagtcgtttaaggtgtccttcctgagcgccttggaggaatacaccaaaaagctgaacactcaa

SEQ ID NO: 6563 - DNA, 801 bp, synthetic construct
  misc_feature 1..801: note = source = /note="Description of Artificial Sequence: Synthetic coding sequence"
  source 1..801: mol_type = other DNA
atgaaggcagccgtgctgacactggccgtcctgttcctgactggctcacaagctagacatttctggcagcaggacgagccccctcagtccccatgggaccgagttaaggacctggctactgtatatgtcgatgtattgaaagattccggtcgtgactacgtctcacagtttgagggttccgcgctgggcaagcagttaaacctcaaattgctggacaattgggactcagtgaccagcacgttcagcaagctgagagagcagcttggccccgtcactcaggaattttgggataacctggagaaagaaacagagggcctgcggcaagaaatgagcaaggatctggaggaagtgaaagctaaagtgcagccctacctggacgatttccagaagaaatggcaggaggaaatggagctgtacaggcagaaagttgaacccttgcgagccgagttgcaggaaggcgcccgacagaaacttcacgaactccaggaaaagctgtccccactgggagaggaaatgagagatcgagctcgcgctcacgttgatgccttgcgcactcacttggccccttacagcgacgagttgcggcagtgccttgccgccagactggaggctctgaaagaaaacggtggcgcccgactggctgaataccatgctaaggctaccgagcacctgtctacgctgtcagagaaggcgaagcccgcgctggaggatctccgacaaggcctgttgcccgttctagaatcctttaaggtaagctttcttagtgctctcgaggagtatacgaagaaattgaacactcaa

SEQ ID NO: 6564 - DNA, 795 bp, synthetic construct
  misc_feature 1..795: note = source = /note="Description of Artificial Sequence: Synthetic coding sequence"
  source 1..795: mol_type = other DNA
atgaagaaggaggtgtgctctgtcgcttttctaaaggcggtgttcgcagaattcttggcgacgctgatctttgtgttttttggcctggggagtgctctgaagtggccctctgctttgcccaccatcctccaaatcgcccttgccttcggattggcaatcgggacccttgcccaagccctgggacccgtgagcggagggcacattaacccagctataaccctcgctctgctggtcggcaatcagatctctttgctgcgagccttcttttacgtggcagcccagctggtgggagccatcgcgggggctggaatactgtatggtgtcgctcccctgaatgcgcgaggcaatctggcagtgaacgccttgaacaataacactactcaggggcaggcaatggtcgttgaactgattctgacatttcaactggccctgtgcattttcgcatctaccgacagccgccgtacaagtcccgttggttcccccgctctgtctattggcctctctgtgacgctgggccaccttgtcggcatatacttcaccggctgctcaatgaatccagctcgaagttttggacctgccgtggtcatgaatcggttcagcccggcgcactgggtcttttgggtcggtcccatcgtcggtgcggttctggcagccatcctgtatttctatctcctgtttcccaattcgttatctctgagtgaaagggtggccatcataaaggggacgtacgagccagatgaggactgggaggagcaacgggaggagagaaaaaagacaatggagctaaccacacgc

SEQ ID NO: 6565 - DNA, 795 bp, synthetic construct
  misc_feature 1..795: note = source = /note="Description of Artificial Sequence: Synthetic coding sequence"
  source 1..795: mol_type = other DNA
atgaaaaaagaggtctgctccgttgcttttctgaaagcagtgttcgcagagttcctggcgacactgatctttgtgtttttcgggctgggctctgcccttaagtggccaagcgcgttaccgaccatcctacagattgcgctggccttcgggctggctattggcaccctggcccaggctctagggccagttagtgggggccatataaatcccgccattaccctagcactcctggtgggtaatcagatcagtctgctgagggctttcttttacgtggccgcccagctggtgggagctattgccggtgcagggattttatacggggtcgcgccacttaacgcaaggggaaacctggcagtgaacgcgttaaataacaatactacacagggacaggcaatggtggtcgaactcatactcacgttccagttggccctctgcatttttgccagcaccgacagccggcggacatcccccgtcggttcgcccgctctaagcattggtctgtctgtgactctcggacacctggtgggaatctatttcactggatgctccatgaatcccgcgcgctcttttggcccggcggtcgtaatgaatagattttcacctgcgcactgggtattttgggtgggtcctatcgtaggggcagttttagctgctatcctctacttctacctcctgttccctaactccttgtcactgtcagaaagggtcgccatcattaaaggcacctacgaacccgatgaagactgggaggagcagagagaagagcgcaaaaaaactatggagttgactacccgc

SEQ ID NO: 6566 - DNA, 795 bp, synthetic construct
  misc_feature 1..795: note = source = /note="Description of Artificial Sequence: Synthetic coding sequence"
  source 1..795: mol_type = other DNA
atgaagaaggaggtgtgttctgtcgccttcctcaaagcagtcttcgctgaatttctggctaccttgatttttgtgttcttcggactcggcagtgctcttaaatggccatcagcactgcccaccattttgcagatcgcactggcttttgggctggcaataggaacgctcgcccaagcattggggcccgtgagcgggggccatattaatcctgctataaccctggcactgctggtggggaaccagatcagcttacttcgagcttttttctacgtggctgctcagctggtaggcgccatcgctggagccggcattctgtacggagtcgcgccattgaacgcacgcggcaacctggccgtgaacgccctgaataacaacaccacacagggtcaggctatggtggtggagcttattttaacttttcagctggctctctgcatcttcgccagtaccgatagcaggcggacgtcgcccgtgggcagtcccgctctctctatcggactgtccgtcacgctcggacacctggtcggcatctacttcaccggatgctctatgaatcctgcaaggtcttttggaccagccgttgtaatgaaccggttctcaccagcgcactgggttttttgggtaggccccatcgtgggcgcagtgcttgccgctatcctctatttctatcttctgtttcccaacagtcttagcctctcagagagagtcgccattatcaaggggacttatgaaccagatgaagattgggaagagcagcgagaggaacgtaagaaaactatggagctcacaactagg

SEQ ID NO: 6567 - DNA, 795 bp, synthetic construct
  misc_feature 1..795: note = source = /note="Description of Artificial Sequence: Synthetic coding sequence"
  source 1..795: mol_type = other DNA
atgaaaaaggaggtgtgcagcgtcgccttcctcaaggcggtgttcgccgagttcctggctaccctgatctttgtctttttcggactgggctcagcgctcaaatggccatccgctctcccaactatcctgcaaattgcactggctttcggactggcaatcgggaccctggcacaggcactgggaccagtgtccgggggacatatcaacccggccatcaccctcgcactgctggtcggcaatcagatcagccttctgcgcgccttcttctacgtggctgcccagctggtcggagccattgccggagccgggatcctttacggagtcgctccccttaacgcgagaggaaacctggcagtcaacgcgctgaataacaacacgacccagggacaggccatggtggtggaactgattctgacgttccaactggctctgtgcatcttcgcctcgaccgactcccgccggacctccccagtcggttcgccggcgctgtcgattggattgtcagtgaccctgggacatctggtgggaatctactttactggttgctccatgaacccagccaggtcgtttggaccggccgtggtgatgaaccgattctcacctgcccactgggtgttctgggtggggccgatcgtgggcgcggtcctggcggctatcttgtacttctacctcctctttccgaatagcctgtcgctctccgaacgcgtcgctatcataaagggcacttacgagcccgatgaggactgggaggaacagcgcgaagaaagaaaaaagactatggagctgacgacccgc

SEQ ID NO: 6568 - DNA, 795 bp, synthetic construct
  misc_feature 1..795: note = source = /note="Description of Artificial Sequence: Synthetic coding sequence"
  source 1..795: mol_type = other DNA
atgaaaaaagaggtatgttccgttgctttcctcaaggcagtgtttgcagaatttctcgctactctgatttttgtgttttttggactgggatcagcgttgaagtggccatcagcactgcctaccattcttcaaatagcgcttgcatttggactggcaattggtacgcttgcacaagctctgggtcctgtgtccggtggacacattaatcctgccattactctggcactccttgtgggcaatcagattagtttgctgagagcgttcttttacgtggctgcacagctggtgggtgcaatcgcaggagcgggaatcttgtacggcgtggcgccactgaacgcacggggtaacttggccgtcaatgcgctgaacaacaataccactcaagggcaagccatggtggtggaacttattctgaccttccaactggcgctctgcatcttcgcgtctaccgattcacggcgaaccagcccagtcggatcgcctgcactctccattggcctttcagtgactctcgggcatctcgtcggaatatacttcaccggctgtagcatgaaccccgcacgttcgtttgggccagcggtcgtcatgaaccgcttttcacccgcccattgggtattctgggtgggtcctatagtgggtgccgtcctggccgcaatactgtacttttatcttctctttccgaactcccttagtctgtccgagagggtggcgatcatcaaggggacttacgaacctgacgaagattgggaagagcagagagaagaacgcaaaaagacgatggagctcactacgaga

SEQ ID NO: 6569 - DNA, 795 bp, synthetic construct
  misc_feature 1..795: note = source = /note="Description of Artificial Sequence: Synthetic coding sequence"
  source 1..795: mol_type = other DNA
atgaaaaaagaagtatgttcggtagcgtttttaaaagcggtatttgcggaatttttagcgacgttaatatttgttttttttggtttaggttcggcgttaaaatggccgtcggcgttaccgacgatactacaaatagcgctagcgtttggtctagcgataggtacgttagcgcaagcgttaggtccggtatcgggtggtcatataaatccggcgataacgttagcgttattagtaggtaatcaaatatcgctattacgtgcgtttttttatgtagcggcgcaattagttggtgcgatagcgggtgcgggtatactatatggtgtagcgccgttaaatgcgcgaggtaatctagcggttaatgcgttaaataataatacgacgcaaggtcaagcgatggtagtagaactaatattaacgtttcaactagcgctatgtatatttgcgtcgacggattcgcgtcgtacgtcgccggttggttcgccggcgctatcgataggtttatcggtaacgctaggtcatctagttggtatatattttacgggttgttcgatgaatccggcgcgatcgtttggtccggcggtagtaatgaatcgtttttcgccggcgcattgggttttttgggtaggtccgatagtaggtgcggttctagcggcgatactatatttttatctattatttccgaattcgctatcgttatcggaacgtgtagcgataataaaaggtacgtatgaaccggatgaagattgggaagaacaacgtgaagaacgaaaaaaaacgatggaattaacgacgcgt

SEQ ID NO: 6570 - DNA, 795 bp, synthetic construct
  misc_feature 1..795: note = source = /note="Description of Artificial Sequence: Synthetic coding sequence"
  source 1..795: mol_type = other DNA
atgaaaaaagaggtgtgctctgtcgcgtttctgaaggcagtgttcgcagagtttctggcaactctgatcttcgtgttcttcggtctgggctctgcgctgaagtggcccagtgctcttccaaccatattgcagattgccctggcttttggcctggccattggcacactggcccaagccctcggaccagtgtccggggggcacatcaatcccgccataacattggcccttctggttggaaaccaaattagcctattgagagccttcttttacgttgccgctcagctggtgggcgctatagcaggggccgggattctctacggggttgctcctttgaacgcccgcggaaacctggcggtaaatgcattgaataacaacacaacacagggacaggccatggtcgtcgaactgatcctgacgttccagttagctctttgtatctttgcaagcactgatagccgacggacctcacccgttggtagtcccgcgctgtcgattggcctgtctgttaccctggggcacttggtcggaatctactttacggggtgctccatgaacccggcccgcagttttggccccgccgtggtcatgaatcgatttagccccgcccactgggtgttctgggtggggccgatcgttggcgccgtgctggctgcaattctttacttctatttgctgttcccgaactctctgagcctctccgagagggttgccatcatcaaagggacctacgagcccgatgaggattgggaggaacagagagaagaacgcaaaaagacaatggagcttactactcgc

SEQ ID NO: 6571 - DNA, 795 bp, synthetic construct
  misc_feature 1..795: note = source = /note="Description of Artificial Sequence: Synthetic coding sequence"
  source 1..795: mol_type = other DNA
atgaaaaaggaggtgtgctcagtcgccttcctgaaggcggtgttcgcagaatttttggcgacactgatcttcgtcttcttcggcctgggctccgccctgaagtggccgagtgccctgccgacaattctgcagattgccttggccttcggcctcgccattggcacgctcgcccaggctctaggaccagtgtcgggaggacacataaacccggccatcactcttgcgctcctagtgggaaaccagatttccctattgcgggctttcttttacgtggcagcccagctcgtcggcgcaatcgcaggcgcaggcattctgtacggagtagctcccttgaatgcccggggaaacttggccgtgaatgcccttaataacaataccacccagggccaggcgatggttgttgagctgatcctaactttccaactggcactatgtatttttgcctcgacagattctcgtcgcaccagcccggtgggttcgcccgcgttaagcatcggattatccgtgaccctggggcatcttgtgggaatctacttcactggttgtagcatgaacccggcaagatctttcggtccggccgttgtgatgaatcggttttcgcctgcacattgggtgttctgggtcggacctatcgtcggcgcggtcctcgcagctatactatatttttacctcttgttcccgaatagcttgtcgctctccgaacgcgtcgccataatcaaaggcacgtatgagccggatgaagattgggaggaacagcgcgaagagcggaagaagacgatggagctgacaacccga

SEQ ID NO: 6572 - DNA, 795 bp, synthetic construct
  misc_feature 1..795: note = source = /note="Description of Artificial Sequence: Synthetic coding sequence"
  source 1..795: mol_type = other DNA
atgaaaaaagaggtgtgctcggtggcctttctgaaggccgtgttcgcagagttcctagcgaccttgatctttgtgttttttggcctggggtctgcactgaaatggcccagtgcattacctactatactgcagatcgctctagctttcgggctcgccatcggaactctggcccaagccctgggaccggtgtctgggggccatattaaccccgccatcactctggctctactggtcgggaaccagatcagcctgctgagggctttcttctacgtcgcggcacaacttgtgggcgctattgccggggcaggcattctgtatggggtcgcccccctgaacgcgcgcggaaatctggctgtcaatgcattgaataacaatactacgcagggacaggccatggtggtggagctgattctgacatttcagctagcactgtgcatttttgcatcaaccgacagcaggcggaccagccctgtcggtagccccgcccttagtataggcctgtcagttacacttgggcatctcgtggggatctatttcactggttgctccatgaaccccgcccggtcattcgggcccgccgttgtgatgaacaggttttctccggcccattgggtgttttgggtaggtccgattgttggagctgtgttggccgcaatcctgtacttctatctcttgtttcccaatagtttgtcactctccgagcgagtcgccataatcaaaggcacctacgagcctgacgaggactgggaggagcagcgagaggagcggaaaaagacaatggagctgacaacacgt

SEQ ID NO: 6573 - DNA, 795 bp, synthetic construct
  misc_feature 1..795: note = source = /note="Description of Artificial Sequence: Synthetic coding sequence"
  source 1..795: mol_type = other DNA
atgaagaaagaagtctgctctgtggcattcctgaaggccgtattcgccgagttcttggccactctgatcttcgtgttttttgggctgggttcggctctgaagtggccgtccgcgttgccaacgatcctccagatcgcactggctttcggacttgctatcggaacgctggcacaagcactcgggccagtttccggcggacatatcaacccggcaataactttggcactcctcgtgggtaaccagatctcgttgttgcgcgcattcttctacgtggcggcgcaattggtgggagcaatcgccggagctggaatcctctatggcgttgccccactgaatgcaagaggtaacctcgctgtcaatgccctgaacaataacaccactcagggccaggcaatggttgtggagcttatcctcacctttcagcttgccctgtgcatcttcgcgtcgaccgactcaagacgcacctctccggtgggatcgccggcgcttagcattggactgagtgtgaccttgggacacctggtgggcatttacttcaccgggtgttcaatgaaccccgcccggtccttcggtccagcagtggtcatgaacaggttttcccccgcacactgggtgttctgggtgggaccaatcgtcggggccgtattggctgccatcctttacttttacctgctgttcccaaattcgctgagcttgtcagaacgggtcgccattatcaaaggaacgtacgaacctgacgaggattgggaagaacaacgcgaggaacggaaaaagactatggagctgaccactcgc

SEQ ID NO: 6574 - DNA, 795 bp, synthetic construct
  misc_feature 1..795: note = source = /note="Description of Artificial Sequence: Synthetic coding sequence"
  source 1..795: mol_type = other DNA
atgaaaaaggaagtgtgttcagtcgctttcctgaaagcggtgtttgccgaatttctggcaactcttatctttgtattctttggactcggttccgcgctcaagtggccttccgcacttccaaccattcttcaaattgcactggcatttggccttgccattggtacccttgcacaagctctggggccagtgtcgggaggacacattaaccctgcaatcacgctggccctgcttgtgggaaatcagataagcctcctgagagcattcttctacgtggccgcccaactcgtgggagcaattgcaggagccggcattctttacggagtcgcaccactgaacgcacgaggcaacctggcggtgaatgcattgaataacaatactacccagggtcaagcaatggtcgtcgaattgattcttacctttcagcttgcactgtgcatttttgcgtcgaccgattcacggcgcacttcaccagtgggctcgcccgccctgtctattgggctttcggtgactctgggacacctcgtgggcatttacttcacgggatgttcaatgaaccctgcacgttcatttggccccgctgtggtcatgaacagattttccccggcacactgggtgttttgggtcggcccgattgtgggggcagtgctggccgcaatcctgtacttctacctgctgttcccgaattcactgtccctgagcgagcgggtcgcaatcataaaaggcacttacgaaccggacgaggattgggaagaacagagagaagagaggaaaaagaccatggagctgacgaccaga

SEQ ID NO: 6575 - DNA, 795 bp, synthetic construct
  misc_feature 1..795: note = source = /note="Description of Artificial Sequence: Synthetic coding sequence"
  source 1..795: mol_type = other DNA
atgaaaaaagaggtttgctctgtggcgtttcttaaagcagtcttcgctgagttcttggcgacactcattttcgtattcttcgggctggggagcgccctgaagtggccttccgcattgccaactatcctgcagattgcattagcgtttggactcgctattggaacacttgctcaggccctgggacccgtatctggcggacacatcaaccccgccatcacattggccctgctggtggggaaccagatcagtctgctcagggcgtttttttacgtagcagcacaattggtcggagcgattgccggagcgggcatcctttatggggtggccccactcaatgccaggggtaacttagcggtgaacgccctcaacaataacacaacccaaggccaggctatggtggtggagctgatactgaccttccagcttgccctctgcatcttcgcgtcaacagactctaggcggacctcccctgttgggagtccagccctgagtatcggactgagcgtgaccctgggccatctagttgggatctatttcacaggatgttcaatgaatcccgcaagatccttcggccctgccgtggtaatgaaccgcttttctccggcccactgggtcttctgggtaggtcctatcgtgggagccgtgttggccgcaatcctctacttttacctactttttcccaactctctcagtctcagcgagcgagtcgccataatcaaaggcacatatgaacccgatgaagactgggaggagcagagggaggaaagaaagaaaaccatggagttgactacaaga

SEQ ID NO: 6576 - DNA, 795 bp, synthetic construct
  misc_feature 1..795: note = source = /note="Description of Artificial Sequence: Synthetic coding sequence"
  source 1..795: mol_type = other DNA
atgaaaaaagaagtatgtagtgtagcattcttgaaggccgttttcgccgagttcctggcgactttaatctttgttttttttggacttggctctgctttgaagtggccaagcgcactgcctacaattctccaaattgccttagcattcggcctcgcgatcgggaccttggctcaggcccttggccctgttagcggtgggcacatcaaccccgccataactctggcactgcttgtgggaaatcagattagtctcctccgggctttcttttacgtcgccgcgcaactcgtcggggctatcgctggagcaggtatcctgtacggcgtggctcccctgaacgcccgcggcaatttggccgtgaacgctcttaataacaatacaactcagggacaggccatggtggtagagctgatcctgacgttccagctggccctatgcatttttgcctctacagactctcgtaggacctcaccagtgggctcgcccgcactcagcatcggcctttctgtcacactgggccacctcgtgggcatttatttcacgggatgctctatgaaccctgctcggagctttgggccggcagttgtgatgaaccgattctccccagcccactgggtcttctgggtcggacctatagttggagctgttctggcagctatcttatacttttaccttttattccctaattctctctcactttccgagagagtggccatcattaagggtacttacgaacccgatgaggactgggaagagcaacgtgaggaacggaagaaaacaatggaattaaccacaaga

SEQ ID NO: 6577 - DNA, 795 bp, synthetic construct
  misc_feature 1..795: note = source = /note="Description of Artificial Sequence: Synthetic coding sequence"
  source 1..795: mol_type = other DNA
atgaagaaggaagtgtgttctgtggcatttctgaaggcagtttttgcagaatttctggcaactctgattttcgttttctttggactgggctcagcactcaagtggcccagcgcccttcctaccatccttcaaatcgctctcgcctttggacttgcgatcggaactcttgcgcaggcgctcggccctgtgtcaggtggacatatcaatcctgcaattaccttggcactgcttgtggggaaccagatttcgctgcttcgtgccttcttttacgtggcggcacagcttgtgggagcaatagcaggggcagggattttgtacggtgtggcccccctcaatgcccgtggtaacctggctgttaacgcactcaataacaatactacccagggccaggcgatggtggtggaacttatcctcacgttccaacttgccctctgcatatttgcatcgactgattccaggcgcacctcaccagtgggttcgcctgccctgtcaattggtctgtcggtcactctcgggcacctcgtgggaatctactttaccggttgtagcatgaatcccgctcgttcttttggtcccgccgtcgtgatgaaccgcttctcacctgcacattgggtcttttgggtcggacctattgtgggggctgtccttgcagcaattctttacttctacctgctgttccctaattccctctcgctttccgaaagagtcgcaatcattaaaggcacttatgaaccagacgaggattgggaggaacaacgggaggaaaggaaaaagacgatggagctcaccaccaga

SEQ ID NO: 6578 - DNA, 795 bp, synthetic construct
  misc_feature 1..795: note = source = /note="Description of Artificial Sequence: Synthetic coding sequence"
  source 1..795: mol_type = other DNA
atgaagaaggaagtgtgtagcgtcgcgtttctcaaggctgtgttcgccgaatttcttgcgactctgatattcgtgttttttggtctgggatctgccttgaagtggccttcagcactgccgacgattctccaaatcgcgcttgcctttggccttgcaatcggaacccttgctcaggctcttggcccagtgagtggagggcatatcaaccctgctatcacccttgcactgttggttggcaatcagatatcgcttctgcgcgccttcttttacgtcgcagcacaactcgtgggagcaattgcaggagcaggtatcctgtacggagtggcacctctgaatgcaagaggcaatcttgcagtgaacgccctgaacaacaacactacccagggtcaagccatggtcgtggaactcattttgacgttccaactggctttgtgcatttttgcgagcaccgactcgcgacgtactagccctgtcggcagtccagcactgtcaattggcctgtctgtgactcttggacacctcgtggggatttactttactggttgttcaatgaatcccgcacggagcttcggtcccgcagtcgtcatgaaccgcttttccccagcgcattgggtattctgggtgggaccaatagtgggtgccgtgttggctgccattttgtacttctatcttctctttcccaactcactctcgctctcggaacgggtcgcaatcattaaagggacctacgaacctgatgaagattgggaggaacaacgagaggagaggaagaaaacgatggagctgaccactaga

SEQ ID NO: 6579 - DNA, 795 bp, synthetic construct
  misc_feature 1..795: note = source = /note="Description of Artificial Sequence: Synthetic coding sequence"
  source 1..795: mol_type = other DNA
atgaagaaggaggtctgttcggtggcatttctcaaggccgtgtttgctgagtttctggctacgctgattttcgtgttttttggacttgggtccgcgctgaagtggccaagcgcactgccgactattcttcaaatcgcgctggcttttggactggcaatcggtactctcgcccaagctctcggcccagtgtcgggtggccacatcaatccagcaataaccttggcacttctcgtcggaaaccagataagccttttgagagcgtttttctacgtcgcggcacagctggtcggagccattgcgggtgccggtattctgtacggtgtcgctccacttaacgctcgcggtaaccttgcggtgaacgctttgaataacaataccacccagggtcaagcaatggtggtggaactgattctgaccttccagctcgccttgtgcattttcgcatccactgatagcagaaggacttcgcccgtcgggtcccctgcactttcaatcggattgtcagtgactcttggtcatctggtgggaatctactttaccggatgttctatgaatcctgcacggtcgtttgggccagccgtggtgatgaatcgcttttcgcctgcacattgggtgttctgggtcggccccattgtgggcgcagtcctggcagctatcctgtacttctatcttctttttcctaacagtctttccttgagtgaaagggttgcaatcataaaagggacttatgaacctgatgaggactgggaggaacaacgcgaagaacgaaagaaaactatggagttgactactcgt

SEQ ID NO: 6580 - DNA, 795 bp, synthetic construct
  misc_feature 1..795: note = source = /note="Description of Artificial Sequence: Synthetic coding sequence"
  source 1..795: mol_type = other DNA
atgaagaaagaagtgtgctcagtggcctttcttaaagccgtgttcgcagaattcctggccaccctgattttcgtgtttttcggccttggaagcgcactcaagtggccatccgcactgcctactattcttcaaatagcgctcgcatttggactggcaatcggaactctcgcacaggcacttgggcccgtgtcgggcgggcacattaatcctgcaatcactcttgccctccttgtcgggaaccagatctcattgcttagagcgtttttctacgtcgcagcccaacttgtgggagcgatcgccggagcaggaattctgtatggggtcgcacctcttaatgcacgcggtaatctggcagtcaatgcgctgaacaacaataccacccagggacaagccatggtggtggaacttattctgacgtttcagcttgcactctgtattttcgcttcgaccgattcccgccgtacctcccctgtgggttcgcctgctctttcgattgggctcagtgtgaccttggggcatcttgtcggaatatacttcaccggttgctccatgaatcctgcccgttcgtttggcccagcggtggtgatgaaccggtttagccctgcacattgggtcttttgggttggaccaattgtcggcgcagtgctggcagcaatcctgtacttttacttgctgttccctaactcccttagcttgtcagaacgggtggcaatcattaaagggacctacgaacctgatgaggattgggaggaacaacgcgaagaaagaaagaaaaccatggaacttaccaccagg

SEQ ID NO: 6581 - DNA, 795 bp, synthetic construct
  misc_feature 1..795: note = source = /note="Description of Artificial Sequence: Synthetic coding sequence"
  source 1..795: mol_type = other DNA
atgaagaaggaagtgtgtagcgtggcctttctgaaagcagttttcgccgagttccttgcgacactcatctttgtattttttggactgggtagtgcactgaaatggccgagtgccctgcccacaatcctgcagattgccttagccttcggattagccataggtacgctggcccaagccctgggcccagtctccggagggcatatcaaccctgctattaccctggcactcctcgtcggtaaccagatatctctgctcagggccttcttttacgtggcggcacagctcgtaggggcaattgccggtgctggcatactgtacggcgtcgccccactgaacgcccgcggtaacctcgccgtcaacgctcttaacaacaatactacacaagggcaggcgatggtggtggaacttattctcactttccagctggcgctctgcatctttgcctcaaccgactccagacggacttcccccgttggttcccccgcactgagcatcgggttgagtgtgacactgggacatctggtgggcatttatttcactggatgtagcatgaatccagctaggtcattcggtcccgccgtggtgatgaacaggttcagtcctgcacactgggtgttttgggtgggcccgattgtgggagcagtgctggcagccatcctgtacttctatttgctgttccctaatagtttgtcgctgagcgaacgagtcgccatcattaagggaacatatgagcccgatgaagattgggaagagcaacgggaggagaggaaaaagaccatggaactgaccacacga

SEQ ID NO: 6582 - DNA, 795 bp, synthetic construct
  misc_feature 1..795: note = source = /note="Description of Artificial Sequence: Synthetic coding sequence"
  source 1..795: mol_type = other DNA
atgaagaaagaggtgtgttcagtggctttcctgaaagccgtcttcgccgaattccttgcgacactgatcttcgtgttctttggattgggctctgcgctgaagtggccttccgctttgccaacaatcctacaaatcgcattggcgtttggactggcaatcggtaccctcgcacaggcactggggcctgttagcggcgggcacataaaccctgcaataacacttgctctactagttgggaatcagatcagtttgctccgggctttcttctatgtcgccgcccagctggtcggcgcaatcgctggggccggaattttatatggggtggcccccctgaacgccaggggtaacctggcagtaaacgctctgaacaataataccactcagggacaagccatggtggtggaacttatcttaacctttcagttggctttatgcatcttcgctagcacagactctcggaggacatcccctgtcggttccccggccctgagcatcggcttgtctgtgacacttgggcatcttgtagggatctattttacaggttgtagcatgaacccagcacggtcttttggaccggccgtggtcatgaaccgcttttcccctgctcactgggttttttgggtgggccccatcgtgggagccgtgctggccgcaattctgtacttttatctgttatttccaaatagtctgtctctctctgagcgggtggccataattaagggtacttatgaacccgacgaggattgggaagagcaacgtgaagagaggaaaaaaacaatggagttgactacgagg

SEQ ID NO: 6583 - DNA, 795 bp, synthetic construct
  misc_feature 1..795: note = source = /note="Description of Artificial Sequence: Synthetic coding sequence"
  source 1..795: mol_type = other DNA
atgaagaaagaggtgtgttcggtggcgtttcttaaggctgtgttcgcagagttccttgcgaccctgatcttcgtgtttttcgggcttgggagcgcactcaaatggccttccgcactgccaaccatcctgcagattgccttggcatttggattggcaattggaactctggctcaagcgctgggtccggtgtcaggcggacatatcaaccctgcgatcactttggcacttctggtgggcaatcaaatttccctgcttcgcgcatttttctacgtggcagcccagctcgtgggagctatagcaggtgccggaatcctctacggtgtggcacccttgaacgcaagaggtaatctggccgtcaacgcactcaataacaacaccactcagggacaggcaatggtcgtggaattgatccttacgtttcaactggcactgtgcatttttgccagcaccgattccaggcggacctccccggtggggtcaccggccctgtctattggactgtccgtgaccctgggccatcttgtgggcatctacttcaccggctgttcgatgaatcccgcacgctcattcggccccgcagtcgtgatgaacagatttagcccagcacactgggtgttttgggtggggcctattgtcggagcagttctcgcggccatcctttacttctaccttctttttcccaattcgctttccctctcagaacgggtggccataatcaagggaacctatgaacctgatgaagattgggaagagcagagggaggagcggaaaaagactatggagctcaccacccgc

SEQ ID NO: 6584 - DNA, 795 bp, synthetic construct
  misc_feature 1..795: note = source = /note="Description of Artificial Sequence: Synthetic coding sequence"
  source 1..795: mol_type = other DNA
atgaaaaaggaagtgtgctccgtggcgtttcttaaggccgtgttcgccgagtttctggcaaccctcatttttgtgttttttggcctcggctccgcacttaagtggccatcggctcttcctaccattctgcagattgcccttgcattcgggttggccattggcaccctggcgcaagctctcggtcctgtcagcgggggtcacattaacccagccattactctggctctgctggttggtaaccaaatcagcctcctgagggcttttttctacgtggcagcacaactggtgggagcaattgcaggagctgggattctttacggtgtcgcccctctgaatgcccggggcaaccttgcagtgaacgccctgaacaacaacacgactcagggacaggcaatggtggtcgagctgatcctcacttttcaacttgcattgtgcatttttgcatcgactgatagcagaagaaccagcccggtcggttcacccgcgctttcaattggactctcagtcactctggggcacctcgttggaatctacttcaccggttgctcaatgaatccagccaggtcttttggacccgcggtggtgatgaaccgattttctcctgcacattgggtgttttgggttggccctatcgtgggagcagtgctggccgcaattctgtacttttatctgctttttccaaactcactgtcgctcagcgaaagagtggcgatcatcaaggggacgtacgagcctgatgaggattgggaagaacaaagagaagaacgaaagaaaaccatggagttgacgactaga

SEQ ID NO: 6585 - DNA, 795 bp, synthetic construct
  misc_feature 1..795: note = source = /note="Description of Artificial Sequence: Synthetic coding sequence"
  source 1..795: mol_type = other DNA
atgaagaaggaggtgtgttcggtggctttcctgaaggcggtgttcgccgagtttcttgcaactctgatattcgtgttttttggcctcggttcagccctcaaatggccttccgcactgcctaccattcttcagatagcacttgcctttggattggctatcggtactctggcacaagcactgggaccagtcagcggtggacacatcaatccagccattaccctggcactcctggtgggaaaccaaatttcccttctgagagccttcttctacgtggcagcgcagctggtgggagctattgcgggggctggtattctgtacggtgtggcccctcttaatgctagggggaatcttgcagtgaacgcactgaacaacaacactactcagggacaagcaatggtggtcgaactgattttgacctttcagcttgccctgtgtatctttgcatcgactgattcgcgtcgtacttcgccagtgggaagccctgccctgagcattggactgtcagtcactctgggtcatctcgtcggtatttacttcactggttgctcgatgaatcctgcccgctcatttggaccagcggtggtgatgaaccggttttcaccagcccattgggtgttttgggtcggtcctattgtcggggccgtgctcgcggcaattctctacttctacctcctgttcccaaactccctgagcctgtcggaaagagtggcgattatcaagggaacctacgagcctgatgaagattgggaagaacagcgcgaggagaggaagaaaaccatggaattgaccactaga

SEQ ID NO: 6586 - DNA, 795 bp, synthetic construct
  misc_feature 1..795: note = source = /note="Description of Artificial Sequence: Synthetic coding sequence"
  source 1..795: mol_type = other DNA
atgaagaaagaggtttgctctgtggcctttctgaaggccgtgtttgccgagtttctcgctaccctgatctttgtgttctttggcctgggctctgccctgaaatggcccagcgccctccccacaatccttcaaatcgccctcgcctttggcctggccatcggaactctggcccaggctttgggccctgtgagtggtggccatattaacccagctattaccctggctctcctggtaggcaatcagatctctctcctgcgggctttcttctacgttgcagcccagctggtgggcgctatcgctggcgctggcattctttatggggtggcccctcttaatgccagggggaaccttgcagtgaacgccctcaacaacaataccacccagggacaggccatggtggtggagctgatcctgaccttccaacttgccctctgcatttttgcttccactgactctcggaggaccagtccagtgggttctcctgctctgtccattggcctgtctgtcactctgggccacctcgtcggcatttatttcaccggttgttccatgaaccccgcccgcagcttcggacccgcagtagtgatgaacagattttctccagcacactgggtgttctgggttggacctatcgtgggtgctgttctggcagcaatcctctatttttatctgctgttccctaactctctgagcctgtcagaaagagtcgctatcataaaggggacttacgagcctgatgaagactgggaagaacagagggaagaaagaaagaaaacaatggaactgacgacgcgg

SEQ ID NO: 6587 - DNA, 795 bp, synthetic construct
  misc_feature 1..795: note = source = /note="Description of Artificial Sequence: Synthetic coding sequence"
  source 1..795: mol_type = other DNA
atgaaaaaggaggtgtgtagtgtggcctttttgaaagccgtatttgccgagttcctggcaaccctgatttttgtgttctttgggctgggaagtgcgctgaagtggccatcagccctgcccacaatcctccagatcgctttggcattcggcttggccatcggaaccctggcacaggccttgggcccagtctccggaggccatattaatcctgcgataaccctggccctgctggtgggcaaccaaatctcccttctgcgagccttcttctacgtcgccgcacagctggtgggcgctatcgcgggagctggtatcttgtacggcgtggcaccgctgaacgccaggggcaatctcgcagttaatgcacttaataataacaccactcaaggccaagcaatggttgtagagctcatcctgacgttccagctggcactgtgcatcttcgccagcacggactccaggaggacttctcccgtcggctcacctgccctgtcaatcggtctgagcgttactctgggacacttggttgggatttacttcacaggctgtagtatgaatcctgcgagaagctttgggccggcagttgttatgaatagattcagtcccgctcactgggtgttctgggtaggacccattgtcggagctgtgctggccgccattttgtacttttatctcctttttcctaattccctgtctctgtctgaacgcgtagcaattattaagggaacatatgagccggatgaggattgggaggagcagagggaagagcggaagaaaaccatggagctgaccacacgg

SEQ ID NO: 6588 - DNA, 795 bp, synthetic construct
  misc_feature 1..795: note = source = /note="Description of Artificial Sequence: Synthetic coding sequence"
  source 1..795: mol_type = other DNA
atgaaaaaggaggtatgctcagtggcatttctcaaggccgtgttcgcagaattcttggctaccctgatctttgtgttctttggactggggtctgcattgaagtggccaagtgctttacctaccatccttcagatcgctctggcctttgggctggcaattggtaccctcgcccaagcacttggtccagtctctggaggccatataaatcccgctatcactctcgctttgttagtggggaaccaaatctcactgctgagggcatttttctacgttgcagcccaacttgtgggcgcaatcgccggagccggtatcctgtatggagtggctcctcttaatgcaagagggaacctcgctgtgaatgcccttaacaacaacactactcaaggacaggctatggtggtggagttgattctgaccttccagctggctctttgtatctttgcgtcgaccgactcgaggcgaacatctccagtcggaagccccgcactgtctatcggcctttccgtcaccctgggccatctggtggggatctactttaccgggtgctcgatgaaccctgcacgcagctttggacctgctgtagtgatgaacagattttctccagctcactgggtcttctgggtgggaccaattgtcggggcagtgctggccgcaatattgtatttctatctccttttccctaactctctgtcattgagtgaacgagtggctatcattaaaggcacctacgagccagacgaagattgggaagaacagagagaggagaggaagaaaacaatggaacttaccactcga

SEQ ID NO: 6589 - DNA, 795 bp, synthetic construct
  misc_feature 1..795: note = source = /note="Description of Artificial Sequence: Synthetic coding sequence"
  source 1..795: mol_type = other DNA
atgaaaaaggaagtttgttccgtggccttcctgaaagcagtctttgccgaattccttgccacattgatattcgtgttcttcggtctgggctccgcccttaagtggccaagcgccctgcccaccatccttcaaatcgcgcttgctttcggtctggcgatcggaacattagcccaagccttaggtcctgtgtccggcggacatataaatccagcaattacactggcccttcttgtggggaatcagatctcactcctacgggcctttttctacgtggctgcccagctggtgggggcgattgccggagcaggcattctgtacggagtcgcccccctgaacgccagggggaacttagcagtgaacgccctcaataacaacaccacacagggacaggcaatggtggtggagcttatcctcacttttcaactcgcactttgcatctttgctagtaccgactcaaggagaacatcccccgttggatctcccgcattgagcattggtctgagtgtgactttggggcaccttgtgggcatttactttaccggctgtagcatgaacccggcgcgatcttttggccccgctgtagtgatgaaccgcttctcaccagcgcactgggtgttctgggtcggcccgatcgtaggggcagtacttgccgcaatcctgtatttctacctgctgtttcccaactccctctccctgagcgagagggtcgcaatcatcaagggtacatatgaacctgacgaggactgggaagaacagcgcgaggagcgaaagaaaacaatggagcttaccacccgt

SEQ ID NO: 6590 - DNA, 795 bp, synthetic construct
  misc_feature 1..795: note = source = /note="Description of Artificial Sequence: Synthetic coding sequence"
  source 1..795: mol_type = other DNA
atgaagaaggaagtgtgttcggtggcatttttgaaggctgttttcgctgaatttttggctactctaatcttcgtgtttttcggactggggagcgcgcttaaatggccatcggcactgcccaccatcctacagattgccctagcttttggacttgccatcggaacgctagcacaggcactgggacccgtgagcggcggccatatcaatcctgccatcaccttagcgctcctggtcgggaaccaaataagcctattgcgcgccttcttttacgtggccgcccagctggtgggggcgatcgccggggctggcatcttgtatggggtcgctcctctgaacgcacgcggtaacctggccgtaaatgcactgaacaacaacactacacaggggcaggccatggtggtggagctaattcttacatttcagctggcactgtgcatcttcgcatctaccgattcccgacgtacttctccagtcggatcacctgctctgtcaattgggttgtccgtgaccttgggacacttagtaggcatctactttacaggctgtagcatgaatcctgcgcgctcattcgggccagctgtcgtgatgaatagattttcccctgcccactgggtgttctgggtcggtcccatagtcggtgcggttttggctgctattctctatttctacctgcttttccccaatagcctgtctctgtcggagcgggttgcaatcattaaaggaacttacgagccagatgaggattgggaagagcagcgagaggagcgtaaaaaaactatggaacttaccacacgg

SEQ ID NO: 6591 - DNA, 795 bp, synthetic construct
  misc_feature 1..795: note = source = /note="Description of Artificial Sequence: Synthetic coding sequence"
  source 1..795: mol_type = other DNA
atgaagaaagaggtgtgctccgtcgcgttcctgaaagccgtgttcgccgagttcctcgcaactctgatcttcgtgttcttcggactgggatccgcccttaagtggcctagcgctcttcctacgatcttgcaaatcgcccttgctttcgggctggcgattgggaccctcgcccaggccctgggtcccgtcagcggaggacacattaacccggccatcactctcgcactgctcgtcggtaatcagatttcgctcctcagagccttcttttatgtggccgcacagctcgtgggagctatcgcaggtgccggtatcctgtatggcgtcgcaccacttaacgcgaggggcaaccttgcggtgaatgctctgaacaacaatacgacgcagggacaggcaatggtggttgagcttatcctgacctttcaactcgccctgtgtatctttgcttcaaccgattcgcgcagaacttcgccggttggctccccagcgctcagcatcgggctctcggtcactctgggtcacctcgtcggcatctatttcaccggatgctccatgaaccccgctcggagcttcggtccggccgtcgtgatgaatcggttttcgcctgcgcattgggttttctgggtgggtcctattgtgggggcagtgctggccgctatcctgtacttctacctgctctttcctaacagcctgtcgctgtcagaacgagtggctatcatcaaaggcacttacgagccggacgaggattgggaggaacagcgtgaagaacgcaagaaaaccatggaacttactacccgc

SEQ ID NO: 6592 - DNA, 795 bp, synthetic construct
  misc_feature 1..795: note = source = /note="Description of Artificial Sequence: Synthetic coding sequence"
  source 1..795: mol_type = other DNA
atgaaaaaagaagtgtgttcggtcgcatttctgaaggccgtgtttgctgagttcctggccacactcatctttgtcttttttgggctagggtcagctctcaagtggccatctgccctgccaactatcctccagatagcactcgcattcggcttggcaattggtacactggcgcaagctctcgggccagtgagtggcggacacatcaatccagccatcactctggcgctgttggttggcaatcagatcagcttactgcgcgcttttttctacgtggccgcccagctggtcggagccatcgccggggctggaatcctgtacggtgtcgcccctctgaacgcccgcggcaatttagccgttaacgcccttaacaacaataccacgcaggggcaagcaatggtcgtggaactcatactgacattccagctggctttgtgcattttcgcaagtaccgatagccgacgcaccagcccggtcggctcacccgcattgagcattggcctgagcgtgacacttgggcatctggtcggaatctacttcaccgggtgcagcatgaatcccgcgcggagctttggcccagctgtggtgatgaacaggttcagtcccgcacactgggttttctgggtgggtccgatcgttggagcggtcctggctgctatcctttatttctatcttctgtttccaaactcattgtctttatctgaacgggtggccatcattaaggggacctacgagcccgatgaagattgggaggaacagcgagaagaaagaaagaaaactatggagttgactacgcga

SEQ ID NO: 6593 - DNA, 795 bp, synthetic construct
  misc_feature 1..795: note = source = /note="Description of Artificial Sequence: Synthetic coding sequence"
  source 1..795: mol_type = other DNA
atgaagaaggaagtgtgttccgtggcatttctgaaggccgtgtttgcggaatttcttgcgacccttatcttcgtgttttttggactcggttctgcactgaagtggcctagcgctctgcctactattctgcagattgcacttgcctttggactggcaattggaacgctggcgcaagccctgggtcctgtgtctggcggccacatcaaccctgcaattaccctggcacttctggtgggcaatcaaattagccttttgagagcattcttttacgtggccgcccaactcgtgggggcaatagcaggtgcaggtattctctacggggtcgcacccctgaacgcacggggcaatctggcggtgaacgctctcaacaataacactactcaaggtcaggcaatggtcgttgagcttattctcacctttcagctggccctttgtattttcgcatcgaccgactcaaggaggacttcgcccgtgggttcgccagcactctctattgggttgtcggtgaccttgggacatctcgtgggcatttactttaccggttgctccatgaacccagccaggtccttcggacctgccgtggtgatgaataggttttcgcctgcccattgggtgttttgggtcggacctatcgtcggcgcggtgctcgcagcgattctgtacttctacctcctctttccaaattcactttcgctttccgaacgggttgcgatcattaagggaacgtacgaaccggacgaggattgggaagaacagcgcgaagagcgaaaaaagactatggaattgaccactagg

SEQ ID NO: 6594 - DNA, 795 bp, synthetic construct
  misc_feature 1..795: note = source = /note="Description of Artificial Sequence: Synthetic coding sequence"
  source 1..795: mol_type = other DNA
atgaagaaggaggtctgttcagtggccttccttaaggccgtgtttgcggagttcctggcaactctcatttttgtgttctttggtcttggatccgctctgaagtggccatccgcccttccaactattctgcagattgccctggcttttggccttgcaattggtaccctcgcccaagcactgggacctgtgtccggcggtcacattaaccccgctattaccctggctctcctggtgggtaaccagatatcgctgctgagagctttcttctacgtggcagcacagctggttggagcgattgcaggagcaggcattctttatggagtggcacccttgaatgcacgcggtaacctcgcagtgaacgcactcaacaacaataccactcaaggtcaggcaatggtggtggaactcatcctcacctttcagctggccctttgcatattcgcatcgaccgattccagacgaacttcgcctgtgggatcgccagcgctgtccataggactctcggtgactcttggccacctggttggcatttacttcactggttgctcgatgaaccccgcacggagctttgggcctgctgttgtgatgaatcgattttcgcccgcccattgggtgttctgggtcgggccaattgtcggagccgtgcttgcagccattctgtacttttacctgctgtttccaaactcgctgtccctctcagagagagtggcaatcatcaagggaacctacgaaccagacgaggactgggaagaacaaagagaagaaaggaagaaaaccatggaactcaccacccgc

SEQ ID NO: 6595 - DNA, 795 bp, synthetic construct
  misc_feature 1..795: note = source = /note="Description of Artificial Sequence: Synthetic coding sequence"
  source 1..795: mol_type = other DNA
atgaagaaggaggtgtgctccgtggcgtttctcaaggccgtattcgctgaattcctcgcgaccctgatcttcgtgttcttcgggctgggcagcgcgctgaaatggccgtcagctctgccaaccatcctccagatcgcgctggcttttggcctggccatcggaacgctcgcccaagcgctcggacctgtctctggaggacatatcaacccagcgatcaccctcgcccttctggtcggcaatcagattagcctcctcagagctttcttttacgttgccgcccagctggtgggtgccatcgctggagcgggaatcttgtacggagtggctccattgaacgcccgcggaaacctggcagtaaatgccctgaacaataacacgactcagggacaggctatggtggtggaacttatcctgacttttcagctcgcattgtgcatcttcgcctcaactgattcccggcgcacttcgccagtgggaagcccggcgctgtccatcggactgtctgtgactctggggcatctggtgggcatctactttaccgggtgctcaatgaacccagcccggtccttcggtccagcggtcgtgatgaatcggttcagccctgctcactgggtgttttgggtcggcccgattgtgggagccgtgctggcggccatcctgtatttctacctcctgtttccgaactcgctgtccctctcggaaagagtcgcaatcattaaagggacctacgagccagacgaggactgggaggaacaacgcgaggaacgcaagaaaacgatggaactgactactaga

SEQ ID NO: 6596 - DNA, 795 bp, synthetic construct
  misc_feature 1..795: note = source = /note="Description of Artificial Sequence: Synthetic coding sequence"
  source 1..795: mol_type = other DNA
atgaaaaaggaagtctgttcagtggctttcctgaaggcggtgtttgcagagtttctggccactctcattttcgtgttcttcggcctgggctcggccctgaagtggccatcggcccttccaaccatcctccagattgccctcgcttttggattggcgatcgggacgctcgctcaagcactcggaccggtttcgggcgggcatatcaatccggccatcaccctggccctgctggtcggtaaccagatctccctgctcagagcgttcttctatgtggccgctcagctggtgggagctatagcgggagctggcatcctgtacggtgtcgcccctctcaatgcacgcggaaatctggcggtgaacgccctgaacaacaatactacccaaggacaggcaatggtggtggaacttatcttgacctttcaactggccctgtgcatcttcgcctccactgacagccgacggaccagcccggtgggatcgcccgcgctgtccatcgggcttagcgtgactctgggacaccttgtcggaatttacttcaccggctgctctatgaaccccgcccgctcattcggaccagcagtcgtgatgaacaggttttcccctgcccactgggtgttctgggttggcccgatcgtcggtgccgtgctcgcggcaatcctgtacttctacctgttgttccctaactcactcagcttgtcggagcgggtggcgatcatcaagggaacgtacgaaccggatgaggactgggaggaacagcgcgaggaacggaaaaagactatggaactcactaccaga

SEQ ID NO: 6597 - DNA, 795 bp, synthetic construct
  misc_feature 1..795: note = source = /note="Description of Artificial Sequence: Synthetic coding sequence"
  source 1..795: mol_type = other DNA
atgaagaaggaggtctgctccgttgccttcctgaaggcagtctttgcagaatttctggccaccttgatatttgtattttttggactgggctccgctctcaaatggccgtctgcactccccacaattctgcaaatcgctctcgccttcggcctcgccattggtacactggcgcaggcacttggtcctgtgtctggcggtcacatcaacccggcaatcactctggccctgctcgtgggaaatcagatctcccttttgcgcgcatttttctatgttgctgcccagctggtcggcgctatcgccggcgccggaatcctctacggtgtggctccactgaatgctaggggcaacctggctgtgaacgcgcttaacaacaacacgacacaaggccaggctatggtcgtggagttgatcctgacgtttcagcttgcactgtgtatcttcgcctctacggacagtaggaggaccagtcccgtgggcagtcccgccctgagcatcggcctgtccgtgacgctcggtcaccttgtgggtatatacttcactggttgctccatgaacccagcccgcagctttggtcctgcagttgtcatgaatagattctctcctgcccactgggtgttttgggttggccccattgtcggcgctgtcctggctgccatcctgtacttttacctgctgttccccaattccctcagtctgtctgagagagtagccattatcaaaggcacatacgaaccagacgaagattgggaggagcagcgcgaggaaagaaagaagacaatggagctgaccactaga

SEQ ID NO: 6598 - DNA, 795 bp, synthetic construct
  misc_feature 1..795: note = source = /note="Description of Artificial Sequence: Synthetic coding sequence"
  source 1..795: mol_type = other DNA
atgaaaaaggaagtatgtagcgtggcctttctcaaggctgtgttcgcggagtttcttgccacactgatcttcgtgttctttggcctggggtctgctctcaagtggccgagtgcgctgccaactattctacagatcgcactcgcattcggtcttgccatcggcaccttagcccaggcactcgggccagtgtcgggtgggcacattaaccctgccattacgctggcgttactggtggggaatcagattagtctgctgagagctttcttttacgtggccgctcagctcgtcggggcgatcgccggagctggcatactgtacggcgtcgccccacttaacgcacgcggaaatttggcggtgaacgctctaaataataatacgacacaggggcaagctatggtagttgagctgatcctcacgttccagctcgctctttgtatattcgcgagcacggactccaggaggacatctccggtcggaagtcccgctctaagtattggactgagcgtcacactggggcatctagttggtatctacttcaccggttgtagtatgaatcccgcacgcagtttcggtcctgccgtggtcatgaataggttttctcccgcacattgggtattttgggtgggaccgatcgtgggggctgtgctggccgctatcctttatttctacctgctgtttcccaacagtctctctctttcagagagggtagccatcatcaagggtacttacgagcctgatgaagattgggaggagcagagggaggaaagaaagaaaactatggaactgactacacga

SEQ ID NO: 6599 - DNA, 795 bp, synthetic construct
  misc_feature 1..795: note = source = /note="Description of Artificial Sequence: Synthetic coding sequence"
  source 1..795: mol_type = other DNA
atgaaaaaagaggtttgttctgttgccttcctgaaggcggtttttgcggaattcctggcaacattgattttcgtcttcttcggattgggatcagctttgaagtggccaagcgccctcccaacaattctccagatagcacttgcttttggactcgcaattggtactctagcgcaggctctcggaccagtgagtggcggccacatcaatccggcaataacgctcgcacttctggtgggaaaccagatatcactcctccgagcatttttttacgttgcagctcagctcgtgggggctattgcaggagcaggtatcttgtacggcgtggcccctctaaacgcaagaggaaatctcgctgtaaacgccttgaataataatacaacacagggacaggccatggttgtcgaattgatcctcactttccaattggctttatgtattttcgcgagtacggactcgcgtcggacgtctccagtcggaagtccagcactctcaatcggactgagcgtgaccctaggtcaccttgtgggtatttacttcacaggatgttccatgaacccagcccgtagttttggaccagcagtagttatgaatcgtttttcaccagctcactgggtgttctgggtgggtccaattgttggagcagtattagcggctattctctatttttatctacttttcccgaactctttatcattgtctgaacgtgtggctattattaagggaacgtacgagccagatgaagactgggaagaacaaagagaggagcgtaagaaaacgatggaactcactacaaga

SEQ ID NO: 6600 - DNA, 795 bp, synthetic construct
  misc_feature 1..795: note = source = /note="Description of Artificial Sequence: Synthetic coding sequence"
  source 1..795: mol_type = other DNA
atgaagaaggaagtgtgctctgtcgccttcctgaaggcagtattcgccgagttcctagccaccctaatctttgtttttttcgggctgggctctgctctgaagtggccctctgcgttacctacaattcttcaaattgcgctggccttcgggctggcaattggaacgctggcacaggctctcggaccagtaagtggcggccacataaaccccgcaattaccctggccctacttgtcggtaaccagattagcctactgagggcgttcttctacgtggccgctcaactggtcggagccatagccggcgcggggatattatatggcgtcgctcctctgaacgcccgagggaacctggccgtcaacgcactgaataataataccacccagggacaggccatggtagtcgagctcatcctgacattccagcttgctctctgcatctttgccagcactgattctaggcgaaccagccctgttggctcgccggccctctccatcgggctttccgtcactctggggcacctcgtgggcatttacttcaccgggtgcagcatgaatcctgcaaggtcctttgggcctgccgtagttatgaatcgattctcccccgcccactgggtgttctgggtgggtcccatagtgggcgcggtacttgcagcaattttatatttttacctattgtttcctaacagcctgtctttatccgagcgagtggctatcataaagggaacttacgaaccagacgaagactgggaggagcagcgagaggaaaggaagaaaacaatggagcttaccaccaga

SEQ ID NO: 6601 - DNA, 795 bp, synthetic construct
  misc_feature 1..795: note = source = /note="Description of Artificial Sequence: Synthetic coding sequence"
  source 1..795: mol_type = other DNA
atgaagaaggaggtgtgctcagtggcatttctgaaagcggtctttgcggaattcttggcgaccctgatttttgtgtttttcggtctgggttctgccctcaaatggcccagtgcgctccccacgattcttcaaatcgccttggcgtttggacttgcgataggtactctggcccaagctcttggaccagtctcagggggtcacatcaacccagccatcacactggcccttcttgtgggtaaccagatttccttgctgcgcgcattcttttatgtcgccgcccagctggtcggagctatcgctggcgctggtattctgtacggggttgccccactgaacgcccgcgggaatctcgcggtgaatgctctcaataacaatactacccagggacaggctatggttgtcgagctgatccttacctttcaattggccctgtgcatttttgcgagcacggattctaggagaacgtcccctgtgggtagtcccgcactgtctataggcctcagcgtgaccctgggacatctggtggggatatactttacaggatgttccatgaaccccgccaggagcttcgggcccgcagtggtgatgaaccgcttttctccagcacactgggtcttttgggtgggacccattgtaggcgctgttctggctgcaatcctctacttttatctcttgtttccgaattctctctctctcagcgagcgcgttgcaattatcaagggcacttatgagcccgacgaagactgggaagagcagcgggaggagcggaagaagaccatggaactgactacccgc

SEQ ID NO: 6602 - DNA, 795 bp, synthetic construct
  misc_feature 1..795: note = source = /note="Description of Artificial Sequence: Synthetic coding sequence"
  source 1..795: mol_type = other DNA
atgaaaaaggaggtgtgcagcgtggcgttcttgaaggcggtgttcgcagagttcttggcgactctcatcttcgtctttttcggcctcggatcggccctgaagtggccgtccgctctgccgacgatcctccaaattgccctggcgtttggactggccatcggcactctcgctcaggccctgggaccggtgtcaggaggacacatcaaccctgcgatcactctggccctgctcgtgggcaaccaaattagccttcttcgcgcctttttctacgtggctgcacaattggtcggagcaatcgccggtgctggcatcctctacggagtggcccctcttaatgcacgcggtaatttggctgtgaacgcgctgaacaataacaccacccaggggcaggcaatggtggtggaactgatccttacctttcagctggctctgtgtatcttcgcatcgaccgattcgagacggacctcacccgtgggttcaccggcactctcgatcggtctgtcggtgactcttggacatctggtggggatctatttcaccggatgctccatgaatccggcccggagctttggaccagcggtcgtgatgaatagattttcgccagctcactgggtgttctgggtgggacctatcgtgggagcagtgctggctgcaattttgtacttctacctcctgttccctaacagcctgtcgctctcggaacgcgttgcgatcatcaagggtacctacgagccagacgaggactgggaagagcaacgggaggagagaaagaaaacgatggaactcactaccaga

SEQ ID NO: 6603 - DNA, 795 bp, synthetic construct
  misc_feature 1..795: note = source = /note="Description of Artificial Sequence: Synthetic coding sequence"
  source 1..795: mol_type = other DNA
atgaagaaagaggtctgctcagtggcattccttaaggcggtgtttgcagaatttctcgcgaccctcatctttgtgtttttcggtcttggaagcgctctgaaatggccttccgcgctcccgactattcttcagatcgctttggcatttggattggctatcgggacgttggcccaggcgcttggccctgtcagcgggggacacattaatcccgcaattactctggcactgctcgttggtaaccaaatatcactgctccgtgcctttttctacgtggcggcccagctcgtcggggcaattgcaggcgccggaatattgtacggtgttgcaccactgaacgcaaggggaaacctggctgtgaacgcactcaataacaacactacccaaggacaagccatggtggtggaacttattcttacttttcaactcgccctgtgtatcttcgcgtccactgatagtcggcgcacctctccagtgggatcgcccgctctttcgatcggcctttcggtcaccctgggccacctcgttggaatttactttaccggatgcagcatgaatcctgcgaggtccttcggacctgctgtggtgatgaacaggttttccccagcacattgggtgttctgggtgggtcctattgtgggtgcggtgctggcagcgatcctgtacttctatctcctctttccaaattccctttctctgtcggaacgggtggcgatcattaaaggcacgtacgagccagacgaggattgggaagagcagagagaagagagaaagaaaaccatggaactgaccactagg

SEQ ID NO: 6604 - DNA, 795 bp, synthetic construct
  misc_feature 1..795: note = source = /note="Description of Artificial Sequence: Synthetic coding sequence"
  source 1..795: mol_type = other DNA
atgaagaaggaagtttgctccgtcgcgtttctgaaggctgtgttcgcagaattcctcgcaaccctcatctttgtctttttcggcctgggatctgcgctgaagtggccttccgctctacccaccatccttcagatcgccctcgcttttggtctggcaatcgggactctcgctcaggccctgggacctgtatccggtgggcatattaaccctgcgatcacgctcgcactactcgtcggcaaccagatcagcctactgcgcgccttcttctacgttgcggcccagttggtgggtgccatcgcgggtgctggtattttgtatggggtagctccgctcaacgccaggggaaaccttgctgtcaatgccctaaacaacaacaccacccaaggccaagccatggttgtcgagctgattctcaccttccagctggccctttgcatctttgcttcaacggacagtcgtagaaccagcccggtcggctcgcctgctctcagtatcggcctgtctgtcaccctcggtcatttggttggcatttatttcaccggctgcagcatgaatcccgctcgatccttcggcccagcagtggtgatgaacagattcagcccggctcactgggtcttctgggttggtcccattgtcggagcggtgctggccgccatcctgtacttctatctgctttttcccaactcgctgagtttaagtgagcgcgttgccatcatcaagggaacttacgagccggacgaggactgggaggagcagcgtgaagagcgtaagaagaccatggagcttaccaccagg

SEQ ID NO: 6605 - DNA, 795 bp, synthetic construct
  misc_feature 1..795: note = source = /note="Description of Artificial Sequence: Synthetic coding sequence"
  source 1..795: mol_type = other DNA
atgaagaaggaagtctgtagcgtggcgtttttgaaagctgtgttcgctgagtttctggccaccctgatcttcgtgttcttcggcctggggagcgccctcaagtggccctccgccctgccgacgatcctgcaaattgcgcttgcctttggattggccatcggaactctcgcacaggcgctgggacctgtatcaggaggccacattaacccggcgattaccctcgctctgttggtgggaaaccagatcagcctgctcagggctttcttttacgtggcggcccaactggtgggggctatcgcgggggcaggcatcctctatggggtcgcaccgctcaatgctcgcggtaacctcgctgtgaacgccctgaacaataacacgactcagggacaggctatggtcgttgaactgatcctcacgtttcaacttgcgctgtgcatattcgcctcgaccgattcgcggcgcaccagcccggttggttccccagcgctcagcatcggcctctcagtaactctggggcacctggtcggaatctacttcaccggttgctccatgaatcctgcccgatcgttcggacctgccgtcgtgatgaatcgtttctcccccgcccattgggtgttttgggtcggaccgattgtcggtgccgtgctggccgccatcctttacttctacctcctgttccctaactccctttcgctgtcagaacgagtggcaatcatcaagggcacttacgagccagacgaagattgggaggagcagcgcgaagaacgcaagaaaactatggaacttaccactcgg

SEQ ID NO: 6606 - DNA, 795 bp, synthetic construct
  misc_feature 1..795: note = source = /note="Description of Artificial Sequence: Synthetic coding sequence"
  source 1..795: mol_type = other DNA
atgaagaaggaggtttgttcagtggccttcttgaaggccgtctttgcggaattcctggcaactctcatctttgtgttcttcggcctggggtcggccctgaagtggccgagcgcgcttcctaccattctgcaaatcgcgctggcgtttggactcgccatcggtactcttgcacaggcactcggaccagtgtcaggtggccacatcaacccggccatcacccttgctctgctcgtcgggaaccagattagcttgctgcgggcctttttctacgtcgcagcgcaactggtcggagccatcgcaggagcaggcattctgtacggagtcgcccccctgaatgctagaggcaacctggcagttaacgctctcaacaacaacaccactcaaggccaggctatggtggtcgaactgattttgacgttccagctggccctgtgcattttcgcgtccacggactcgcgcagaacttccccggtggggtcccctgccctctccattgggctgtctgtcaccctcggacaccttgtgggcatctacttcactggttgctctatgaatccggcgcgcagctttgggcccgcggtggtgatgaaccggttttcaccggcccattgggtgttttgggtcggaccaatcgtgggcgctgtgctggcggccatcctctacttctatctcctctttccaaattcactgagcctctccgagcgagtggccatcatcaagggcacctacgagccagacgaagattgggaagagcagagagaggagcgcaagaaaactatggagctgactacccgg

SEQ ID NO: 6607 - DNA, 795 bp, synthetic construct
  misc_feature 1..795: note = source = /note="Description of Artificial Sequence: Synthetic coding sequence"
  source 1..795: mol_type = other DNA
atgaagaaggaggtatgttcagtcgcgtttttgaaagcagtgttcgctgagtttctggccactcttatttttgttttcttcggcctgggttccgctctgaagtggccctcggctctgcccactatcttgcagatagctctggcctttggattggccatcggtactctggcacaggccttgggacccgtaagtgggggacacatcaaccctgcaattaccctggccctgctggtggggaaccagatcagcctgctaagggcatttttctatgtcgccgcacaactggttggcgccattgcgggagcaggcatattgtatggtgttgcacccctgaatgcccgggggaacctagcagtaaatgcgctgaacaacaacacaacacagggccaggcgatggttgttgaactaatcctgacttttcagcttgcattatgcatatttgcctcaaccgattctcggaggacaagtcccgttggctccccagcactgtccatcgggctctccgtgaccttgggccatctagttggaatctattttaccggatgtagcatgaatccagccaggtctttcggccctgcagttgtcatgaatagattcagtccggcccattgggtgttttgggtagggcctatcgtgggcgccgtcttggctgccattctctatttctatttactgttccctaacagtttgagcctttctgagcgagtggctataatcaagggcacctatgagcccgacgaagactgggaggaacagcgcgaagagcgtaaaaaaaccatggaactaaccacaaga

SEQ ID NO: 6608 - DNA, 795 bp, synthetic construct
  misc_feature 1..795: note = source = /note="Description of Artificial Sequence: Synthetic coding sequence"
  source 1..795: mol_type = other DNA
atgaagaaagaagtctgttcggttgcctttcttaaagcggtgttcgcagagttcctggcaaccctgatcttcgttttttttgggctgggtagcgcactgaaatggccatccgcactcccgactattcttcagattgctttagcattcggattggcgattggtaccttggcgcaggctttgggccccgtgagcgggggccatattaacccggccatcactctggcactgctggtcggtaaccaaattagcctgctccgcgccttcttctacgtggcggcccaactagtgggagctattgccggtgcaggcattctgtacggtgtcgcgcctctcaatgctaggggaaatctggccgttaacgcgctgaataacaatacgacccaggggcaagcaatggttgttgagctgatccttacgtttcagttggcgctgtgtatttttgccagcacggacagccgccgcacgagcccggtcgggagcccggctctgtccatcggtctcagcgttaccctgggccaccttgttggaatttattttactggttgtagcatgaatcctgcgcgcagcttcggcccagccgtcgtgatgaaccgtttttctccggcacattgggttttctgggtagggccaattgtgggagccgtgctggctgcaatcctgtacttctacctgctcttccctaacagcttgagtctgagtgagcgcgtggccattattaaggggacctacgagcctgacgaagactgggaagagcaacgcgaagagcgaaaaaagacgatggagttgaccacccga

SEQ ID NO: 6609 - DNA, 795 bp, synthetic construct
  misc_feature 1..795: note = source = /note="Description of Artificial Sequence: Synthetic coding sequence"
  source 1..795: mol_type = other DNA
atgaaaaaagaggtatgttccgtagcatttctgaaagcggttttcgccgaatttttagcaaccttaatttttgttttttttgggcttggttctgcattaaaatggcctagcgcgcttccaacgatccttcaaattgcactggcctttggactagcgattggcacacttgcacaggcccttgggccagtttcagggggtcatattaatccggcaattactttggcattgcttgttggaaaccaaatcagcctgctcagagcatttttctatgtcgcagcgcagttggtaggcgcgatcgccggggccggaatcttgtatggggtcgctcctctgaacgcccgcggcaatttggcagttaacgcgttaaataacaatacaacacagggtcaggcgatggtcgttgaactcatcctgacattccagctggctctgtgcatttttgcttccacagattctaggcgtactagcccggtaggctcaccggcactttctattggcttgtcagtaacgcttggtcatctcgttggcatatatttcacaggatgctctatgaaccctgcgaggagcttcggaccggctgtagtgatgaatcggttttcacccgcgcattgggttttctgggttggtcctattgtgggagcagtcttggccgcgatattgtatttctatcttctttttccaaattccttatctctgtctgaacgggttgcgattattaaaggtacgtatgagcctgatgaggattgggaggaacaaagagaagaacgaaagaaaacaatggagctgacaacgcgg

SEQ ID NO: 6610 - DNA, 795 bp, synthetic construct
  misc_feature 1..795: note = source = /note="Description of Artificial Sequence: Synthetic coding sequence"
  source 1..795: mol_type = other DNA
atgaaaaaggaggtttgttctgtggccttcctgaaggcagtgttcgctgagtttctggcaaccctgattttcgtattttttgggctcggctccgcgttgaaatggccatcggcactccctacaatccttcagatcgcgttagccttcggtttggcaatcggcaccttggcacaggctttgggccccgtgagcggaggccatattaaccccgccatcacgctggccctactggtggggaaccagattagcctcctgcgagcctttttttatgtggctgctcaactcgtgggcgctatcgccggagctgggattctctatggggtggcccccttgaatgcccgcgggaacttggcagttaatgccctaaataacaacaccactcagggccaggccatggtggtggaactcattcttacctttcagctcgcattatgtattttcgccagcacagacagtagaagaacatctcccgtgggaagcccggctctgtccatcgggctgtctgtgactctggggcacctcgtaggtatatacttcacgggttgttccatgaaccctgcccggtccttcggtcccgccgtggttatgaacaggttctctccggcccactgggtattttgggtcggccccatcgtcggagctgttctcgctgccatcctgtatttttacctgttgtttcccaattccctctccctctcagagagagtggccattattaagggtacttatgaacccgatgaggattgggaagagcagcgggaagaaaggaaaaagaccatggaacttaccaccagg

SEQ ID NO: 6611 - DNA, 795 bp, synthetic construct
  misc_feature 1..795: note = source = /note="Description of Artificial Sequence: Synthetic coding sequence"
  source 1..795: mol_type = other DNA
atgaagaaagaggtgtgcagtgtcgctttcctaaaggctgtgtttgcagagtttctggccactctgatatttgtgttcttcggtctcggcagtgctctgaagtggccgtccgcactgcccaccatcctccaaatcgcactggcatttggtttagcaataggcaccctggctcaggcactcggacctgtgtccggggggcacatcaaccctgcgattaccctggcattgcttgttggaaatcaaatcagtctgctgcgcgccttcttttatgttgcagcgcagctggtaggtgctattgctggcgctggaattctctatggtgttgctcctctaaacgccaggggtaaccttgctgtaaatgcgctgaacaacaacactacacaggggcaggctatggtggtggagctcattcttacattccagttggccctgtgcattttcgcctccactgactcccggcgtacgagcccggtcggatcacccgctctgagcattggcctctcagtgacactgggtcacctcgtgggaatctacttcacaggctgcagtatgaaccctgccagatccttcggccctgccgtggttatgaacagattctctccagcacactgggtattttgggtgggacccatcgtaggagccgttctggcggctatactgtacttttacttactgtttcccaactcgctgtccctgtctgagagggtagcgatcattaagggaacatatgagcccgatgaggattgggaagaacagcgtgaagaacgcaagaaaacaatggaactgactacccgc

SEQ ID NO: 6612 - DNA, 795 bp, synthetic construct
  misc_feature 1..795: note = source = /note="Description of Artificial Sequence: Synthetic coding sequence"
  source 1..795: mol_type = other DNA
atgaagaaggaagtgtgttctgtggcttttctgaaggccgtgtttgcagagttccttgcgactcttatctttgtgttttttgggctcggaagcgctcttaagtggccgtccgccttgcctaccatactccagattgcccttgcatttggtttggcaatcgggacccttgcacaagcactgggccctgtgtccggaggacacattaacccagcaattaccttggctctgctcgtcggaaaccagataagcctccttcgggctttcttttacgtcgccgcccaactcgtgggtgcaattgcaggagcggggatactgtacggtgtggcgccccttaatgcccgaggtaatcttgcagtgaacgccttgaataacaataccacccaaggccaggcaatggtggtggaactgatcctgacttttcaactggccctttgcatcttcgcatccacggattcgagacgcacttccccagtgggctcgcctgcgctgtcgattggcctgtctgtcaccttgggacaccttgtgggaatttacttcaccgggtgttctatgaacccagcacgctcctttggaccagcggtggtcatgaatagattttcaccagcccattgggtgttctgggtgggccccatcgttggagccgttctggcagcaatcctgtacttttatctgctgtttcctaactcgctgtccctttccgaaagagtcgccatcatcaaagggacctacgagccggatgaggactgggaagaacagagggaggaaagaaagaaaactatggagctgactaccagg

SEQ ID NO: 6613 - DNA, 795 bp, synthetic construct
  misc_feature 1..795: note = source = /note="Description of Artificial Sequence: Synthetic coding sequence"
  source 1..795: mol_type = other DNA
atgaagaaggaggtctgctcggtcgcatttcttaaagcagtgttcgccgagttcctcgcaaccctcatctttgtgttttttggcctgggctccgcactgaagtggccctccgcactccctaccatacttcagattgcgttggcttttggattggcaattggaactctcgcacaggcacttggacccgtgagcggaggccatatcaacccggcaatcaccctggcccttcttgtggggaaccagatttcgcttcttagagcgttcttctacgtcgcagcacagctggtgggagcaatagcaggtgcgggtatcctctacggcgtggcaccccttaatgcaagaggtaacctcgctgttaatgcactcaacaacaataccacgcagggacaagcaatggtggtcgagcttatccttacctttcagctcgcgctgtgcatttttgcctcgaccgactcacgcagaaccagccctgtgggctcgccggccctctccatcgggctctctgttactttgggccatctggtcggcatttactttactggatgctcaatgaacccagcgcgctcgtttggcccagcagtggtcatgaacagattttcccccgcccattgggtgttttgggtcggtcctattgtgggagccgtgctggccgcaatactttacttttaccttttgtttccaaactcactgtccctgtccgaacgggtggcgatcattaagggaacgtacgaacccgatgaagattgggaggaacaaagggaggaacgaaagaaaacgatggaactcactacgagg

SEQ ID NO: 6614 - DNA, 795 bp, synthetic construct
  misc_feature 1..795: note = source = /note="Description of Artificial Sequence: Synthetic coding sequence"
  source 1..795: mol_type = other DNA
atgaagaaagaggtctgttccgttgcttttctgaaggctgtcttcgctgagtttctggcaacgctcatcttcgtctttttcggcctgggtagtgctctgaagtggccctccgcacttcccacaatccttcaaatcgccttggcgttcgggctcgccatcggcacacttgcccaggctctcgggcccgtgagtggggggcacataaaccccgccatcaccctcgcactgctcgtggggaatcagataagcctgttgcgggccttcttctatgtggccgcgcagttagtcggtgccatcgctggcgccgggattttgtatggcgttgctccactgaacgcacgcggtaacctggcagtgaacgcactgaacaacaataccacccaagggcaggccatggtcgtcgagctgatcctaacattccagttagcattatgcatttttgcatctaccgatagtcgtaggactagccccgtcggatctccggcactgtcaatcggcctgagtgtgacacttggtcacctggtggggatttactttactgggtgttctatgaacccagccaggtccttcggccccgccgtcgtgatgaatagatttagcccagcccattgggtgttctgggtaggccctattgtgggtgctgtcttagccgctatcctatatttctacctgctatttccaaactcactttctctgtcggaaagggtagcaatcatcaaggggacttacgaacccgatgaggactgggaggaacagcgcgaagaacgcaagaaaacaatggagctgaccacacgt

SEQ ID NO: 6615 - DNA, 795 bp, synthetic construct
  misc_feature 1..795: note = source = /note="Description of Artificial Sequence: Synthetic coding sequence"
  source 1..795: mol_type = other DNA
atgaaaaaggaggtctgtagcgtcgctttcctcaaggctgttttcgcagaattcttggccactctgatcttcgtgttcttcggcctgggaagcgccctcaagtggccttcagccctgccaaccatcttgcagattgcgctcgcgtttggacttgctatcgggaccctggctcaagcactgggcccggtaagcggagggcatatcaacccggcgatcactttggcgctccttgtgggaaatcagatttctttgcttcgcgccttcttttacgtggctgcccagcttgtgggtgcaatcgcgggcgcgggcatactttacggagtcgcacccctgaacgcaagaggtaacctggcggtgaacgccctgaataacaacaccacccaagggcaggcaatggtcgtcgagctcatcctgacgttccaactcgccctgtgcatcttcgcatccaccgacagcagacgtactagtccggtcggctcaccggccctgtcgattggactgtcggtgactctcggacacctggtgggaatctactttactggatgctcaatgaacccggcccggtccttcggacccgccgtggtgatgaatcgcttctctcctgcgcactgggtgttttgggtcgggcccatcgttggcgccgttctggctgccatcctctacttctatctgctgttcccaaattcgctcagcctttcggaaagagtcgcgatcataaagggtacctacgagccagacgaggattgggaggaacagagggaagaacggaagaaaactatggaactcactacccga

SEQ ID NO: 6616 - DNA, 795 bp, synthetic construct
  misc_feature 1..795: note = source = /note="Description of Artificial Sequence: Synthetic coding sequence"
  source 1..795: mol_type = other DNA
atgaaaaaggaagtgtgttcagtcgctttccttaaggccgtgtttgccgagtttctcgcgactttgatcttcgtgtttttcggactggggtcagcactcaaatggccatccgcccttcctaccatcctgcaaatcgcactcgcctttgggctcgcaataggcactctggctcaagcacttggaccggtgtcaggggggcacataaatccagctatcacacttgctctgttagtgggcaaccaaatctctttgcttcgcgcgttcttttatgtggcagcccagttggtgggagcaatagccggagccggtatactgtatggcgtcgcacccctgaacgccagaggaaacctggcagtgaacgctcttaacaataatacgacgcaaggacaggcgatggtggtcgaattgattctgaccttccagctggctctgtgtatattcgccagcaccgactctagaaggacttcccccgtcggctctcctgccttgtccatcgggctgtctgtcactttaggtcatcttgtgggaatttactttacgggatgcagtatgaatccagctcgtagctttgggcctgccgtggttatgaaccggtttagccctgcccactgggtgttttgggtgggtccaatagttggagcagttttggctgctatcctgtatttctatctgctgtttccaaatagcctgagtctgagtgaacgagtggccataatcaaaggtacatatgaaccagacgaggactgggaggagcagcgggaggaacggaaaaaaactatggagctcacaactaga

SEQ ID NO: 6617 - DNA, 795 bp, synthetic construct
  misc_feature 1..795: note = source = /note="Description of Artificial Sequence: Synthetic coding sequence"
  source 1..795: mol_type = other DNA
atgaaaaaggaagtgtgttccgtcgccttcttgaaggccgtgttcgctgaattcctggccactctcatctttgttttctttggactggggtcggcgctcaaatggccgtcggccctgcctactatcctgcagatcgccctggcgttcggcttggctatcgggaccctcgcgcaggctctgggacccgtctcgggtggccacattaacccggccattaccttggccctgcttgtgggcaaccagatctcactcctgcgggccttcttctacgtcgccgcacagctggtgggcgcaatcgcgggagccggaattctctacggagtggcgccgctcaatgcgcggggtaatctggccgtgaacgcactcaacaacaataccactcagggccaagccatggtggtcgaactcatcctcacttttcaactggccctgtgtatctttgcatccactgactcacgccgtacctcgccagtgggatcacctgcactgtcgatcggtctgagcgtgactctgggacacctggtcggaatctacttcactggatgttcaatgaaccccgcaaggagcttcgggccggcagtcgtgatgaaccggttttcaccggctcactgggtgttctgggtgggaccgatcgtcggagcagtcctggccgcaatcctgtacttctatctcttgttcccgaactccttgtcgctgagcgagagagtcgcaatcataaagggaacttacgagcctgacgaggactgggaggaacagagagaggaacggaaaaagaccatggaactgaccacccgg

SEQ ID NO: 6618 - DNA, 795 bp, synthetic construct
  misc_feature 1..795: note = source = /note="Description of Artificial Sequence: Synthetic coding sequence"
  source 1..795: mol_type = other DNA
atgaagaaggaagtgtgctccgtcgcgttcctgaaggcagtattcgccgagttcctggcgactctgattttcgttttcttcggcctggggtccgcccttaaatggccttccgctttgccgactattctccagatagcactcgccttcgggctggccatcggcaccctggctcaggcgctgggcccagtctccggcgggcatatcaatccagcaatcaccctggcgctcctggtgggtaatcaaatcagcttgctgagagccttcttctacgtggccgcccagctggtgggagcaatcgcaggagccggaatcctgtatggagtcgcaccgcttaacgcccggggaaacttggccgtgaatgccctgaataacaacaccacgcagggccaagcgatggttgtggaactgatcctgaccttccagcttgccctgtgtattttcgcctcgactgactcgcgccgcaccagcccggtcggatcccctgcactgtcgatcggactctcggtgaccctgggccacctcgtgggaatctacttcaccggctgttcgatgaaccctgcgcggagctttggacctgcggtggtgatgaataggttcagcccggctcactgggtgttctgggtcggtccaattgtgggagcagtgttggctgccatcctctacttctacttgctgttccctaacagcctgtccctctcggagcgtgtggcaatcattaagggcacctacgagccggatgaagattgggaagaacagagagaggaacggaagaaaactatggaattgaccactaga

SEQ ID NO: 6619 - DNA, 795 bp, synthetic construct
  misc_feature 1..795: note = source = /note="Description of Artificial Sequence: Synthetic coding sequence"
  source 1..795: mol_type = other DNA
atgaaaaaggaggtgtgttcggtcgcgttcctgaaggcggtctttgcggaattcctcgccactctcatcttcgtgttttttggactcggatcggccttgaagtggccgagcgcgctccctactatcctgcaaatcgccctggccttcggccttgcgatcggtaccctcgcgcaggctttggggccagtctccggaggacacatcaatcctgccatcacgctcgcactcctggtgggaaatcagatcagcctgcttagagcctttttctacgtggccgcgcaactcgtgggcgcgatcgcgggcgctggaatcctttacggcgtcgccccactcaacgcacgcggaaatttggccgtgaatgccctgaataacaatactactcaaggtcaggctatggtggtggaacttatcctgaccttccaattggcgctttgtattttcgcctcgactgattcacgcaggacctccccagtgggaagcccggctctgtcgatcggtctgtcggtcactctgggccatctggtgggaatttacttcactggatgcagcatgaaccctgcaagatcgttcggccctgccgtggtgatgaaccggttctcgcctgcacactgggtgttctgggtcgggccgatcgtcggagcagtattggccgcgatcctgtacttctacctgctgttccccaacagcctgagcctgtcagagcgcgtcgctatcatcaagggtacgtacgaaccagacgaggactgggaggaacagcgtgaggaacggaaaaagacgatggaactcacgacccgc

SEQ ID NO: 6620 - DNA, 795 bp, synthetic construct
  misc_feature 1..795: note = source = /note="Description of Artificial Sequence: Synthetic coding sequence"
  source 1..795: mol_type = other DNA
atgaaaaaggaggtttgctctgtagcattcctcaaggcagttttcgcagaattcctcgcgacactgatctttgtgtttttcgggctaggatctgctctaaagtggcctagcgccctgcccacaatactgcagatagccctcgcatttggattagctatcggtacacttgcccaagcgctgggaccagtgagtgggggccacatcaaccccgccatcacactggctctgctagtagggaatcaaatttccctgctgcgagcatttttttatgttgcggcccagctggtcggtgccattgctggcgctggcattctctatggcgtggccccattgaacgcaaggggcaatctggcggtgaatgccttaaacaacaacaccacccagggtcaggcgatggtcgttgaattaatcctgaccttccaattggcactgtgcatctttgcctccaccgactcccgtcggacctctccagttggaagccctgctctgagcattggcctgtccgtcactttggggcatttagtggggatttatttcactggctgctccatgaatccggctcgctcctttggcccagccgtggtgatgaacaggtttagccctgcgcattgggtattctgggtcggccctattgtaggggctgtccttgctgccattctatacttctatctgttgtttccaaactctctgtccctgtcagagcgggtagccataatcaagggcacctacgaaccagacgaagattgggaggaacagcgagaagagcgaaagaagaccatggaattaacaaccaga

SEQ ID NO: 6621 - DNA, 795 bp, synthetic construct
  misc_feature 1..795: note = source = /note="Description of Artificial Sequence: Synthetic coding sequence"
  source 1..795: mol_type = other DNA
atgaaaaaagaagtgtgtagtgtggcgttccttaaagcggtgttcgctgagttcctggctacacttatcttcgttttctttggcttggggagcgcactgaagtggccaagcgccctcccaactattctgcagattgccttggcattcgggctggctatcgggacgctggcccaagccctggggcccgtgagtggtggacacattaaccccgcgatcacccttgcccttctggtgggcaatcagatttctctgctgcgcgcctttttctacgtggcagctcagcttgttggcgccattgccggagctggcatcctgtacggtgttgcccctcttaacgcccggggaaatctggcggtgaacgcattaaacaataataccacccaaggacaagctatggtggtcgaattaattcttacattccagcttgcactttgtatattcgcttcaactgattctaggaggacctcacccgtgggctccccagccctgtcgattgggctctccgtaacacttggacatctggtggggatctactttactggatgtagtatgaatccggctcgcagcttcggccccgccgtcgtgatgaatagatttagcccagctcactgggtgttctgggtgggcccgatcgtcggcgctgtcctggccgccattctgtatttctatttgctcttccccaattcactctcattgagtgagagggtggccattatcaaaggaacatatgagcctgatgaagactgggaggagcagcgagaagaaaggaagaaaacaatggaactaacgacacgg

SEQ ID NO: 6622 - DNA, 795 bp, synthetic construct
  misc_feature 1..795: note = source = /note="Description of Artificial Sequence: Synthetic coding sequence"
  source 1..795: mol_type = other DNA
atgaaaaaagaagtgtgtagcgtggcattcctgaaggcagtgttcgcagagtttcttgccacccttatcttcgtgttctttggattgggctcagcacttaagtggccaagcgcactgcccacgatccttcaaattgcgttggcattcgggctggctattggtactctggcccaagcactcggacccgtctcgggtggtcacataaaccccgcaattaccctcgcactgctggtcggaaatcagatctcgcttctgcgtgctttcttttacgtggctgcccagctggtgggtgcgatagcgggcgcgggcatcctttacggtgtggccccacttaatgcacgcggcaatcttgcagtgaatgcccttaacaataacaccacccagggacaggcaatggtcgtggaactgattctgacgttccaactcgcgctttgtatctttgcctccacggattcgcggcggacttcgcccgtcgggtcgccagcactttcgattggtctgtccgtgacccttgggcatctggtgggaatttacttcactggatgttccatgaatcctgcacgctcttttggacctgcagtggtcatgaaccggttttccccagcacattgggtgttttgggtgggaccgattgtcggagccgtccttgcagcaatactttacttttacctgctgttccctaatagcctttcactttcggaacgcgtggcaattatcaagggaacgtacgaacctgatgaagattgggaggaacaaagagaagagcgcaaaaagaccatggagctgaccacccgc

SEQ ID NO: 6623 - DNA, 795 bp, synthetic construct
  misc_feature 1..795: note = source = /note="Description of Artificial Sequence: Synthetic coding sequence"
  source 1..795: mol_type = other DNA
atgaagaaggaagtgtgctcagtggcctttctaaaagctgtgttcgccgagttcctcgccacgcttatcttcgtatttttcggcttgggcagtgccctgaaatggcctagcgcgctgcctacaatactgcagattgcacttgcctttggactcgcgatcggaaccctcgctcaagctctcggtcctgtgtctggaggtcatatcaaccctgccataactcttgccctgctggtcgggaatcagatctcactcctgcgggccttcttttacgtggccgcgcagcttgtgggcgctatcgctggcgcagggattctgtacggcgttgcgcctctgaatgcccggggcaatctggcagtgaacgccctgaacaataacaccacgcaggggcaagccatggtggtcgagttgattctgacgttccagctggcgctgtgcatcttcgcttcgactgatagccggagaacatctcccgttggatcccccgccctatccattgggcttagcgttacgttgggtcacctggtgggaatttacttcacagggtgtagcatgaatccggctagatcattcggcccagctgtggttatgaacagatttagtccggcccactgggtgttttgggtgggcccaatagtgggggctgtgctggctgcaattctctacttctatctcttattccctaactctctgtccctgtctgagagagtggccatcatcaaggggacctacgaaccagacgaggactgggaagagcaacgggaggagagaaaaaaaactatggaactcactacgaga

SEQ ID NO: 6624 - DNA, 795 bp, synthetic construct
  misc_feature 1..795: note = source = /note="Description of Artificial Sequence: Synthetic coding sequence"
  source 1..795: mol_type = other DNA
atgaaaaaagaggtttgcagtgttgcttttctgaaggccgtgtttgcggagtttctggctaccctgatcttcgtgtttttcggactagggtctgctctgaagtggccatccgccctccctaccatcctgcagattgcactcgcgttcggtctagcaattgggacgctggcacaggccctcggaccagtatccgggggacacataaaccctgcgatcaccctggccctcttggtaggcaaccagatcagtctgcttagggcgttcttctacgttgctgcacaattggtgggggcaatcgctggggctggtatcctatacggcgtcgccccgctcaacgctaggggcaatttagcagttaatgccctgaacaataacaccactcagggccaggctatggtagtggaacttattctgacctttcagctggccctttgcattttcgccagcactgactctcgacgcacgtctcccgtaggttccccagcactgagtattggcttgagcgtcaccctgggccacctcgtgggcatatacttcacaggatgttccatgaatcccgcacgatcatttggaccggccgtcgttatgaaccggttcagtcccgcacactgggtgttttgggtcggtcctatcgttggcgctgtgctggcagcaatcctgtatttttacctgctatttcccaattctctgtcactgtcagaacgagtggccatcattaagggcacgtacgaaccagacgaggactgggaagaacaacgcgaagagaggaagaaaacgatggaattgactacacgg

SEQ ID NO: 6625 - DNA, 795 bp, synthetic construct; identical to SEQ ID NO: 6614
  misc_feature 1..795: note = source = /note="Description of Artificial Sequence: Synthetic coding sequence"
  source 1..795: mol_type = other DNA

SEQ ID NO: 6626 - DNA, 795 bp, synthetic construct
  misc_feature 1..795: note = source = /note="Description of Artificial Sequence: Synthetic coding sequence"
  source 1..795: mol_type = other DNA
atgaagaaagaagtgtgcagcgtggcgttcctcaaggccgtgtttgcggaattcctcgccactcttatctttgtgttcttcggtcttggttcagctctgaagtggccgtccgcactcccaacgattttgcaaatcgcgctcgcttttgggctggccatcggcactttggcccaggcgctgggaccggtatctggtggacatatcaacccagcaatcaccctggccctgctcgtgggaaatcagatctcgctgctcagggcctttttctatgttgctgcccagctcgttggtgccatcgccggcgcgggaatattgtacggagtcgcgccgctgaacgcccgggggaacctggccgtcaacgcactgaataacaataccacccagggacaagcgatggtcgtggagctcatcctgacttttcagctcgcactctgtattttcgccagtaccgactcgcgacgcacttcccccgtgggatcgcctgccctgtcaatagggctgtcggtgactctgggacacctggttggaatctacttcaccggttgcagcatgaatcctgcacggtcgttcgggccagccgtggtgatgaaccggttctccccagcgcactgggtgttttgggtggggccgatcgtgggagccgtgctggctgccattctgtatttctacctcctgttcccgaacagcctcagcctgtcggaacgcgtcgctatcatcaagggaacctatgaaccggatgaggactgggaggaacaaagagaagaaagaaaaaagaccatggagctcaccactcgc

SEQ ID NO: 6627 - DNA, 795 bp, synthetic construct
  misc_feature 1..795: note = source = /note="Description of Artificial Sequence: Synthetic coding sequence"
  source 1..795: mol_type = other DNA
atgaagaaagaggtgtgcagcgtggccttcctcaaggccgtattcgctgagtttcttgcaaccctgatctttgttttcttcggactcggttccgcccttaaatggccatcagccctgccaacaatccttcaaatcgcattagcctttggactcgccattggcactttggcacaggctctgggacccgtgagcgggggacatatcaatcctgctataaccctcgctctactagtgggtaatcagatttcccttctgcgtgcatttttttacgtggccgcccagctagtgggagcaattgccggggccgggattctttacggagttgcacctttaaacgcacgcggaaacttagccgtgaatgctctgaacaataacacgacacaaggtcaggccatggttgtggaactcatcttgacctttcagctagcgttatgcatcttcgccagcacagatagccgtagaacaagccctgtgggaagccccgcactatccataggactgagcgtgactctgggccacctagtcggcatatacttcacgggttgttccatgaatcctgctcggtccttcggccctgctgtggttatgaacagattctcccctgcgcattgggtcttttgggtcgggccaatcgtgggagccgtcctggcagctatcctgtacttttatctcttgttccctaactctttatcattaagcgagcgtgtcgcaataatcaaaggtacctatgagccagacgaagattgggaggaacagcgtgaggagaggaagaaaaccatggagctcactaccaga

SEQ ID NO: 6628 - DNA, 795 bp, synthetic construct
  misc_feature 1..795: note = source = /note="Description of Artificial Sequence: Synthetic coding sequence"
  source 1..795: mol_type = other DNA
atgaagaaggaagtgtgctcggtggcctttcttaaggcagtgtttgcagagttccttgccaccctgatctttgtcttttttggtttggggagcgcactgaaatggccaagcgcgctcccaaccatccttcagatcgcgctggcatttggtcttgcaataggaactctcgcacaggcccttggccctgtgtccggtggtcacattaaccctgcaatcacccttgcgctgcttgtcggaaaccaaatttcgcttcttcgcgcatttttctatgtggccgcacaactcgtgggtgcaattgcgggagccggaattctttacggagtggcaccactgaatgcacgcggtaatctggccgtgaatgcactcaacaacaacacgacccaagggcaagccatggtggtcgaactgattctgacctttcagttggccctctgtattttcgcttcgactgattcgaggcgaacttccccagtggggagccctgcactgtcgattggactgtccgtgacgctgggtcacctggtcggaatatactttaccggatgttcaatgaacccagctcgtagctttggtcctgcagtggtgatgaaccggttttcgcctgctcactgggtattttgggtgggtcctatcgtgggcgcagttctggcagcaatactgtacttttacctcctgtttcctaactcgctgagcctctcagaacgtgtggccatcattaaggggacctatgagccagacgaggattgggaagagcaacgagaagaaaggaagaaaactatggaactgaccacgaga

SEQ ID NO: 6629 - DNA, 795 bp, synthetic construct
  misc_feature 1..795: note = source = /note="Description of Artificial Sequence: Synthetic coding sequence"
  source 1..795: mol_type = other DNA
atgaaaaaagaggtgtgtagcgttgcctttctaaaggcagtgtttgccgaattcctggcaaccctgatattcgtgttcttcggcttaggaagcgctctaaaatggccatctgcactgcctaccattctccagattgctcttgcctttggcctagcaattggcactctggcccaagccctgggcccagtatcaggcggccatatcaacccagctatcacccttgccctgctggtggggaatcagataagcctgctgagggctttcttctacgtagccgcacagcttgtgggcgcaattgccggcgccggaatcctctacggcgtggcacctttaaacgccaggggcaaccttgccgtgaatgcactcaacaacaacactacacagggccaggccatggttgtggaactcatcctgactttccagctggccctgtgcatttttgcctcaaccgattctagacgcacttctcctgttgggtctcccgctctatctattggcctgtccgttaccctgggacatttagtgggaatctatttcactggctgctcaatgaacccagcacgctcctttggcccagcagtagtgatgaatcgcttcagccctgcccactgggtcttctgggtcggccctatcgtgggcgctgtactagctgctattctctacttctacctgttgtttcctaattccctgtccctgtccgagagagtggcaataataaagggcacctacgagcctgacgaagactgggaggaacagagggaggaacgcaaaaagaccatggagctcactacaaga

SEQ ID NO: 6630 - DNA, 795 bp, synthetic construct
  misc_feature 1..795: note = source = /note="Description of Artificial Sequence: Synthetic coding sequence"
  source 1..795: mol_type = other DNA
atgaagaaagaggtttgtagtgttgcctttctgaaagccgtgttcgctgagttcctagcgactctgatcttcgtgtttttcggactcggatctgctctgaagtggccttcggccctgcccaccatcctgcagatcgccctggcattcggactggccataggcacattggcccaagcattaggtccagtctccggggggcatatcaatcccgctattacactggctctcctggtgggtaaccagatttcattgcttagagcatttttctacgtcgctgcgcagcttgtgggtgctattgctggggctgggattctatatggggtggcgccattgaatgctcgcggaaacttagcagtcaacgctctcaacaataacactacgcaggggcaggccatggttgtggagctcattcttacctttcagctggccctttgtatctttgcttcaacagattcaagacggacctccccagttggatcgcccgctttatcgataggactgtcagtgaccctgggacatctggtggggatctacttcacaggatgctccatgaatccggctaggtctttcggacctgcagtggtgatgaaccgattctccccagcacactgggttttctgggtaggtcctatcgtgggcgcagtgctggccgctattttgtacttctatcttctgttccctaattctctgtctctgagtgagagagttgcaattattaaaggcacatacgaacctgatgaggattgggaagagcagcgggaggagagaaagaaaacgatggagttgaccaccaga

SEQ ID NO: 6631 - DNA, 795 bp, synthetic construct
  misc_feature 1..795: note = source = /note="Description of Artificial Sequence: Synthetic coding sequence"
  source 1..795: mol_type = other DNA
atgaagaaggaagtgtgcagcgtggctttcctcaaagccgtcttcgcagagttcttggccaccttgatcttcgttttcttcggactgggctccgctctgaaatggccgtccgcactgcccaccattctgcagattgcacttgcttttggactagctatagggaccctggctcaggccctagggcccgtgagcggtggacatattaatccagctattacactagcactcctcgtgggcaaccagatcagtttgttgagagcgttcttttatgttgccgcacagctggtgggcgcgattgccggcgccggaattctttacggcgtagctcccctgaatgcccggggcaatcttgccgttaatgcattgaataacaacaccacacaaggacaggccatggtcgttgagctgatcttgaccttccagcttgcgttgtgcatcttcgcgtctacagattctagaagaacatctccagtcggtagtccagcattgtccatcggactctctgtgacactcgggcacctggtcggaatctacttcactggatgtagtatgaacccagctcggagctttgggccagccgtagtgatgaaccgtttcagtccagcgcattgggtgttctgggttggacctattgtcggtgcagtgctcgccgcaattctgtatttttaccttctgtttcccaatagcctgtcattgtctgagcgggtagccattatcaagggaacatatgagcccgacgaggactgggaagagcagagggaagagcgcaaaaagacgatggagctgactacaaga

SEQ ID NO: 6632 - DNA, 795 bp, synthetic construct
  misc_feature 1..795: note = source = /note="Description of Artificial Sequence: Synthetic coding sequence"
  source 1..795: mol_type = other DNA
atgaagaaggaagtgtgctctgttgcctttctgaaagccgtgttcgccgaatttctcgctaccctgatcttcgtgtttttcggactgggttctgcattgaaatggcctagtgcactcccaaccatcctgcagatcgccctggccttcggactcgctattggaaccctggctcaagctttgggacctgtttctggaggtcacattaacccagccatcactttggcactcttggtcggcaaccaaatatccctcctgagagcttttttctacgtggctgctcagctcgttggcgcaatcgctggtgccggcatactgtacggtgttgctccattgaatgctagaggtaacctcgcagtcaacgccttgaacaacaacaccacccagggacaggcaatggtagtggaattgattcttaccttccagcttgccctgtgcatctttgccagcaccgactctaggagaactagccctgtgggcagtccagccctgtctatcggtctgtctgtcaccctcggccatctggtgggcatttactttactggttgttccatgaatcctgcccgcagctttggtccagctgtcgtgatgaacaggttttcacctgctcattgggtcttctgggtgggcccaatcgttggtgcagttttggctgcaatactctatttttacctgctgttcccaaactccctgagtctctcagagcgtgtggcaattatcaagggaacctacgagccagacgaggactgggaggaacaaagggaggagcgcaaaaagactatggagctcaccactcgc

SEQ ID NO: 6633 - DNA, 795 bp, synthetic construct
  misc_feature 1..795: note = source = /note="Description of Artificial Sequence: Synthetic coding sequence"
  source 1..795: mol_type = other DNA
atgaagaaggaggtctgcagcgtagcgtttctgaaagccgtgtttgccgaattccttgctacacttatattcgtattctttggactgggcagcgcgcttaagtggccctccgctcttccaaccatactgcagatagcactggcatttggtttagcgatcggtacactagcccaggcccttggtcccgtttctggcggccatattaacccagcaattacgctggctcttttagtgggcaatcagatatcccttcttagggctttcttctacgtagcggcacagctagtgggtgctatagccggcgcagggatcttatatggcgtggctcctcttaatgcacgcggaaacctggctgtgaatgctttgaataacaataccactcaagggcaagccatggtggtcgaactgatactgacctttcagctggccctctgcattttcgcgagcacagattcaaggagaacatcccctgttggctcccctgccctctctatcggtttatctgttacactcgggcacctggtcgggatttatttcactggctgctccatgaatcctgcacgcagcttcggtcctgccgtcgtgatgaataggttctctcccgcccactgggtgttctgggtcgggcccatcgtcggggccgttctcgctgccatcttatacttttatctgctgttccctaattcattgtctctgtcagagcgggtggccatcatcaagggcacctacgagcccgacgaagattgggaggagcagcgggaggaaaggaagaagacaatggaactcacaaccaga

SEQ ID NO: 6634 - DNA, 795 bp, synthetic construct
  misc_feature 1..795: note = source = /note="Description of Artificial Sequence: Synthetic coding sequence"
  source 1..795: mol_type = other DNA
atgaaaaaagaggtctgctccgtggcgtttctaaaggctgtcttcgcagaatttttggccacacttattttcgtgttctttggactagggtctgctttaaagtggcccagtgcccttccaacaatacttcagatagctctggcttttggattagctatcgggacactggcccaagcattaggacctgtgtccggggggcatataaaccccgcgatcacacttgccctactcgtcgggaatcagatctcactcctgcgggcttttttctatgtagccgcgcaactcgtgggggctatcgccggggccgggatattatatggggtggcacccctgaatgctagagggaacctcgccgtcaatgctctcaacaacaacactactcagggacaggcaatggtagtagaacttatcctaactttccaattagcactatgtattttcgcctccactgattccagacgcacatcccccgtcgggagtccagcactgagtatagggctttctgtgacacttggacacctggtagggatttactttactgggtgttctatgaaccctgcacggagtttcgggccagccgtagtcatgaacaggttctctcctgcccattgggtcttttgggtcggacctatcgtaggagcagtacttgcagcaatcctctatttctatctcctatttcctaattctctctccctaagtgaaagagttgctattatcaaaggaacatacgaacccgatgaagattgggaggaacagcgggaagagagaaaaaaaacgatggaactgactacgcgg

SEQ ID NO: 6635 - DNA, 795 bp, synthetic construct
  misc_feature 1..795: note = source = /note="Description of Artificial Sequence: Synthetic coding sequence"
  source 1..795: mol_type = other DNA
atgaaaaaggaagtttgttcagttgcctttttaaaagctgtatttgcagaatttctagctacattaatttttgttttttttggattaggatcagcacttaaatggccttctgctttaccaacaattcttcaaatagctcttgcttttggattagcaattggaactcttgcacaagctcttggaccagtttctggaggacatataaacccagctattacattagctcttcttgtaggaaatcaaattagtttacttagagcttttttttatgttgcagcacaattagttggagcaatagctggagcagggattttatatggagttgcaccacttaatgctagaggaaatttagcagtaaatgcattaaataataatactacccaaggtcaagcaatggtagttgaacttattcttacatttcaattagctttatgtatatttgcaagtacagattcacgtagaaccagtcctgtaggaagtccagctttatctattggattatcagttacattggggcatttagttggaatttattttactggttgttctatgaatccagcacgatcattcggaccagctgttgttatgaatagattttcacctgctcattgggttttctgggtgggaccaattgttggagctgttttagcagccattttatatttttatcttttatttccaaattcattatcattatcagaaagagttgctataattaaaggtacttatgaaccagatgaagactgggaagaacaaagagaagaaagaaaaaagactatggaacttactactagg

SEQ ID NO: 6636 - DNA, 795 bp, synthetic construct
  misc_feature 1..795: note = source = /note="Description of Artificial Sequence: Synthetic coding sequence"
  source 1..795: mol_type = other DNA
atgaagaaagaggtgtgttctgttgcatttttaaaggcggtatttgcagagtttctggctaccctaattttcgtctttttcggcctgggtagcgccttgaagtggccttccgcactccctacgatcttgcagatcgcgctagcgtttgggctcgctattgggactttggcccaggcgttgggccctgtctccggtggtcatattaatcctgcaataacactggccctgctagtaggtaaccagatttccttgttgagagcattcttctacgttgcagcccaactggtgggggcaatcgcaggcgccggtattctgtacggggtggcgcctttgaatgccagaggaaatttagcggtcaacgcgctcaacaacaataccactcagggtcaagcgatggtggttgagctgatcttgactttccagcttgctctctgcatattcgcaagcaccgacagtcgtaggacaagtcccgtggggtcgccggccttgagtatcggtcttagtgtcacgctcggccatctcgtcggcatctatttcacaggatgtagcatgaatccagcacgatcgtttggtccagctgtcgtcatgaacagattttcccctgctcattgggttttctgggtgggtccaatcgttggcgcagttctggcggcaatactttatttctaccttttatttccgaattctctttcattatctgaacgagtggccattattaagggcacatatgaaccagatgaagactgggaagaacagcgcgaggaacgtaagaagaccatggaactgactacccgc

SEQ ID NO: 6637 - DNA, 795 bp, synthetic construct
  misc_feature 1..795: note = source = /note="Description of Artificial Sequence: Synthetic coding sequence"
  source 1..795: mol_type = other DNA
atgaaaaaagaagtatgcagtgtcgctttcctcaaagccgtgtttgctgaattcttagcgactctcatatttgttttctttggacttgggtccgctctaaaatggccatcagccttacctacaatcctgcagatagctctggcatttgggctcgccatcggaactctggcacaggccctgggaccagtgagtgggggacacataaaccctgctataacacttgctcttctagtagggaatcagatatctctcctaagggcttttttctacgtggcagcccagctcgtcggggcgatcgccggagccggaatcctttatggagtggctccattgaacgctcgagggaatctagcagtgaacgcactgaacaacaatactactcaggggcaggccatggtggtggaactaatacttacattccagcttgccctgtgtatctttgcgtcaactgactcgaggagaactagtccagtcgggtcccccgctctttctatcgggctctctgtgactttgggacatctagtgggaatctattttactgggtgttccatgaatccagccaggtcttttggaccagcagttgtcatgaatcggttctctcccgctcactgggttttttgggtgggacctattgtgggagctgttttggccgccatcctctacttttatctcctattccccaacagtctatctctgagtgagagagtagctatcatcaaagggacatatgagcctgatgaggactgggaagagcagcgcgaggaacgaaaaaaaacaatggaactcacaacaaga

SEQ ID NO: 6638 - DNA, 795 bp, synthetic construct
  misc_feature 1..795: note = source = /note="Description of Artificial Sequence: Synthetic coding sequence"
  source 1..795: mol_type = other DNA
atgaaaaaagaagtttgttccgttgcattcttaaaagcagtgttcgcagagttccttgcgacactcatttttgtgttcttcggcctaggttctgctttaaagtggccctcagcccttccgaccatacttcaaatagcattggcatttggtcttgcaattggtactctcgctcaagcactcggacccgtgtccggagggcatattaaccccgcaatcacgttggctttgttggttggtaaccaaatctccttgctcagggcattcttctacgtggctgcccagttagttggagctattgctggagcaggtattctctatggagtggcacctctaaatgcacgcggaaaccttgccgtaaacgcactgaacaacaacactacacaaggacaggcaatggtagtagaacttatactgactttccagctagccttgtgtattttcgcctctaccgactcacgtcgtactagcccggtgggttctccggcattgtctattggtttgtcagttactctaggacatcttgttggcatttatttcacaggatgtagtatgaaccccgctaggtctttcggaccagccgttgttatgaacaggttttcccctgcccattgggttttctgggtgggtcctatcgttggagccgttctagcggctatactgtatttctatctcctattccctaacagcctttcccttagtgaacgagttgctatcatcaaaggcacatatgaacctgatgaagattgggaggagcagcgtgaggaaagaaaaaagacgatggaattaaccacacgt

SEQ ID NO: 6639 - DNA, 795 bp, synthetic construct
  misc_feature 1..795: note = source = /note="Description of Artificial Sequence: Synthetic coding sequence"
  source 1..795: mol_type = other DNA
atgaaaaaggaggtgtgcagtgtggccttcctcaaggccgtgttcgcagaattcctagcgaccctgatctttgtgttctttggactaggatccgccctcaagtggcctagtgcactgcccaccattctgcagatcgctctggcgttcgggctcgcgattggcactctggcgcaagcccttggaccggtctctggaggacatatcaatcctgcaatcactttggccctcctagtagggaatcagatcagcctcttacgggctttcttctatgtggccgcgcagctggtaggcgccatcgccggggctggtatcctttatggtgtggcgcccctaaacgcgcggggaaacctagcggtaaacgccctgaataataacacaacgcaaggacaggcaatggtagtagagctcatcttaaccttccagttggccctatgcatattcgcctctacagacagccgcagaacctcacctgtaggcagccccgcgctcagtattggcctaagtgtgaccctgggtcacctggttggcatctattttaccggttgctcaatgaaccctgcccgatcattcggtcctgctgtggtaatgaatcgtttttcaccagcccactgggttttctgggtgggcccgattgtgggtgccgtcctagccgcgattctatatttttatctgctgtttccaaactctttaagtctctcagaaagggtcgcgattataaaaggaacatacgaaccagacgaggactgggaggagcagagggaagaacgcaagaaaacaatggaactgacgaccaga

SEQ ID NO: 6640 - DNA, 795 bp, synthetic construct
  misc_feature 1..795: note = source = /note="Description of Artificial Sequence: Synthetic coding sequence"
  source 1..795: mol_type = other DNA
atgaagaaagaggtgtgttcggtggctttccttaaagccgtgttcgcagagtttctcgccactctcatcttcgtgttcttcggactcggatccgcgctcaaatggccaagcgcccttccaactatcctccagatcgccctcgcgttcgggctggccatcggaaccctggcacaagcgctggggccagtgtctggcggacacatcaatccagccatcaccttggcgctgctggtgggaaaccagatcagcctgttgcgggctttcttctacgtcgctgctcaactcgtgggagctattgcaggagctggaatcctctacggagtcgctccgctgaacgcccgcggaaacctggcggtgaacgcactgaataacaacaccacccaaggtcaggctatggtggtcgagttgatccttacctttcagctggcgctctgcatctttgcctccactgattcgagaagaacctcccctgttggctctccggcgctcagcatcggcctttcagtcactctcggacatttggtcggaatctactttaccgggtgttccatgaatccggccaggtcctttggcccggccgtagtgatgaatcggttcagcccagcccactgggtcttctgggtcgggccgatcgtgggagctgtgctggcagcaatcctctacttttacctgctcttcccaaattcgctctccctgtcagaacgggtggccatcatcaaagggacttacgaaccggacgaagactgggaggaacagcgcgaggaacgcaagaaaaccatggaactgaccacccgc

SEQ ID NO: 6641 - DNA, 795 bp, synthetic construct
  misc_feature 1..795: note = source = /note="Description of Artificial Sequence: Synthetic coding sequence"
  source 1..795: mol_type = other DNA
atgaaaaaggaggtctgctcggtggcgtttctgaaagccgtatttgctgagttcttagcaaccttgatatttgtattctttggtttgggcagtgccctgaagtggccgtccgcgctacctacaatcctacaaatcgctctggcctttggccttgctatcggaacactcgcccaggcgttgggccctgtgagcggcggccatatcaatcctgccatcaccttggccttgctagtgggaaatcagattagcttattacgggcctttttttatgtcgccgctcagttggtgggagccattgccggcgcaggaattctgtatggcgttgcccccctcaatgcaaggggaaacctggctgtaaatgcccttaataataacactacccagggtcaggccatggtggtcgagttgatcctcaccttccagctggcactctgcattttcgcctctacagattcacggcggacctcacctgttggctctcccgctttgtcaatcggtttgtctgtgacactgggccacctcgtggggatctacttcacaggatgcagcatgaacccagctaggtctttcggaccagcagtagtgatgaaccggttctcacctgcacattgggttttctgggtgggacccatcgttggggcagtgttagccgccatcctgtacttctatctcctcttccccaatagtctctccctgtccgagcgcgtggcaattataaaaggcacctacgaacctgacgaagattgggaggagcagcgcgaggagaggaaaaagaccatggagctaaccacgaga

SEQ ID NO: 6642 - DNA, 795 bp, synthetic construct
  misc_feature 1..795: note = source = /note="Description of Artificial Sequence: Synthetic coding sequence"
  source 1..795: mol_type = other DNA
atgaagaaggaagtgtgttccgtggcgttcctcaaagcggtgtttgccgagtttctcgcaactctcatctttgtgtttttcggtctgggctcagcgctgaagtggccatcggccctgccgaccattctgcagatcgccctcgccttcggtttggccatcggaacccttgctcaggccctgggcccagtttcgggagggcacattaatcctgcgatcaccctggctctgctggtgggaaaccaaatcagcctgctccgggctttcttttacgtcgcggcccagctggtgggagctatcgccggggcggggatattgtacggcgtggcccctctgaacgcacggggtaacctggccgtgaatgctctcaataacaacaccacccagggacaagccatggtggtggaactgatcctcacctttcaactggccctgtgcattttcgcgtcaaccgactcacggcggacttcacctgtggggtccccggcgctgtcgatcggactcagcgtcacgctgggacacctggtgggaatatacttcactggatgctccatgaacccagcacggtcgtttggccccgctgtggtgatgaacagattctcgccggctcactgggtgttctgggtcggaccgatcgtcggggcagttttggcagccattttgtacttctacctcctgttcccgaattccctgtcgctgtccgaacgcgtggcaatcatcaagggcacttacgaaccggacgaggactgggaagaacagcgcgaagagaggaagaaaaccatggagttgaccactcgg

SEQ ID NO: 6643 - DNA, 795 bp, synthetic construct
  misc_feature 1..795: note = source = /note="Description of Artificial Sequence: Synthetic coding sequence"
  source 1..795: mol_type = other DNA
atgaagaaggaagtgtgctcggtggccttccttaaggcggtgttcgcagaatttctggcgaccctcatcttcgtattcttcggactgggttccgcgctgaaatggcccagcgccctcccgactatcctccagattgccctggcattcgggctggcgatcggcaccctggctcaggccctgggaccagtgagcggaggccacatcaacccggcaatcaccttggccctgcttgtcggcaaccaaatttcacttctgcgggcgtttttctacgtcgcggctcagctcgttggagccatcgctggcgcgggcatcctctacggagtcgctccacttaacgcccgcggcaatctggccgtgaacgccctgaataacaacactactcagggacaggccatggttgtcgagctgattctgaccttccagttggccctttgcatcttcgccagcaccgacagccgccggacgagccctgtcggatcaccggccctgtccattggactgtccgtgacgctcggccacctcgtgggaatttactttactggctgctcgatgaacccagcccggtccttcggtccagcagtggtgatgaatcggttctcaccagcccactgggtgttctgggtgggccccatcgtcggagccgtgctcgcagcaattctgtacttctacctgctcttcccgaactccctctcgctgagcgagcgggtggcaatcatcaagggaacctacgaaccagacgaggattgggaggagcaaagagaagaaagaaaaaagaccatggaactgaccacccgc

SEQ ID NO: 6644 - DNA, 795 bp, synthetic construct
  misc_feature 1..795: note = source = /note="Description of Artificial Sequence: Synthetic coding sequence"
  source 1..795: mol_type = other DNA
atgaagaaggaagtgtgctccgtcgcattcctcaaggcggtgttcgccgaattcttggccactctgatatttgtgttctttggactgggcagcgccctcaagtggccatccgctctcccaactatcctgcagatcgcgcttgctttcggactggcgatcggaaccctggcccaggcattgggcccggtgtctgggggccacatcaacccagcaatcaccctggccctcctcgtggggaaccagatcagcctgctgcgcgcctttttctacgtggccgcgcaactcgtgggagccattgccggagcaggaatcctgtacggggtggccccactgaacgccaggggaaatctggccgtgaatgccttgaacaataacaccacccagggccaggccatggtcgtggaactgatcctgactttccaactggcgctgtgcatcttcgcttcgactgattcgagacggaccagcccggtcggatcgccagctctgtcgatcggactctcagtcaccctcggacatctggtgggaatttacttcaccggatgtagcatgaaccctgcacgcagcttcgggccagctgtggtgatgaacagattttcaccggcacattgggtgttttgggtcggtccgatcgtgggcgccgtccttgcggctattctttacttctacctgctgttcccaaattcactgtcgctctcagagcgcgtggcgatcatcaaggggacctacgagccggacgaggattgggaggagcaacgcgaggagcgcaagaaaactatggaactgaccactagg

SEQ ID NO: 6645 - DNA, 795 bp, synthetic construct
  misc_feature 1..795: note = source = /note="Description of Artificial Sequence: Synthetic coding sequence"
  source 1..795: mol_type = other DNA
atgaagaaagaagtatgctcagtggccttcctgaaagccgtgttcgctgagttcctggccacactgatcttcgtgtttttcggtctgggctcggcgctgaagtggcccagtgcattacctacgatcctgcagattgctctggcgttcgggctggccattgggaccctcgcgcaagccctggggcctgtgagcggaggacacatcaaccctgcaattactctggccctcttggtgggtaaccaaatcagtctcttgcgagcattcttttatgtagcggctcaactggtgggagccatcgctggggccggcatactttacggagtcgccccgttgaatgcacggggcaaccttgccgtcaacgctctcaataataacacaacgcagggacaggctatggtggtggaacttattctcacctttcagctcgcactgtgcatctttgcttcaacggattcacggcgtacctcccccgtggggtcgcctgctctgagtatcggcctgagcgtcaccctggggcacttggttggaatctacttcaccggttgctctatgaaccctgctcggtcctttggccccgccgtcgtgatgaataggttcagccccgctcactgggttttttgggtaggaccgatcgttggcgccgtacttgcagctattttgtacttctacctcttgttccccaacagtctgagcctgtctgagcgcgtggccataataaaggggacctacgagccggatgaggactgggaggagcagagagaagagcgaaagaaaacaatggagttgacgactcgt

SEQ ID NO: 6646 - DNA, 795 bp, synthetic construct
  misc_feature 1..795: note = source = /note="Description of Artificial Sequence: Synthetic coding sequence"
  source 1..795: mol_type = other DNA
atgaagaaggaagtctgctctgtggctttcctgaaagcagtcttcgccgaattcctggccaccctcatcttcgttttttttggactgggttcagccctcaagtggcctagcgcccttccgacgatcctacagattgctctagccttcgggctggccatcggcaccctcgctcaggcactgggcccagtctctggagggcatatcaacccagctatcaccctggcgctgctcgtgggcaaccagatatccttactgagagcattcttctatgtagccgcccaacttgtcggggccatagcaggcgccggaattctgtatggcgttgcccctctgaatgcacgggggaacctcgccgttaatgcgctgaacaacaataccactcagggtcaagctatggtggtcgagctgattctaacctttcagctggcgctctgtatttttgcatccaccgattcaagacggactagtcccgtgggctctcctgccttgagcatcggtctctccgtgactttgggccatctagttggcatttatttcaccgggtgttctatgaacccagctcggagtttcggaccggcggttgtcatgaacaggtttagtccagcacactgggtcttctgggtcggcccgatcgtgggtgccgtcttggcagcaatactgtacttttatttacttttcccgaactcattgtctctttccgagcgagtcgccatcatcaaagggacatatgagcccgacgaggattgggaggagcagagagaagagagaaagaaaacaatggagctgacaacacgc

SEQ ID NO: 6647 - DNA, 795 bp, synthetic construct
  misc_feature 1..795: note = source = /note="Description of Artificial Sequence: Synthetic coding sequence"
  source 1..795: mol_type = other DNA
atgaagaaagaagtctgctcggtggcctttctgaaggccgtgttcgccgagttcctcgcaacgctgatcttcgtgttctttggcctcgggagcgcattgaagtggccttcggccctgccaaccatcctccaaatcgcattggcatttggactggccattggaacgcttgcacaggctctcggaccggtgtcgggtggacatatcaacccagcgatcaccctggccctgttggttggaaatcagatttcacttctcagggcgtttttctacgtggccgcccaactcgtcggcgccatcgccggagccggcatcctttacggagtggcaccgctgaatgctcggggaaatcttgcggtgaacgccctcaacaataacactactcaggggcaggccatggtcgtggaattgatcctcacttttcagttggccttgtgcatctttgcatcgacggattcgcggcggacctcgcccgtgggatccccggccctctctattggactgagcgttactttggggcacctggtgggcatctatttcaccggatgtagcatgaaccctgcgcgctccttcggaccggccgtcgtaatgaatcgcttctcaccggcccattgggttttctgggtggggccaatcgtgggcgccgtgttggccgcgatcctgtacttttacctgctgttcccgaacagcctttcgctgtccgagagagtggctatcattaagggaacctacgaaccggatgaggattgggaagaacaaagggaagaacggaagaaaaccatggagctgactacccgc

SEQ ID NO: 6648 - DNA, 795 bp, synthetic construct
  misc_feature 1..795: note = source = /note="Description of Artificial Sequence: Synthetic coding sequence"
  source 1..795: mol_type = other DNA
atgaagaaagaggtgtgctcagtggcgttcctaaaagctgtgtttgccgagtttctggcaactctgatttttgttttttttgggcttggaagcgcgctgaaatggccttctgccctgcctacgatactacaaatcgccctcgcgttcggccttgctataggaacactggcacaagctctgggcccagtaagtggtggacacatcaaccccgccataaccctcgccctgcttgtcggcaatcaaatttctcttctcagggcctttttttatgtcgcggcccaactggtaggggcgatcgctggggctggcatattatacggtgtggcacctcttaatgccagagggaatctagctgtcaacgcgctgaacaacaataccacccagggccaggcaatggtggttgagctaatccttacctttcagctggccctgtgtatcttcgcttctacagattcccggcggacaagccctgtcggatccccggcgttgtcgattggccttagtgtgaccttaggccacctggttggcatttatttcaccggctgctcaatgaatccggcccggtcgttcgggccagccgttgtcatgaatagattctctccagcacactgggtcttctgggtgggcccaatagtcggggcggtcctcgccgctatcttgtacttttatcttttgtttcctaacagtctgagtctcagcgagagagttgcaattataaaaggcacgtatgaacctgacgaggactgggaggaacaaagagaggaaaggaagaaaaccatggaactcacaacaagg

SEQ ID NO: 6649 - DNA, 795 bp, synthetic construct
  misc_feature 1..795: note = source = /note="Description of Artificial Sequence: Synthetic coding sequence"
  source 1..795: mol_type = other DNA
atgaagaaagaagtgtgttcagtggcatttctgaaggcagtgttcgccgaattcctggcaactttgatttttgtattcttcggactcggttcggccctcaagtggccaagcgcgttgccgactatcctgcagatcgcgctcgcgttcggactcgcgatcggtacgctggctcaggcactgggaccggtgtcggggggacacatcaatcctgccattactctcgctctgctggtgggaaatcaaatcagcctgctgcgcgccttcttctacgtcgctgcccagctcgtcggagccatcgccggtgccggaattctgtacggagtggcgccgctcaatgcccggggaaatctcgccgttaacgctttgaataacaataccacccaaggacaggcgatggtggtcgagctgatcctcacgtttcaactggcactctgcattttcgcatccactgactcacgcagaaccagcccagtgggcagcccggcgctgtcaatcggactgtccgtgactctcggccacctggttgggatctacttcactggatgctccatgaacccagcgcggtcattcggcccggctgtcgtgatgaatcggttctccccagcacattgggtgttctgggtcgggccgatcgtgggtgctgtcctggccgcaattttgtacttctacctcctgtttcccaacagcctctcgctgagcgagcgggtggccatcatcaaaggaacttacgagccggacgaagattgggaagaacagcgcgaggagcggaagaaaactatggaactgactacccgc

SEQ ID NO: 6650 - DNA, 795 bp, synthetic construct
  misc_feature 1..795: note = source = /note="Description of Artificial Sequence: Synthetic coding sequence"
  source 1..795: mol_type = other DNA
atgaaaaaggaagtgtgctccgtcgccttcttgaaggcagtgtttgcagagtttttggccacccttatctttgtcttttttggacttgggtcagctcttaagtggccgagcgcacttccgactattctccaaattgccctcgcattcggccttgctattggtacgttggcacaggcactgggacccgtgtcgggaggtcacataaatccagctattaccctggcacttcttgtggggaatcaaatttcgttgcttcgagccttcttttacgtcgcagctcagttggtgggggcaatcgcgggtgcggggattctgtacggagttgcgccactcaacgcacggggaaacctggcagtgaatgctctgaacaacaataccacccaaggacaagctatggtggtggaactgattttgacttttcagctcgcactgtgtatctttgcgtccaccgatagcaggagaacttcacctgtgggatcgcccgcactgtcgattgggttgtcggtgactcttggacacctggtgggtatctatttcaccggctgtagcatgaaccctgctcgctcattcggtcccgccgtggttatgaacagattttcacccgcccattgggtattctgggtgggaccgattgtgggagccgtgctggccgcaatcctttacttctacctccttttcccaaattccttgtcactgtccgaacgagtggcgatcataaaggggacttacgagccagatgaagattgggaagagcagagagaagaaagaaaaaagacgatggagcttactacccgg

SEQ ID NO: 6651 - DNA, 966 bp, synthetic construct
  misc_feature 1..966: note = source = /note="Description of Artificial Sequence: Synthetic coding sequence"
  source 1..966: mol_type = other DNA
atgtcagcaaagtccaggactatcgggataataggtgcacctttttcaaaaggtcagccgaggggtggggtcgaagaaggaccaaccgtgttgcgtaaagcagggctgctggaaaagctgaaggaacaagaatgtgacgtgaaggattacggcgatctgcctttcgcggatatccctaacgattcgccattccaaattgtcaaaaaccctagatcagtgggaaaggcaagcgaacaactggctggtaaggtggcagaggtaaagaaaaatggtcgcatctcgctggtcctgggaggcgaccactcccttgcgatcggttccatttccggtcatgcacgggtccatcctgatcttggggtgatttgggtggacgcccataccgacatcaacacccccctcaccactacctcggggaatcttcatggccaacccgtctcctttttgctcaaggagcttaagggtaagattcctgacgtgccgggcttttcgtgggtcaccccatgcattagcgccaaggatatcgtgtacataggacttagggacgtcgatcctggagagcattacattctgaaaaccctggggattaagtatttctctatgactgaggtggatagactgggtatcgggaaggtgatggaagagactctttcgtacctgctggggcggaagaagcgcccaatacatctttcattcgacgtcgacggtcttgatccttcgtttactccagctactggtaccccagtggtcggaggtcttacctaccgtgagggactgtacatcactgaagaaatctacaaaaccggtttgctgtcgggacttgacatcatggaggtgaacccatcgctgggcaagacgcctgaagaagtcactaggaccgtgaacactgcagtggcaattaccctggcatgttttggactggcgagagaagggaaccataagcctattgattacctgaaccctcccaag

SEQ ID NO: 6652 - DNA, 966 bp, synthetic construct
  misc_feature 1..966: note = source = /note="Description of Artificial Sequence: Synthetic coding sequence"
  source 1..966: mol_type = other DNA
atgtccgccaagagccggaccatcggaatcatcggagctccgttctcgaagggacagccacgcggaggcgtagaggaaggacctaccgtgctcagaaaggccggtctgctggagaagctgaaggagcaagagtgcgatgtgaaggactacggtgacctcccttttgcggatatcccgaacgactcaccatttcagatcgttaagaacccaaggtcggtcggaaaggcatcagaacaactggccggtaaggtggcagaggtgaagaagaatggacggatctccctcgtgctgggcggcgaccactccttggccatcggatccatctctgggcacgctcgagtccaccccgatctcggagtcatctgggtggacgcccacactgatatcaacactccattgaccactacctcaggaaatcttcatgggcagccggtgagcttccttctgaaggagctgaagggcaagatcccagatgtcccaggattctcctgggtgaccccatgtatcagcgctaaggacatcgtgtatattggcctccgggacgtggacccaggagaacactacatcctcaagacccttggcatcaagtatttcagcatgactgaggtcgacagactgggaatcggaaaggttatggaggaaaccctgagctatctcctgggtcggaagaaaagaccgatccacctctccttcgacgtggatgggcttgacccgtcgttcaccccggcgactggcactccggtcgtcggaggcctcacttacagggaaggactgtacatcactgaggagatttacaaaactggtttgctcagcggcctggacatcatggaagtgaacccatctctcggaaagactccggaggaggtgacgaggacggtgaataccgccgtggcgatcactctggcttgttttggcctggcgcgcgaaggtaaccataaacccatcgattacctcaacccaccaaaa

SEQ ID NO: 6653 - DNA, 966 bp, synthetic construct
  misc_feature 1..966: note = source = /note="Description of Artificial Sequence: Synthetic coding sequence"
  source 1..966: mol_type = other DNA
atgtctgccaaaagtagaaccatcggaattatcggagcgcccttcagcaaagggcaaccaaggggtggagtagaggagggaccaacggtcctgcggaaagcgggcctcctggagaaactgaaggaacaagaatgcgatgtgaaggactacggcgacctcccttttgcagacatccccaacgactcccctttccaaattgtcaaaaatcctagaagcgtcggcaaagcgtctgagcagctcgccgggaaggttgccgaggtgaagaagaatggccgaatctccctggtgttgggcggcgatcacagtctcgccattgggtccatatccggtcacgcaagagtgcacccagacctaggggtgatctgggtagatgcgcacaccgatatcaacactcccctgacgacgaccagcggaaacctgcacggccagcccgtgagctttctcctcaaggaactcaaaggcaaaatccccgatgtgcctggtttttcatgggtgacaccatgtatcagtgcaaaagacatcgtctacatcggactccgagacgttgacccaggcgaacactacatcctaaaaacattgggtataaaatacttctcaatgactgaggtggaccggctgggaattgggaaggtgatggaagagaccctgtcctacctgctgggacgtaaaaagcggcctattcacttgtcatttgatgtagacggtctcgaccctagttttaccccagccaccgggacacccgtcgtcggggggctgacatatagggaaggactttacattaccgaagaaatttataagaccggccttttgagcggtctggacataatggaggtaaatcctagcctcggcaaaacccctgaggaggtgaccagaaccgtgaacacagccgtggctatcactttggcatgtttcggcctcgcaagagaaggcaaccacaagccgatcgactacctcaatcccccaaaa

SEQ ID NO: 6654 - DNA, 966 bp, synthetic construct
  misc_feature 1..966: note = source = /note="Description of Artificial Sequence: Synthetic coding sequence"
  source 1..966: mol_type = other DNA
atgtcggccaagtcgcgcaccattggaatcattggggcgccgttctccaaaggccaacctcggggcggagtcgaagaaggaccaactgtccttagaaaggctggcctcctggagaaactgaaggagcaggaatgtgatgttaaggattacggagatctgccttttgccgatatcccaaatgacagccccttccagatagtgaagaacccacgctccgtaggaaaggcatcagagcagcttgctggaaaggtcgcggaggtgaaaaagaacggtcgaatttcgctcgtgctgggaggagatcactcgctggccatcggttcgatctccggacacgcacgggtccatccagatctgggtgtgatctgggtcgacgctcatactgacatcaacacccctctgactacgacctctgggaacctccatggccaaccggtcagctttctcctgaaagagctgaaaggcaagatcccagatgtcccaggtttctcatgggtgactccgtgcatctcggccaaggatatcgtgtatatcggactgagggacgtggacccgggggaacactacattcttaaaaccctcggcatcaaatacttctctatgaccgaagtcgaccggctcggtatcgggaaggtgatggaggagactctcagctaccttcttggacgtaagaaacgcccaatccatctgtctttcgatgttgacggactcgaccccagcttcacgccggcaaccggaacgcccgtggtgggaggactgacctacagagaaggactgtacatcactgaggagatctacaagaccggtctgctctccggactggatatcatggaggtgaatccaagcctggggaaaacgccggaggaagtgacccggaccgtgaacaccgccgtcgcgatcaccctggcttgcttcgggttggcgagggagggaaatcacaagccaatagactacctgaatccgccgaag

SEQ ID NO: 6655 - DNA, 966 bp, synthetic construct
  misc_feature 1..966: note = source = /note="Description of Artificial Sequence: Synthetic coding sequence"
  source 1..966: mol_type = other DNA
atgtccgcaaaatcccgcactatcgggatcatcggagccccattttcaaaaggacagccccggggaggggtggaagaaggacccactgtgctgcgaaaggctggactgctggaaaagctgaaagaacaggaatgcgatgtgaaagattacggagatctcccattcgcagatatccctaatgactccccattccagatagtgaaaaatcctaggtccgtgggaaaagcatctgaacagctggccgggaaggtggccgaggtgaaaaaaaacggaaggatctccctggtactcgggggagaccattcattggccatcgggtcaatctcagggcacgcaagagtgcaccccgatttaggagtaatctgggtcgatgcccatacagatataaacacaccccttacaactacttcaggaaacctccacggacaacccgtgtccttcttgctcaaagagctgaagggaaaaataccagatgtccccggattctcatgggtcacaccttgtatcagtgccaaagatatcgtctacatcgggctaagggatgtggatccgggagaacattatatactcaaaactttaggaataaaatatttttcaatgacagaagtggacaggctcgggataggaaaagtgatggaggaaactttgtcctatttgctcggacgaaaaaaaaggcctatacatttatctttcgatgtggacgggctggatccttcttttacaccagctactggaacacccgtggtgggggggctaacataccgggaggggttatatatcacagaagaaatttataagacaggacttctttcaggactcgatattatggaagtgaacccttcccttgggaagacaccagaggaagttacaagaacagtgaatactgcagtagccataacacttgcatgttttggactggctagggaagggaaccataaacctatcgattatctcaaccccccaaaa

SEQ ID NO: 6656 - DNA, 966 bp, synthetic construct
  misc_feature 1..966: note = source = /note="Description of Artificial Sequence: Synthetic coding sequence"
  source 1..966: mol_type = other DNA
atgagcgcgaagtcgagaaccattggaatcatcggagctccattctccaaaggacaaccaagaggcggtgtggaggaaggaccgaccgtcctcaggaaagccggactgctggagaaacttaaggagcaagaatgtgatgtgaaagattacggagatctcccattcgcagacatcccgaatgactcaccgtttcagattgttaagaacccgcggtccgttggtaaggcgtcagagcagctggcggggaaggtggccgaggtgaagaagaatgggcggatctccctggtgctcgggggtgaccacagcctggccatcggatccatatcaggacatgcccgcgtgcatccagatttgggagtgatctgggtcgatgcccacaccgatatcaacacgccgctgaccaccacctcgggaaacctccacggacagccagtcagctttctcctcaaggaactcaagggaaaaatcccggacgtgcctggattcagctgggtgaccccgtgcatctcggctaaggacatcgtatacatcggcctgcgcgacgtggatcctggggaacactacatcctcaagacgctcggaatcaaatacttctccatgaccgaggtggatagattgggaatcggtaaggtcatggaagagactctttcatatttgttgggacgaaagaagcgccctatccatctctcatttgacgtggacgggctcgacccgagcttcaccccagcgactggcactcctgtcgtgggcggcctcacttacagagagggtctttacatcactgaagagatctacaagactgggcttctgtcaggacttgatatcatggaggtgaacccgagcctgggaaagactccggaggaagtgactcgcactgtcaatacggcggttgcaatcactttggcctgcttcggacttgctcgcgaggggaatcataagccaatcgactatcttaacccgccaaaa

SEQ ID NO: 6657 - DNA, 966 bp, synthetic construct
  misc_feature 1..966: note = source = /note="Description of Artificial Sequence: Synthetic coding sequence"
  source 1..966: mol_type = other DNA
atgtccgcaaaatcgagaaccattggcattataggggctccgttcagcaaaggccagccacgagggggagtggaggaaggaccaaccgtgttgcggaaggcgggactcctcgaaaaactgaaggaacaagaatgtgatgtgaaggattacggagatctccctttcgcggacattcctaatgattccccatttcagattgtcaagaacccaaggtcggtcggtaaagcaagcgagcagcttgctggtaaagtggcggaagtgaagaaaaatggcaggatttccttggtgctgggaggcgaccactccctggccatcggttcgatttcgggacatgcacgtgtgcatcctgatttgggggtgatctgggtcgatgcccataccgacatcaacacccctcttactaccacttcgggaaatctgcatgggcaacctgtgtccttcctgcttaaggagcttaagggcaagattcctgatgttcctggtttttcctgggtcaccccttgcatctcggcaaaggacattgtgtacatcggactccgagatgttgatcctggtgagcattacatacttaagactcttggaatcaagtacttctccatgaccgaagtggacaggttgggaattggaaaagtgatggaggaaactctttcttacctgcttggtcggaaaaaacgccccatccacctctcctttgatgtggatggcctggatccgagctttacccctgccactgggacccctgtggtgggaggcctgacgtaccgagaaggactgtacattaccgaggagatttacaagactgggctgttgtcaggtcttgacatcatggaagtgaatccatcgttgggaaagactcccgaagaagttactcgcaccgtgaacaccgcagtggctataactctggcgtgtttcggacttgcgagggaaggaaaccacaagccgattgattaccttaaccctccaaag

SEQ ID NO: 6658 - DNA, 966 bp, synthetic construct
  misc_feature 1..966: note = source = /note="Description of Artificial Sequence: Synthetic coding sequence"
  source 1..966: mol_type = other DNA
atgtccgccaagagtcgaactattggaatcataggagcacctttctctaaagggcagcccagaggcggggtggaggaaggccccaccgtattaaggaaagccggcttgctagaaaagctgaaggaacaggaatgcgatgttaaggattacggcgacctaccatttgcggatattccgaatgatagcccttttcagatcgtaaaaaacccacgaagtgtgggcaaggcctccgaacagctcgcaggcaaagtggccgaagtcaagaaaaatggtagaatctctctggtgctgggtggggaccacagtcttgccatagggtccatttctggtcacgccagagtccacccggatctgggggtgatttgggtggatgctcacactgatatcaacacaccgcttacaaccaccagcgggaatctgcacggccagcccgtatcttttctgttgaaagagctgaaaggtaaaatccctgacgtaccaggttttagttgggtgacgccatgtatctcagctaaggatattgtttatataggcctgagggatgtggacccaggagaacactatattcttaagaccctggggattaagtatttcagcatgacagaggttgaccgactcggtatcggaaaagttatggaagaaactttgagctatttgttgggaagaaagaagcggccaatccacttaagctttgatgtcgatggcctggacccaagtttcacccccgccaccggcaccccagtggtggggggcctcacttaccgcgaaggcctctacattaccgaagagatctataagacaggcttactgagtggcctcgatatcatggaagtgaatccctccctgggaaaaacaccggaagaagtgactagaacagtaaacactgccgtggccatcacgctcgcttgcttcggtctagcacgagaggggaatcataagcccatagattacctaaacccacctaag

SEQ ID NO: 6659 - DNA, 966 bp, synthetic construct
  misc_feature 1..966: note = source = /note="Description of Artificial Sequence: Synthetic coding sequence"
  source 1..966: mol_type = other DNA
atgtcggccaaatcccggaccattggcatcatcggcgcccccttttccaagggccagcccaggggcggagtcgaggaaggtccgaccgttttgcggaaagccgggctgcttgagaaacttaaggaacaagaatgcgatgtgaaggactacggagatttgccattcgcggacatcccgaatgactccccgttccagatcgtcaagaacccccgctcagttggaaaagcctcggagcagttggcaggcaaagtcgctgaggtgaagaagaacggcagaattagcctggtgctcggaggggaccactccttggcgatcggaagcatcagcgggcatgccagggtgcatccagatctgggggtgatctgggttgacgcgcacaccgacatcaacaccccactgactactacttctggcaatcttcacggtcaacctgtgtcctttcttctgaaggaattgaagggtaagatccctgatgtgccaggattcagctgggtcacgccgtgcatctcggccaaggacatcgtgtacatcggcctccgcgatgtggacccaggggagcactatattctgaaaactctcggaattaagtacttctcaatgactgaggtggaccgcttgggaatcggaaaggtcatggaagagactctctcctacctgcttggtcggaagaaacggccgatacacctgtcattcgacgtcgatggtctggacccgtcgtttacccctgcaactggaactccggtcgtgggaggcctcacgtacagagaaggactctacatcaccgaggaaatctacaagactggtctgctgtctggactggatatcatggaagtgaaccctagcctcggcaagaccccggaagaagtgactcgtactgtgaatacggctgtggcaataaccctcgcttgtttcggtctggctagagaaggaaaccataagccgatagattacctgaatcccccgaag

SEQ ID NO: 6660 - DNA, 966 bp, synthetic construct
  misc_feature 1..966: note = source = /note="Description of Artificial Sequence: Synthetic coding sequence"
  source 1..966: mol_type = other DNA
atgagcgctaaatctaggacaataggaatcataggagcaccgttcagcaaaggtcagccccggggaggagtcgaagagggtccaaccgtgctccgcaaggccggtctgcttgaaaagctgaaggagcaggagtgcgatgtgaaagactatggggatctacccttcgcggacatccctaatgattcgccattccagattgtgaaaaacccacggagcgtggggaaggcaagcgaacagctggcaggtaaggtggcagaggtgaaaaagaatggtcgaattagcctcgttctgggcggggaccacagtctcgccatcggctccatctcaggccatgcgagagtgcaccccgatcttggggtcatctgggtggatgcacataccgatatcaatacgcccctgacgaccacatccggcaatctgcacgggcagccagtgtcctttctgcttaaagagctgaagggtaagatccccgatgttccaggtttcagctgggttaccccctgtatttccgccaaggatattgtctacatcggtttacgagacgtggatccgggtgagcactatatcctgaagaccctgggaattaaatatttttctatgacagaggtggaccggctcggaataggtaaggttatggaggagacactttcctacctgcttggtcgaaaaaagcgccctatccatctatccttcgacgtggatggattagacccaagctttactcctgctacgggcacccccgtcgtgggaggtctgacttatcgtgaaggactgtacatcactgaggaaatatataagacgggcttactctctggcctggacatcatggaagttaacccatcactgggcaagacgcctgaggaggtcacgaggaccgtaaacactgcagtggccatcaccttggcctgctttggcttagccagggaagggaatcacaaaccaatcgattacctgaacccgcccaag

SEQ ID NO: 6661 - DNA, 966 bp, synthetic construct
  misc_feature 1..966: note = source = /note="Description of Artificial Sequence: Synthetic coding sequence"
  source 1..966: mol_type = other DNA
atgtcggcgaaatcgcgtacgataggtataataggtgcgccgttttcgaaaggtcaaccgcgaggtggtgttgaagaaggtccgacggttctacgaaaagcgggtttattagaaaaactaaaagaacaagaatgtgatgtaaaagattatggtgatttaccgtttgcggatataccgaatgattcgccgtttcaaatagtaaaaaatccgcgatcggtaggtaaagcgtcggaacaactagcgggtaaagttgcggaagtaaaaaaaaatggtcgaatatcgctagttttaggtggtgatcattcgctagcgataggttcgatatcgggtcatgcgcgagttcatccggatctaggtgtaatatgggtagatgcgcatacggatataaatacgccgctaacgacgacgtcgggtaatttacatggtcaaccggtatcgtttttactaaaagaactaaaaggtaaaataccggatgtaccgggtttttcgtgggtaacgccgtgtatatcggcgaaagatatagtttatataggtctacgtgatgttgatccgggtgaacattatatattaaaaacgttaggtataaaatatttttcgatgacggaagttgatcgtttaggtataggtaaagtaatggaagaaacgttatcgtatttattaggtcgaaaaaaacgaccgatacatttatcgtttgatgtagatggtttagatccgtcgtttacgccggcgacgggtacgccggttgtaggtggtctaacgtatcgagaaggtctatatataacggaagaaatatataaaacgggtctactatcgggtttagatataatggaagttaatccgtcgttaggtaaaacgccggaagaagttacgcgtacggtaaatacggcggtagcgataacgctagcgtgttttggtttagcgcgagaaggtaatcataaaccgatagattatttaaatccgccgaaa

SEQ ID NO: 6662 - DNA, 966 bp, synthetic construct
  misc_feature 1..966: note = source = /note="Description of Artificial Sequence: Synthetic coding sequence"
  source 1..966: mol_type = other DNA
atgagcgcaaagtcccggaccatcgggatcattggtgcaccgttctctaagggccagccacgcggtggcgtggaggaggggcccactgtgctcaggaaggcaggcctgctggaaaagctgaaagagcaggagtgtgacgttaaagactacggcgacctgccgtttgcggatatcccgaatgactcaccttttcagatcgttaagaacccgaggtcagtggggaaggcgagcgaacaactcgccggtaaggttgcggaggtgaagaaaaatgggcgtattagcctggttctcggcggcgaccactccctggctattggctccattagcgggcatgctagggttcaccctgatctgggcgtcatctgggttgatgctcacactgatataaacactccactgacgaccacgagcggtaacctgcacggccagccggtttcttttctgttgaaagagctgaagggcaagattcctgacgtaccaggcttcagctgggttacgccgtgcatcagtgcgaaggacatcgtttacattggtctgcgagatgttgacccaggcgaacactacatcttaaaaacactcgggattaagtacttcagcatgaccgaagttgatcgcttgggtatcggcaaagtgatggaagagactttaagctatctgttaggtcgcaaaaaacgccctatccacctgagcttcgatgttgatggtctggacccgagcttcaccccggcgacggggacccccgtggtcggcggcctgacgtacagggagggcttatatatcaccgaagaaatctataaaactggcctcctgagcggtctggacatcatggaggttaacccatctttggggaaaaccccagaagaggtgacccgcaccgtaaatacggccgtggccatcactttggcctgcttcggattggcccgcgagggtaatcataaaccgatagattacctgaatccacctaag

SEQ ID NO: 6663 - DNA, 966 bp, synthetic construct
  misc_feature 1..966: note = source = /note="Description of Artificial Sequence: Synthetic coding sequence"
  source 1..966: mol_type = other DNA
atgagcgcaaagtcacgtacaattggcattatcggggctccatttagcaagggccagccccgtggcggagtcgaagaggggcccaccgtactgaggaaagccggcctgttggaaaagcttaaagagcaggagtgtgacgttaaagactacggcgatttaccctttgccgacattcctaacgatagcccttttcagatagtgaaaaatcctcgtagtgtgggaaaagcctccgagcaactggctggtaaagtcgcggaagtcaaaaaaaacggcaggatttcattggttttaggcggcgatcactccctggctataggaagtatttctgggcacgcacgcgttcaccccgatctcggagtgatctgggtcgatgcccataccgacatcaatacccctctgaccaccacttctggaaacttgcatggccagcccgtctcctttcttctgaaggagctgaagggcaagattccggatgtccccggattctcatgggtgaccccttgtatttcggcaaaggacatagtgtacattggattgcgcgatgtggatcctggcgaacactacatacttaagaccctggggatcaaatacttttccatgaccgaggtggatcgcctgggtattggtaaagtcatggaagaaacactcagctatctattgggcaggaaaaaaaggccaattcacctttccttcgatgtggatgggttggacccttctttcaccccagcaaccgggacccccgttgtggggggtctgacctacagagagggcctgtacattactgaggaaatctataagaccggcctgctttccggcctggacattatggaagttaacccgtctttaggcaaaactcctgaagaagttacaaggaccgttaatacggctgtagccatcaccttagcctgcttcggcctggcgagagagggcaatcataagcccattgactacctgaacccaccaaag

SEQ ID NO: 6664 - DNA, 966 bp, synthetic construct
  misc_feature 1..966: note = source = /note="Description of Artificial Sequence: Synthetic coding sequence"
  source 1..966: mol_type = other DNA
atgtccgccaagtccagaactattgggattattggtgcacccttttcgaaggggcagcctcgtgggggagtggaagaaggtcccactgtccttcgaaaggccggtctgcttgaaaagctgaaggaacaggagtgtgatgtgaaagattacggagatctgcctttcgccgacattcccaacgacagcccatttcagattgtcaagaatccccgcagcgtcgggaaggcatccgaacaactggcaggaaaggtcgccgaagtgaaaaagaatggtaggattagccttgtccttggtggagatcattcccttgcaatcgggtcgatttcaggccacgcgcgggtccacccggatcttggggtcatttgggtggacgcccacactgacattaacacgccactgactactaccagcggtaacctgcatggacagccagttagctttctgctgaaggaacttaagggaaagattccagacgtgcccggattttcctgggtcaccccatgcatctcagcaaaagacatcgtgtacattggtctgcgagacgtggacccaggagagcactacattctgaaaacccttggaattaagtacttctcgatgaccgaggtcgatagacttggcattggaaaagtgatggaagaaactctctcctaccttttgggacggaagaaaagacccattcatctttcttttgatgtggacggactcgatccatcatttacccctgctaccggtactccggtggtggggggacttacctacagggaagggctctacataaccgaagagatctataagaccggattgctgtcgggactcgacattatggaggtgaacccttcattggggaaaacccctgaagaagtgacccgcacggtgaacaccgcggtggctatcactctggcgtgtttcggacttgcgcgcgaaggcaaccataaacctattgattacctcaaccctccaaag

SEQ ID NO: 6665 - DNA, 966 bp, synthetic construct
  misc_feature 1..966: note = source = /note="Description of Artificial Sequence: Synthetic coding sequence"
  source 1..966: mol_type = other DNA
atgtccgcgaaatcaagaactatcggaataataggagctccattctcaaaagggcagccaagggggggagtagaagaaggacccactgtattgaggaaagccggattgctcgaaaaactgaaagaacaggaatgtgatgtgaaggattacggagacctgccgttcgcagatattcccaatgattctccatttcaaatagtgaaaaaccccaggtccgtgggaaaagcatctgaacagctcgcagggaaggtagcagaggtcaaaaaaaacgggaggatatctctagtgcttggaggagatcacagtctagctattgggtcgatctctggacacgcccgcgtgcatccagacctaggagtcatctgggttgacgcccatactgatataaacactcctttgactactacttctggaaacctacacggacagcccgtctccttcttgctcaaggagctgaaaggaaaaatccctgatgtgcctggattttcttgggtcactccttgtatctccgcaaaagatatcgtatacatcggactaagagacgtggatcctggggaacattatattctgaagactcttgggatcaaatatttctcaatgacagaagtggacaggctggggattgggaaagtcatggaagaaacactgtcgtatctactggggcggaaaaaaagaccaatccacctgtccttcgacgtcgatggactggatcctagttttacgcccgcaacaggaacacccgtggtgggaggactgacatatagggaaggattgtatataacagaagaaatctataaaacaggactcctgtctgggctcgatatcatggaagtgaatccctctctcgggaaaactccagaggaagtgacaaggacagtaaatactgctgtggctataacattagcttgtttcggactggccagggaagggaatcataaaccaatagattatttaaatccgcccaaa

SEQ ID NO: 6666 - DNA, 966 bp, synthetic construct
  misc_feature 1..966: note = source = /note="Description of Artificial Sequence: Synthetic coding sequence"
  source 1..966: mol_type = other DNA
atgtcagcgaagagccgcactatagggattatcggggcccccttttcaaaaggacagccacgcggaggggtcgaggaaggtcctacggtgttgagaaaggcggggttgctcgagaagctcaaagaacaggagtgtgacgttaaagactatggtgatctaccattcgccgacattccaaatgactctcctttccagattgtgaagaacccccgctccgtgggaaaggcctcagagcaactagccggaaaggtggcagaggttaaaaagaacggaagaatctcactggtcctcggcggcgatcacagtctggcgatcgggagtatttcgggacacgcccgagtacacccagatttgggtgtgatctgggtggatgcgcatactgacatcaatactcccttgacaacgacgtccggtaacctgcacggccagccagtctcattcctactgaaggagctgaaaggtaaaatccccgacgtgccaggcttttcgtgggtgacaccctgcattagcgccaaggacatcgtctatattggcctgagagacgttgatccaggggagcactacatcctgaagaccctcgggattaaatacttttcaatgactgaggtggaccgtcttggaattggcaaggtaatggaggaaactctctcatacttgctcggaagaaagaagaggcctatccacctgtccttcgacgttgacggactggaccccagctttacccccgcaaccggaacacctgtagtaggaggcttgacgtaccgagagggcctgtatattaccgaggagatttacaagacagggttgctgtcaggcctcgatatcatggaggtgaacccatccctgggaaagactcctgaagaagtgacacgcacggttaatacagccgtggctatcacccttgcctgctttggcctcgcgcgcgaagggaatcacaagcccattgattatctgaacccccctaaa

SEQ ID NO: 6667 - DNA, 966 bp, synthetic construct
  misc_feature 1..966: note = source = /note="Description of Artificial Sequence: Synthetic coding sequence"
  source 1..966: mol_type = other DNA
atgagcgcaaagagccgtacgatcggtatcatcggtgcacccttttcgaagggccagcctaggggtggtgtggaggagggacctactgtgctccggaaggcaggactgctggaaaagttgaaggaacaggagtgtgacgtcaaggactacggtgatctcccgttcgccgacataccaaatgattcaccctttcagatcgtgaagaatccacgttccgtgggcaaggcctcggaacaactggcaggtaaagtggctgaagtcaagaagaacgggagaatttctcttgtcctgggaggggaccattcgcttgcgattggcagcatcagcggacatgccagagtgcatcccgatctcggtgtcatttgggtcgatgcacacaccgacattaacacccctctgaccacgacttcaggcaacctgcacggccaacctgtgagttttctgctcaaggaacttaagggtaaaatccccgacgtgcccggattttcgtgggtgaccccttgtatctccgcgaaggatatcgtgtacatcggtcttagagatgtcgatcccggcgaacactatatcctcaaaaccctggggattaagtacttctcgatgacggaagtggataggcttggcattggtaaggtgatggaggaaaccttgagctaccttctgggcagaaagaaaagacctattcatctgagctttgatgtcgacggactggacccatctttcactcccgcaactgggactccagtcgtcgggggtcttacctaccgcgagggcctttacattactgaagagatatacaaaactgggcttctgagcggtcttgacattatggaagtgaaccctagccttggtaagaccccagaggaggtaactagaaccgtgaatactgcagttgcaattacgctcgcctgctttggactggctagggaggggaatcacaaacctattgactacctcaaccctcccaaa

SEQ ID NO: 6668 - DNA, 966 bp, synthetic construct
  misc_feature 1..966: note = source = /note="Description of Artificial Sequence: Synthetic coding sequence"
  source 1..966: mol_type = other DNA
atgtcagctaaaagtcgaacaataggtattattggagctccattttctaagggacaacctagaggtggtgtggaggaaggaccgactgtgctgagaaaagccggccttctcgaaaagcttaaggaacaagaatgtgatgttaaagattatggtgatcttcctttcgcagacattccgaatgacagcccattccaaatcgttaaaaaccccaggtcggttgggaaggcatcggagcaattggcaggaaaggtggctgaagttaagaagaacggccgcatatctctggtccttggaggtgaccattcgcttgcaataggcagtatctctggtcatgcgagggtacatccagaccttggtgtcatttgggttgacgcgcacacagatataaacacacccctgaccacaaccagcggtaatctgcacggtcagcctgttagcttcctgttgaaggaactcaaggggaagatcccagacgtcccaggttttagttgggttacaccttgtatatccgccaaagatatcgtttacatcggtctgagagacgttgatcctggcgagcattacattctgaaaactttggggattaaatacttttctatgactgaagttgaccggcttggtataggtaaggttatggaagagacgctctcttatcttttaggtaggaagaaacgaccgattcacctatcatttgacgttgacggcctcgacccaagctttacgccagcaacaggtacccctgttgtggggggattaacctaccgggaaggattgtacattactgaagagatatacaaaaccgggctgttaagcggacttgatattatggaagtgaacccttctcttggaaagacccctgaagaagttaccaggacagttaacactgcagtagccataaccctagcatgttttgggcttgcaagagaaggaaatcataaacctatcgattaccttaaccctccaaag

SEQ ID NO: 6669 - DNA, 966 bp, synthetic construct
  misc_feature 1..966: note = source = /note="Description of Artificial Sequence: Synthetic coding sequence"
  source 1..966: mol_type = other DNA
atgtcggcgaaaagcagaaccatcggcatcatcggtgcccccttcagcaagggccaaccgcgcggcggtgtcgaggagggacccacggtcctccgtaaagctggcctgctcgagaagttgaaggagcaggagtgcgatgtgaaggattatggagaccttcctttcgctgatataccaaacgactctcccttccaaatcgtgaagaacccccggagcgtcggcaaggcatccgagcagctggccggtaaggtcgccgaagttaaaaagaacggccggatctctctggttctgggcggagatcactcactcgccataggatctatcagcgggcacgctcgggtgcatcccgacttaggagttatatgggtggatgctcacacagatatcaatacccccttaactaccacttctggaaaccttcacgggcagcctgtctcttttttgctcaaagaactcaagggtaagatcccagacgtgccgggcttttcttgggtaactccttgcatatctgccaaagatatcgtttacatagggctgagagatgttgaccccggggaacactacatcttgaagacgctggggatcaagtacttcagtatgacagaagtcgatagactcgggatcgggaaagttatggaggagactctctcctatctgcttggaagaaagaaaagaccaattcacctctcttttgacgtcgacgggctcgatcctagctttaccccagctaccggcacgccagtggttggcggactcacttaccgagaggggctgtatatcacagaggagatttataagaccggactgctgagcgggcttgacattatggaggttaatccttcgctcggtaaaacacccgaggaggttactagaaccgtgaataccgcagtggcgattaccctggcgtgtttcggactcgcacgtgaaggaaaccataaacctatcgattacctgaatccacccaaa

SEQ ID NO: 6670 - DNA, 966 bp, synthetic construct
  misc_feature 1..966: note = source = /note="Description of Artificial Sequence: Synthetic coding sequence"
  source 1..966: mol_type = other DNA
atgtcagccaagtctagaacaataggcatcataggggcaccattttctaaaggtcagcccaggggcggggtagaagagggccccactgtgcttagaaaggccggtttactcgaaaaattaaaagaacaggagtgtgatgtgaaggattacggagatctgccatttgctgatattcctaacgatagccctttccaaatcgtgaaaaacccccgtagcgtaggcaaggcttctgagcagctcgcaggcaaagtcgccgaagtgaagaaaaatgggaggatcagcctggtgctcggtggtgaccacagcctcgcaatcggaagcatctccggtcacgcaagagtccaccccgatttgggcgtcatttgggtcgacgcccatacggacatcaacaccccactcaccacgacttctggaaacctgcacggccagccagtgtcgtttctgctcaaggaactgaaaggcaagatccccgatgtgcccggattcagttgggttacaccatgcatcagcgccaaagatattgtgtatataggacttcgggacgttgatccgggagagcactacatcttgaagactcttggaatcaagtacttttccatgaccgaagtggatcgcttagggattggcaaagtgatggaagagactctgagctatttattggggagaaaaaagcgcccaatacacttgtcctttgacgtggacggcctagacccttcctttactcctgcaactggcacacccgtggtcggcggcctaacttatagggagggtttgtatatcaccgaagaaatctacaagaccggactcctttcaggcttagatataatggaagtgaacccatcactgggcaagactccagaggaggtgacacggaccgttaacacggccgtcgctatcacgttagcttgttttgggctggctcgtgaggggaaccataaacctatcgattatcttaacccgcctaaa

SEQ ID NO: 6671 - DNA, 966 bp, synthetic construct
  misc_feature 1..966: note = source = /note="Description of Artificial Sequence: Synthetic coding sequence"
  source 1..966: mol_type = other DNA
atgagcgccaagtcacgaacgatcggtatcatcggcgcgccgttctccaagggacaaccccggggcggagtcgaggagggacctacggtgctcaggaaggccggcctgctcgagaagttgaaagaacaggagtgcgacgtgaaagattacggagatctgcctttcgccgacatcccaaacgacagcccgttccagatcgtgaaaaatccgagaagcgtgggaaaagcatcggagcaactcgccggcaaggtggcagaagtgaaaaagaacggacggatctcactggtgctgggcggagatcactcccttgccatcggttctatctccggacatgcacgggtgcatccggacctcggagtgatatgggtggatgctcacactgacatcaatactccgctcaccaccactagcgggaaccttcacggacagccagtctccttcctgctcaaagaactcaaaggaaagatccctgacgtgcctgggttttcatgggttacgccatgtatctcagctaaggacatcgtgtacattggtctgcgggatgtcgatccgggcgagcactatattctcaaaactctgggaatcaagtacttcagtatgactgaggtcgacagactgggaatcggcaaagtgatggaagaaaccctgagctacctgctgggaaggaaaaaacggccgatccatctgtcgttcgacgtggatggccttgatccgtcgttcaccccggccacgggaaccccggtggtgggcggcctcacgtatcgcgaaggactttacatcactgaagagatctacaagactggcctgctctcgggtctggatatcatggaggtgaatccaagcctcggcaagacccctgaagaagtcactcggactgtcaacacggccgtcgcgattacgttggcttgcttcggcctcgcgagagagggtaaccacaagcctatcgattacctgaacccgccgaag

SEQ ID NO: 6672 - DNA, 966 bp, synthetic construct
  misc_feature 1..966: note = source = /note="Description of Artificial Sequence: Synthetic coding sequence"
  source 1..966: mol_type = other DNA
atgtctgctaagtccaggaccatcggaataatcggagcacctttctccaagggccaaccacggggaggagttgaagagggccctaccgtactcagaaaggcaggcctgttggagaagctcaaggaacaggaatgcgacgtcaaggattacggcgatcttccattcgcagatatacctaatgattctccctttcagatagtgaagaacccaagaagcgtggggaaagcgagcgagcaactggccggaaaggtcgctgaagtcaagaagaacggcagaattagcctggtcctcggaggagaccactccttggcaatcggaagcatatccgggcacgctagagtacatcctgatctcggagtaatctgggtggatgcacataccgacattaatacaccacttaccaccacttctggcaacctacacggccagcctgttagctttctgctcaaagaactgaagggaaagataccagatgttccgggcttttcatgggtgaccccttgtattagcgctaaggacatcgtttacatcggactacgggacgtcgatcctggagaacactacatccttaaaaccctgggcattaagtacttctccatgaccgaggtggatcgcctgggtataggcaaagtgatggaggagactctttcctacctgcttgggcggaagaagcgcccgatccaccttagcttcgacgtagacggcctggaccctagctttacccctgctaccggcacccccgtcgtgggtggattaacctacagagaagggctgtacataaccgaggagatctataaaaccggcctcctaagtggattagatatcatggaggtgaacccctcactgggcaagacccccgaggaagtgaccaggacagtcaatacagccgttgcaattactctggcttgcttcggtcttgcaagagagggtaatcacaagcctatcgattaccttaaccctccaaaa

SEQ ID NO: 6673 - DNA, 966 bp, synthetic construct
  misc_feature 1..966: note = source = /note="Description of Artificial Sequence: Synthetic coding sequence"
  source 1..966: mol_type = other DNA
atgagcgctaagtcgcggactattgggatcatcggtgcaccgttctcgaaagggcaaccacggggaggagtcgaagaagggcctacggtcctgcgcaaagccggcctgctggaaaagttgaaagaacaagagtgcgatgtgaaggactacggcgatctgccgttcgcggacatcccgaatgactcgcctttccagattgtgaagaacccgagatcagtcggaaaggcttccgaacagctcgccggaaaggtggctgaggtgaagaaaaacggccgaatttcgctggtccttggcggcgaccactccctggctatcggctcgatctcaggacacgcgcgggtgcacccagacttgggggtgatctgggtggacgcgcacaccgatatcaacactcccctgaccactacctcaggaaatctgcatggacagccagtgtcattcctgctgaaggaactgaagggaaagatcccagacgtgccaggattctcatgggtgacgccgtgcatctcggcgaaagacatcgtgtacatcgggctccgcgacgtcgacccaggcgagcactacatcctcaagacccttggcatcaaatacttctccatgactgaggtcgaccgcctcggtatcggaaaggtgatggaggaaacgctgagctacctgctgggtcggaagaagcgaccgatccatctttcatttgatgtggacgggctggatccctccttcactcctgcgaccggaactccagtggtgggcggactgacctaccgcgaaggtctgtacatcactgaagagatctacaaaacggggctgctgtcaggacttgacataatggaagtgaatccgtcactcggaaaaactccggaagaggtgactcgcactgtcaatactgccgtggctattactctggcttgtttcggactcgccagagaaggtaaccacaagccgatcgattacttgaaccccccaaag

SEQ ID NO: 6674 - DNA, 966 bp, synthetic construct
  misc_feature 1..966: note = source = /note="Description of Artificial Sequence: Synthetic coding sequence"
  source 1..966: mol_type = other DNA
atgagcgcaaagtcaaggaccataggaataatcggtgcacccttttcgaagggacaaccacgtggtggagtcgaagagggacctaccgtgctgagaaaagccggactgctggaaaagctgaaggaacaagaatgtgatgtcaaggattatggtgatcttcctttcgcagacattccaaacgattcgccatttcagatcgtcaagaatccgagatccgtcggcaaggcatccgagcaacttgccggtaaagtggctgaagtcaagaaaaacgggaggatctcccttgtgcttgggggcgaccattctctggcaattgggtcgatctccggccatgcacgtgttcatccggatctgggggtgatttgggttgacgctcacactgatatcaacactccacttactaccacttccggaaaccttcacggtcagccagtgtcatttcttctgaaggaactcaagggtaagatcccagacgtgcctggattctcctgggtgaccccgtgtatctcggcaaaagatattgtttacattgggcttcgtgatgtcgacccaggggaacactacattctcaagactcttggtattaagtacttttcaatgaccgaggtggatcggcttggcattggcaaggtgatggaggaaactctgtcctacctgttggggcgaaaaaagcgccctattcatctctcattcgatgtggatggacttgatcctagcttcaccccagcaactgggacgccagtggtcggtggattgacgtacagggaaggactgtacatcaccgaagagatttacaaaaccggtctgctgtcgggacttgacatcatggaagtgaacccatcgctgggtaagactccagaagaggtgactaggaccgtgaacaccgcggtggcaattacccttgcttgctttggcctcgcaagagagggaaatcacaaacccattgattacctgaacccccctaag

SEQ ID NO: 6675 - DNA, 966 bp, synthetic construct
  misc_feature 1..966: note = source = /note="Description of Artificial Sequence: Synthetic coding sequence"
  source 1..966: mol_type = other DNA
atgtccgcaaagtcgcgcaccataggaatcataggagcacccttttctaagggacaaccgcgaggaggggttgaggaaggtcctactgtccttcgaaaggccggactgcttgaaaagttgaaggaacaagagtgcgatgtgaaggactacggagatctgccttttgcagacattccaaacgactcccctttccaaattgtcaaaaaccccagatcagtgggaaaagcatcggaacaactcgccggtaaggtcgcggaggtcaagaaaaacggaagaatctcattggtcctggggggcgaccatagcctcgccattggatcgatctcaggccatgctagggtgcatccagacctgggagtgatctgggtggatgcacacaccgacatcaatactccccttaccacgaccagcggtaatctgcatgggcagccagtgagctttctgcttaaagaactcaagggcaagattcccgatgtccctgggttttcatgggttactccatgtatatccgccaaagatattgtctacataggccttcgagacgtggatcctggagagcactacatcctgaaaaccctcggtatcaaatacttttcgatgaccgaggtcgacagactcggaattggaaaggtgatggaagaaactctctcgtatcttcttggacgcaagaaaagaccaattcaccttagttttgacgtggatggactggatccatcgtttactccagcaactggaaccccggtggtgggcggactgacctaccgcgaaggcttgtacatcaccgaagagatatacaaaactggactcttgtcggggcttgatatcatggaagtcaatccttccctgggtaagacgccggaagaagtgactcgaaccgtcaacaccgccgtggcaattacccttgcatgtttcggactggctcgcgagggcaatcataaacctatagactacctgaatcctccgaaa

SEQ ID NO: 6676 - DNA, 966 bp, synthetic construct
  misc_feature 1..966: note = source = /note="Description of Artificial Sequence: Synthetic coding sequence"
  source 1..966: mol_type = other DNA
atgtctgccaagtcccgtactatcggcataatcggcgctcccttcagtaagggccagccaaggggcggcgtagaagaagggccgaccgtgctcaggaaagcaggtctccttgagaagttgaaagagcaggaatgcgacgtaaaagactatggagatttgccatttgccgacatccctaatgactcccctttccagatcgttaaaaatcctcgttccgtcggcaaggcttcagagcagctggctggcaaggtcgcagaggtgaagaagaacggtagaatctcccttgtgctaggtggagatcatagcctggcaattgggtccatctcaggacatgcaagggtacaccctgatcttggggtgatctgggtggacgcgcacaccgacattaacacccccctgacaaccacgagcggaaatctgcatggccagcctgtctcctttctactgaaggagctaaagggaaaaatccccgacgtgcccggcttttcctgggtgacaccttgcatctcagccaaagacattgtttacatcggactgagagacgtggaccctggcgagcactacattttgaaaacgttgggcatcaaatacttcagtatgaccgaggtggaccgtcttgggatcggtaaggttatggaggagactctgtcttatttgctcggacgtaaaaaacgcccaattcatctgagctttgacgtcgatggcctggaccccagtttcacaccggctactgggacgcctgtagtgggggggttgacttaccgggaagggctgtacattaccgaggagatatataagaccggcttgctgtctggcctggacatcatggaggtgaacccctctctggggaagacccccgaagaagtgacacggacggtgaatactgcagtcgctatcaccctcgcgtgttttggactagcgcgtgaggggaaccataagccaatcgactacctgaatccaccgaag

SEQ ID NO: 6677 - DNA, 966 bp, synthetic construct
  misc_feature 1..966: note = source = /note="Description of Artificial Sequence: Synthetic coding sequence"
  source 1..966: mol_type = other DNA
atgtccgccaagtcccgcactataggcattatcggtgccccattctccaaaggccaaccccgtggcggagtcgaggaaggccccacagtattgcgtaaggctggcctcctcgagaaactgaaggaacaggaatgcgatgtgaaggactatggagatctgccatttgccgatatcccaaatgacagtcctttccagatcgtgaagaatccacgctccgttggcaaggctagcgagcagctcgcaggaaaagtggctgaagtcaaaaagaacggccgcatctccctcgttctgggtggtgatcacagtctggccattggatccatctctggacacgccagagtgcaccctgacttgggcgttatatgggttgacgcacatactgacatcaacaccccactgacaacaaccagtggtaatttgcatggacaacctgtttccttcctgctgaaagaactcaaaggcaaaatacctgatgtccccggtttctcatgggttactccttgcatctccgctaaagatatcgtgtacattggtctccgcgacgtggaccctggtgaacactatatcctcaaaacattgggcattaagtacttttcaatgaccgaggtcgaccgccttggtataggtaaggttatggaggagaccttgagttatctgttgggcaggaagaagcgcccaatccacctctctttcgacgtggacggcctggatccctctttcactcctgccaccggcactccagtcgtgggtggcctgacttatagggaaggactgtacattaccgaggaaatctataagactggtcttctttccggcctggacatcatggaagttaacccttctctcggcaaaacaccagaagaggtcacccgcactgttaacactgcagtggctatcaccctcgcttgctttggcctcgcccgcgagggtaatcataagcctattgactacctgaacccaccaaag

SEQ ID NO: 6678 - DNA, 966 bp, synthetic construct
  misc_feature 1..966: note = source = /note="Description of Artificial Sequence: Synthetic coding sequence"
  source 1..966: mol_type = other DNA
atgagtgctaaatcccgcacaatcggcatcatcggggcaccctttagcaagggacagcccagaggcggcgtggaagagggccctacagtgctcaggaaagcaggcctgctggagaaacttaaggaacaggaatgtgacgtaaaggattacggcgatctgccattcgccgatattcccaacgacagcccctttcagattgtcaagaatcctaggagcgttggtaaggcctcagagcagctggcaggcaaggtggcggaggtgaagaaaaacggaagaatcagtctggtgctcggaggtgatcacagcctcgccatagggagcattagcggacatgccagggtgcaccctgacctcggtgttatctgggttgacgctcataccgatatcaatacccccctgactacaacttctggcaatctccatggccagcctgtgtcattcctcctgaaagaactcaaaggcaagatcccagatgtgccaggtttctcttgggtcacgccctgcataagtgcaaaagatatcgtttatatcggcctgagagacgttgacccaggtgagcactacatccttaagaccctgggcattaagtacttcagcatgacagaggtggaccgactgggcatcggcaaagtcatggaggagaccctgagttacctgcttggacgcaaaaagcgccccatccacttgagcttcgacgtcgatggcctggacccttccttcaccccggccaccggaacacccgtggtaggcggcctcacttatcgcgaaggtctctatatcacagaggaaatttacaaaaccgggctgctgtcaggcctggacatcatggaggtgaacccgtcactgggcaaaacccctgaagaggtaacaagaacagtgaacactgcagtcgcaattacactggcgtgctttggtcttgcccgggagggaaaccataaacctatagattacctgaatcccccaaag

SEQ ID NO: 6679 - DNA, 966 bp, synthetic construct
  misc_feature 1..966: note = source = /note="Description of Artificial Sequence: Synthetic coding sequence"
  source 1..966: mol_type = other DNA
atgagcgccaaaagccggaccataggcataatcggagcccctttttctaaaggacaacccagaggcggagtggaagaaggccccaccgttctgcggaaagccggactgctggaaaagctgaaggaacaggaatgtgacgtgaaggactacggagacttgcctttcgccgacatccctaacgatagcccatttcaaatcgtgaagaacccacgctctgtaggtaaggcaagcgaacagttggccggcaaagtggccgaagttaagaagaacggaaggatctcacttgtccttggcggcgaccacagtctggctatcgggtccatcagcgggcatgccagggtccaccctgacctgggcgttatctgggtggacgctcacacggatatcaacaccccccttaccaccacatctggaaaccttcacggccagcctgtcagctttctcctcaaggaactgaagggaaagatccccgacgtgccgggctttagttgggtgacgccttgcatctctgccaaagatatcgtttacatcggattgcgcgatgtcgatccaggagaacactatattctcaagacccttggaatcaaatacttctctatgaccgaggtggatcgcctgggcatcggcaaggtgatggaagaaacactcagttatttgctaggacgcaaaaaaagaccaatacacctctcctttgacgtagacggtctggatcctagctttaccccagctactgggaccccagtagttggcgggctgacctacagggaaggactctacatcacagaagaaatctataaaacaggactgctgtcggggcttgacatcatggaggtgaacccctctcttgggaagacacctgaagaagtgacccgaaccgttaatacagctgtggccattactcttgcttgtttcggactcgctagagaagggaaccacaaacctatagattaccttaatcctccgaag

SEQ ID NO: 6680 - DNA, 966 bp, synthetic construct
  misc_feature 1..966: note = source = /note="Description of Artificial Sequence: Synthetic coding sequence"
  source 1..966: mol_type = other DNA
atgtcagcgaagagccggactatcggcatcattggagctccattctcgaaaggacagccacgcggaggagtggaggaaggccccaccgttttgaggaaagcgggattgcttgagaagttgaaggagcaggagtgcgatgtgaaggattacggtgatttgccatttgccgacatccccaacgactcaccattccagatcgtcaagaacccccggtccgtgggaaaggcgagcgaacagttggcgggaaaggtggccgaagtgaagaaaaacggtcgcatcagccttgtcctcggcggagatcattcgctcgcgatcggcagcatcagcggacacgcgagagtgcaccccgacctgggcgtgatctgggtcgacgcacacacggatatcaatacgcctttgactaccacctccggaaacctgcatggacaacctgtctctttcctgctgaaagagcttaagggaaagatcccggacgtgccgggcttctcatgggtcacgccatgcatcagcgcgaaggacatcgtgtacataggactgcgggatgtggaccccggagaacactacattctgaaaaccctgggaatcaaatacttttcgatgactgaagtggaccgcctcggaattggcaaagtgatggaagaaactctgtcgtatctgcttggacggaaaaagaggccgatccacctgtcgttcgacgtggacggactggacccgagcttcactccagccaccggaaccccggtggtgggaggcctgacctacagagaaggactgtatatcaccgaggagatctacaagactggactgctgagcgggctggatatcatggaggtcaacccgagcctgggaaagactccggaggaagtcaccaggactgtgaataccgcggtcgcaatcactcttgcttgctttggcctggcccgcgaaggtaatcataaacctattgactacctcaacccgccgaag

SEQ ID NO: 6681 - DNA, 966 bp, synthetic construct
  misc_feature 1..966: note = source = /note="Description of Artificial Sequence: Synthetic coding sequence"
  source 1..966: mol_type = other DNA
atgagcgccaagtcccgaactatcgggatcattggagcgccgttctcaaaagggcaaccacgcggaggagtcgaggagggaccgaccgtcctcagaaaggcaggcctgctggagaagctgaaagagcaggagtgtgacgtgaaagattacggggatctgccattcgctgacattccgaatgattcgccgttccaaatcgtgaagaacccgcggtcggtggggaaagcaagtgagcagctggccggaaaagtggcggaagtgaaaaagaacggaaggatctcgctggtgctcggcggggaccactctctggcaatcggctctatcagcggccacgcccgcgtgcacccggacctcggggtgatatgggtcgatgcgcacaccgacatcaatacccctctgacgactacctcaggcaacctccacggtcaaccagtctccttccttctgaaggaactgaagggaaagatccccgacgtccctggattctcctgggtgaccccgtgcatctcagcgaaagacatcgtctacatcggcctccgggatgtcgatccgggggaacattacatcctcaagaccctgggaatcaagtacttctcaatgactgaggtggatagactgggaatcggaaaagtgatggaagagactctgagctacctgctgggccgcaagaagcggccaattcatctgtcctttgacgtggatggactcgacccctcgttcactccggcaaccggaaccccggttgttggcggactgacctaccgggaaggactgtacatcactgaggaaatctataagaccggactcttgtccgggctcgacattatggaggtcaatccatccctcggcaagacgccagaggaagtcacccgcacggtcaacactgccgtcgctattactctcgcttgtttcggcctcgcaagagagggaaatcacaagcctattgattacttgaacccgccaaag

SEQ ID NO: 6682 - DNA, 966 bp, synthetic construct
  misc_feature 1..966: note = source = /note="Description of Artificial Sequence: Synthetic coding sequence"
  source 1..966: mol_type = other DNA
atgagtgccaaatctcgtactattgggatcatcggggctccattctctaagggccaaccacgcggcggggttgaagaaggccccaccgttctcaggaaagctgggcttttggaaaagttgaaggagcaagagtgcgacgtaaaagactacggcgacctcccttttgccgacattcccaatgattccccattccagatcgtaaagaatcccagatccgtgggaaaggcatctgaacagctagcaggaaaagtggccgaggtcaagaagaatgggcgaatctccctcgtgcttggcggggatcactctttggccataggcagtatttctggacacgcccgcgtgcatccggatttgggagtgatttgggtcgacgcacacacggacattaacacaccactgactaccacaagcggaaacctccatggtcagcccgtgtcttttctgctgaaggagctcaaagggaaaatccccgatgttcccgggttttcctgggtgacgccttgtatatccgctaaagatatagtctatatcggactaagggacgtcgaccctggagaacattacatcctgaagaccctgggaatcaaatacttctctatgaccgaggtcgatagactcggtataggcaaagtcatggaggaaaccctttcgtacctactcggaaggaaaaaacgaccaattcaccttagcttcgatgtcgatggcttagacccttcattcactccggcaactggaacgccagtcgtggggggactgacctacagggaaggtctctatatcacagaggaaatatacaagaccggcctcctcagcggtttggatattatggaggttaatcccagcttggggaagacacccgaagaggtgacacggaccgtaaataccgccgtggccataactctggcttgtttcggtctcgcacgtgaggggaaccacaagcctatcgattatctcaatcccccaaag

SEQ ID NO: 6683 - DNA, 966 bp, synthetic construct
  misc_feature 1..966: note = source = /note="Description of Artificial Sequence: Synthetic coding sequence"
  source 1..966: mol_type = other DNA
atgagtgcgaaaagccgcactattggcataatcggagctcccttcagcaaggggcaacccagaggaggcgtagaagaggggcctaccgtgctcagaaaagcaggactgctcgagaagttaaaagaacaggaatgcgacgtaaaggactacggagatctccctttcgctgatattcccaacgatagcccattccagatcgtgaaaaacccacgcagcgtaggtaaggcctcagaacagctcgcaggtaaggtggcggaggttaagaagaacggtagaatcagcctagtcttgggtggagaccacagtctggctatcgggtctatttcaggtcatgccagagtccacccagacctgggggtcatatgggtggacgctcacacagatatcaacacccctctgaccaccacatctgggaacctacacggccagcccgtgtccttcctcttaaaggagcttaaaggaaagattccggacgttccaggattctcctgggttaccccctgcatctctgcaaaggatattgtgtatataggtctccgtgatgttgacccaggcgaacactatattctgaagactctgggcatcaagtatttttctatgaccgaggtggataggctggggatcggcaaagttatggaggagactctaagttatctgctggggagaaagaaacgtcctatacacctgtcattcgatgtagatgggctggatcccagctttactcctgcaaccggaacaccggtcgtaggaggcctcacatatagggagggactctacattacagaagaaatttataagacgggcctcctgagcggcttagacataatggaggtaaatccttcactgggcaagacccccgaagaggtcacacgaacagtgaacaccgccgtcgccattaccctggcgtgctttgggctggcccgtgaaggaaaccataagccaattgattacttgaatccccctaag

SEQ ID NO: 6684 - DNA, 966 bp, synthetic construct
  misc_feature 1..966: note = source = /note="Description of Artificial Sequence: Synthetic coding sequence"
  source 1..966: mol_type = other DNA
atgtcagctaagagcagaacaatcgggatcattggggcccccttttcaaaggggcagcctagaggcggtgtagaagagggccctaccgtcctgagaaaagctggcctcctcgagaaactgaaggaacaagagtgcgatgtcaaggattatggtgatctaccattcgcagatattcctaacgactcacctttccaaatcgttaaaaacccacggagtgttggcaaagcctccgaacagctcgccggaaaggttgctgaagtgaagaagaacggccgaatctctctggtgctcggcggcgatcactcccttgcaatcggtagtattagcgggcatgcaagagtgcaccctgatctgggcgtcatctgggtggatgcccatacagacattaatacgccactgacaaccacaagtggcaatcttcatggacagcccgtgagctttctgctgaaggagctgaaaggaaagatccccgacgttcccgggtttagctgggttactccctgtataagcgctaaggatatagtttatatcggtcttagggatgtagacccgggagagcactatatcctcaaaacgctagggattaagtacttttctatgaccgaggtcgaccgactgggcattggaaaagttatggaggagacgctttcatatctcctcggaaggaagaagagaccaatccatttatccttcgacgtcgacggcttagatccttctttcacccccgcgactggtacaccagtggtcggcgggcttacgtaccgggaggggctctacataacagaagaaatctacaagacagggttgctttctggccttgatattatggaggtgaacccctccctcggtaaaactccagaggaggttacgcgcacagtgaataccgcggttgcaataaccctggcctgttttggcctggcacgcgaaggcaatcataagcccatcgattacctgaatccccctaaa

SEQ ID NO: 6685 - DNA, 966 bp, synthetic construct
  misc_feature 1..966: note = source = /note="Description of Artificial Sequence: Synthetic coding sequence"
  source 1..966: mol_type = other DNA
atgagcgcaaagagtagaactatcggcattatcggagcgccattttctaagggtcagcctagaggaggagttgaggagggccccaccgtactgcggaaggccggccttcttgagaaactgaaggaacaagagtgcgacgttaaagactatggggatctgccctttgcggacatcccaaatgatagtccctttcaaatcgtcaagaatcctagatctgttggcaaggcctcagaacaactcgctgggaaggtggcagaggtaaaaaagaacgggagaataagccttgttctggggggggatcattctctggccataggaagtatttctgggcacgcccgggtacaccccgatctgggcgtgatatgggtggacgctcatacagacatcaacaccccactgactacaaccagcggtaacttgcacgggcagcctgtgtccttcctcctgaaggagctgaagggcaagattccagacgtcccgggcttcagttgggttacaccttgtatctctgctaaggacatcgtttatattggcctgcgagacgtggatccgggtgagcactatatccttaaaactttgggcattaagtactttagtatgactgaggtcgatcgacttgggatcggcaaagtcatggaagagacgctctcttaccttctgggccggaagaaacggccaatccatctctccttcgatgtcgacggtctggatcctagctttacccccgctacgggcacgccggtggtcggggggctcacgtacagagaaggcctttacatcaccgaagaaatctataagactggactcttgagcggtctggacatcatggaggtgaatcctagcctcggaaagactcctgaggaagtgacaagaacagtgaacacagccgtagcaatcaccctggcgtgcttcggcctggctagagaggggaatcataaaccgatcgactacttgaatcccccgaaa

SEQ ID NO: 6686 - DNA, 966 bp, synthetic construct
  misc_feature 1..966: note = source = /note="Description of Artificial Sequence: Synthetic coding sequence"
  source 1..966: mol_type = other DNA
atgagcgccaagtctagaactattggaataattggagcccctttttctaagggccagccccgcggaggcgtcgaagaaggcccaactgtcttgaggaaggccgggctgctcgagaagctcaaagagcaagagtgtgacgtgaaagactatggagatttgcccttcgccgacatacccaatgattcacccttccaaatagtcaagaaccccaggagcgtcggcaaagcatctgaacagctcgcaggcaaggtagccgaggtgaaaaaaaatggcagaatttctctggtgctgggcggtgatcactcactggctattgggtcgatcagcgggcatgccagagtgcatcctgatctgggagtgatctgggtggatgcgcacacagacataaacactcccctgaccactacatcaggcaacctccacggccaacccgtgagttttttactaaaggagctgaaggggaagattccagacgtccccggattctcttgggttaccccctgcatctctgcaaaggacatagtgtatatagggttgcgcgatgtcgaccctggtgagcactacattctaaagactctgggcatcaaatacttttccatgacagaggtggataggttgggcattgggaaggtaatggaggaaacccttagctatctgctgggccgcaaaaaaagaccaatccacctctcgtttgacgtggatgggcttgacccctccttcacgccagctactggaacaccagtggttggcggactgacataccgggagggcctctacataaccgaagagatctacaagacaggactgctgagcggcctcgatattatggaggtgaacccctccttgggtaaaactccagaggaagtcactaggacagtgaatacagccgtggcgatcacgctagcatgcttcggcctggcacgggagggcaatcataaaccaatcgattacctcaatccccccaaa

SEQ ID NO: 6687 - DNA, 966 bp, synthetic construct
  misc_feature 1..966: note = source = /note="Description of Artificial Sequence: Synthetic coding sequence"
  source 1..966: mol_type = other DNA
atgtcagcgaagtcacggactatcggaatcatcggagcacctttctccaaaggccagccgaggggaggggtggaagaaggacccaccgtgctcagaaaggcgggactccttgagaagctcaaggagcaggaatgtgacgtgaaagactacggagatttgccgtttgcggacatccccaacgactccccgttccaaatcgttaagaatccacgcagcgtggggaaagcctcggaacagctcgcagggaaggtcgccgaggtgaagaagaacggacgcatctccctggtcctcggtggcgaccactcgttggccattggctcgatctctggacacgcccgcgtgcaccctgatctgggggttatctgggtggatgcccacaccgacatcaatactccgctcactaccacgagcgggaacctgcatggacaaccggtgtcatttctgctcaaagaactcaagggtaagatcccggacgtaccaggattttcgtgggtcaccccttgcatttccgcgaaggacatcgtgtacattggactgcgagacgtggatccaggagagcattacatccttaagaccctgggcatcaaatacttctcgatgactgaagtggacagattgggaataggcaaggtgatggaggagactctctcctacctgctgggacggaaaaagcggccgatccacctgagcttcgatgtcgatggacttgatccttcgttcaccccggctactggaacgccagtggtgggtggcctgacctaccgggagggtctgtatatcaccgaagagatctacaagactggactgctgagcggcctggacattatggaagtcaacccgtcactgggcaagaccccagaagaggtgactagaaccgtcaacactgctgtcgcaatcaccctggcttgcttcggtttggcccgcgaaggcaaccataaaccaatcgattacctgaatccgcccaag

SEQ ID NO: 6688 - DNA, 966 bp, synthetic construct
  misc_feature 1..966: note = source = /note="Description of Artificial Sequence: Synthetic coding sequence"
  source 1..966: mol_type = other DNA
atgtcagcaaagtcacgcaccattggaataatcggagctcctttctcaaagggacagccccgaggtggcgtcgaagagggccctactgtgctgagaaaggcaggattgctggagaagctgaaagagcaagaatgtgatgtgaaagactacggggatcttccatttgcggacattcctaacgattccccttttcagattgtgaagaacccacgttcggtgggcaaggcttccgaacaactcgcaggtaaagtggcagaggtgaagaagaatggtcgtataagcctggtgcttggcggggatcattccctggcaataggatctatctcgggacacgcacgtgtgcatcccgatctgggagtgatctgggtggatgcacacaccgatatcaatacccctctcaccaccacgtcaggaaacctccatggacaaccagtgtcctttctgctgaaggaactgaagggaaaaatcccggacgtccctggattctcctgggtgacgccatgtatctccgccaaggatattgtgtatattggactgagagatgttgatcctggcgaacactacattctcaagacccttggcatcaagtacttttccatgaccgaggttgatcgtcttggcattggaaaggtgatggaggagactctgagctacctgctggggcgaaaaaagcggcctattcatctttcgttcgacgtggatgggcttgacccctcattcaccccagcaacgggaaccccagtcgttggtggtctgacctacagggaaggcctgtacattactgaagagatttacaagaccggcttgctctccggattggatatcatggaagtcaatccctcccttggaaagacccctgaagaggtgaccagaactgtgaacactgctgtcgcgataactctggcatgcttcggcctcgcccgcgagggaaaccacaagccaattgattatctcaatccaccaaag

SEQ ID NO: 6689 - DNA, 966 bp, synthetic construct
  misc_feature 1..966: note = source = /note="Description of Artificial Sequence: Synthetic coding sequence"
  source 1..966: mol_type = other DNA
atgtccgctaaaagccgaactatcggtattatcggtgcacctttctcgaaggggcaacctcgcggcggcgtcgaagagggacctactgtgctccggaaggccggtttgcttgagaagctgaaggagcaggaatgtgatgtgaaggattacggagatctgccatttgcggatatacccaacgactcgccgtttcaaatcgtgaaaaacccaagatcagtgggcaaggctagcgagcagctggcagggaaagtggcagaggtcaagaagaacggccgcatctctctcgtgctcggaggagatcattctctcgccatcgggagcatttccggacatgcaagggtgcacccagacctgggcgtgatctgggtggatgcacacactgacattaacactccacttaccaccacctccggtaatctgcatggacaacctgtctcattcctcctgaaagaacttaagggcaagattcccgatgtgcctggattctcgtgggtcaccccatgtatcagcgccaaggatattgtgtacattggactccgagacgtggatcccggagaacattacatacttaaaactcttgggatcaagtactttagcatgaccgaggtggatcggctgggtatcggtaaggtgatggaggaaacgctgagctacctgttgggccgaaagaagcgacctattcacctttccttcgatgtggacgggcttgatcctagcttcacccctgcaactggaacccctgtggtcggcggacttacctacagggaggggctctacattaccgaagaaatctacaaaaccggtcttttgtcaggcctcgatatcatggaggttaacccttcattgggcaagactcccgaggaagtgactcgtaccgtgaacacggccgtggctattactctggcatgctttggccttgcccgcgagggcaatcataagcctattgattacctcaatccacccaag

SEQ ID NO: 6690 - DNA, 966 bp, synthetic construct
  misc_feature 1..966: note = source = /note="Description of Artificial Sequence: Synthetic coding sequence"
  source 1..966: mol_type = other DNA
atgtccgccaagagcaggacgataggcattataggtgccccattttcgaaaggccagccacgcggcggagtggaggaaggacctaccgtgctgcgaaaagcagggctgctggagaaactcaaagaacaagaatgtgatgtgaaggattatggggatctgccgttcgcagacattccaaacgactccccctttcaaatcgtcaagaatccgcggtcggtcgggaaagcatccgaacagctcgctggaaaggtggcagaggtgaagaaaaacggcagaatttcgctcgtgcttggaggtgaccacagccttgcaatcggctcgatttcagggcacgcgagagtccatcctgatctgggtgtgatttgggttgacgcacacacggacattaacaccccgctgacgacgacctctggtaatctgcatggacaacccgtgagctttctcctgaaagagctgaagggtaagatcccagatgtgcccggtttttcatgggtcactccctgcatatccgcgaaagatatcgtctacattggacttagggacgtggatccaggagaacactacattctgaaaacgctgggaatcaagtacttttcgatgaccgaagtggatagacttggaatcggtaaggtgatggaagagactcttagctacctgcttggtaggaagaaacgtcctatacacctgagcttcgacgtggatggtcttgacccatcttttacccctgcaactggcacccccgtcgtgggtggtcttacttaccgcgagggcctgtacattaccgaggagatttacaaaaccgggctgctgtccggtcttgacattatggaagtgaacccttcccttggtaaaacccctgaagaagtgactcggactgtcaacactgcggtggccattactcttgcatgttttggcctcgccagagaaggaaaccataaacccattgactaccttaaccctcctaag

SEQ ID NO: 6691 - DNA, 966 bp, synthetic construct
  misc_feature 1..966: note = source = /note="Description of Artificial Sequence: Synthetic coding sequence"
  source 1..966: mol_type = other DNA
atgtctgccaaaagtaggacaatagggattatcggggccccctttagtaaaggccagcctcgcgggggggtcgaagagggccccacagtgcttcgaaaggcaggtctgttggagaagctaaaggaacaggagtgtgacgttaaggattacggggatctgcccttcgccgacatccctaacgactcgccctttcagatcgtgaagaacccccgatccgtgggtaaggcatccgagcagttggccgggaaggtagccgaagttaagaagaacgggcgaatctccctggttctggggggggatcactccctagctatcgggtcaatttccggtcatgctcgggtccaccctgatcttggtgtgatttgggtggacgcccatacagatattaataccccgctcaccacgacatccggaaatttgcacggtcaacctgtgagcttcttgctgaaggagctgaagggcaaaatccccgacgtaccagggttttcctgggtgaccccttgtatttctgccaaggacatcgtgtacatcgggctgcgggacgtggacccgggcgaacactacattctgaagacactaggcatcaagtatttctccatgaccgaggtggatcgtttaggcatcggcaaggtaatggaggagaccctctcctatctactggggagaaaaaagaggcccatacacctgtcattcgacgttgatggcctggatccctccttcactcccgccacagggactccagtggttggtggcctgacatacagagaaggtctgtacataacagaggagatttataaaactggtttattgtccgggctggatatcatggaagtgaatccttccctggggaaaacccctgaagaggtgaccagaacagttaacaccgccgtcgcgattacactagcgtgcttcgggctcgcccgggagggtaaccacaagccaattgactatttgaacccccccaaa

SEQ ID NO: 6692 - DNA, 966 bp, synthetic construct
  misc_feature 1..966: note = source = /note="Description of Artificial Sequence: Synthetic coding sequence"
  source 1..966: mol_type = other DNA
atgtcggccaaaagcagaactatcggtattatcggggcgccattcagcaaaggccaaccacggggaggcgtggaagaagggcctacggtgctgcggaaggcaggattgctggagaagttgaaggagcaggaatgtgacgtcaaggattatggagatctgccgttcgcagacataccgaacgattcaccttttcagatagtgaaaaacccaaggtccgtgggaaaagcgtcggagcagcttgcgggaaaagtggcggaagtcaagaagaacggacggatttccctcgtgctcggtggggatcattccctggcaattggtagtatctcaggacatgcgcgcgtgcatcccgacctgggcgtaatttgggtggatgcacataccgacatcaacactcctctgaccactacctcaggaaatctgcacggacaaccagtctcctttcttctcaaagagctcaagggaaagatacctgatgtgcctgggttcagctgggtgacgccttgtatctccgcaaaagatattgtgtacattggtctgagagacgtggatcccggggaacattacattcttaagactctgggcattaagtactttagcatgactgaagtggatagattgggaattggcaaggttatggaagagactctttcgtaccttctcggaagaaagaagaggccaatacatctttcgtttgatgtggatgggttggatccctcttttacccctgcgactggcactcctgtcgtgggaggacttacctaccgggaaggactttacataactgaagaaatctacaagaccggtctgctttcaggcctcgatatcatggaggtcaatccttcgctcggaaaaactcctgaagaagtgacccgtactgtcaacactgcagtggctattactctcgcgtgctttggactggccagagaaggcaaccacaagcccatcgattaccttaaccctccaaaa

SEQ ID NO: 6693 - DNA, 966 bp, synthetic construct
  misc_feature 1..966: note = source = /note="Description of Artificial Sequence: Synthetic coding sequence"
  source 1..966: mol_type = other DNA
atgtcggcaaaatcgaggactatcggcatcattggagccccattttccaaaggccaaccccgtggaggagtggaagagggaccaacagttctgcgaaaggccggtctcttggaaaaacttaaagaacaagagtgcgatgtgaaagattacggagaccttccgtttgcagatatacctaacgactctcctttccaaattgtcaagaatccgagaagtgttggaaaggcgtcggagcagcttgctggaaaggttgctgaagtaaaaaagaatggccgaatatcccttgttttaggaggagatcattctcttgcgataggatccatttccggacacgcgcgcgttcatccagatctcggtgttatttgggtagatgcgcatacagatattaatactccactgacgactacctctggaaatctacacggccaaccagtttccttcctgcttaaggagttgaaaggaaagattcctgacgttcccggtttcagttgggtgacaccatgcatctccgcaaaggacatcgtttatattggtctccgagacgtcgatccgggtgaacattacatcctgaaaacactgggtatcaaatacttttctatgactgaggtcgatcggttgggcatcgggaaggtgatggaagaaactttgagttatcttttggggcgtaagaaaagaccaatccatctttcgtttgatgtcgatggactagatccatcgtttacaccagctacggggactcctgtagttggtggacttacttatcgagaggggctttatatcacggaagaaatatacaaaacaggtctcctttccggactcgacattatggaagttaacccctcactggggaaaacaccagaagaagttactcgaactgtaaacacagctgtcgcgattacactcgcttgttttggtttagctcgagaaggtaaccataagcctattgattatctcaatccgccgaaa

SEQ ID NO: 6694 - DNA, 966 bp, synthetic construct
  misc_feature 1..966: note = source = /note="Description of Artificial Sequence: Synthetic coding sequence"
  source 1..966: mol_type = other DNA
atgtccgctaagtcgcgcaccatcggaatcatcggagccccattcagcaagggacaacctcggggcggggtggaggagggaccgactgtgcttcggaaggctggactcctggaaaaactcaaagaacaggagtgcgacgtgaaagactacggcgacctcccctttgcggatattccgaacgactcccctttccagatcgtcaagaacccaagatcggtcggcaaggcgtccgagcaactggccggaaaggtggctgaggtcaagaaaaacggcaggatctcgctggtgcttggaggagatcactccttggcaatcggaagcatttcaggacatgcgcgcgtgcatccagacctgggagtgatctgggtcgatgcacacaccgacatcaatactccacttaccacgacctccggaaacttgcacggacagccggtcagcttcctcctcaaagagctcaaaggcaaaatccctgacgtcccgggcttcagctgggtcactccctgcatctcggcgaaggatatcgtgtacatcgggctccgggatgtggatccgggggagcactacattcttaagactcttgggatcaagtacttctccatgactgaggttgaccgcctcggtatcgggaaagtgatggaagagactctgagctacctcctgggacggaagaaacgtccgatccatctgagcttcgacgtggatgggctcgacccgtcgttcactccagcaaccggaaccccggtggtgggaggattgacctacagagaaggtctgtacatcaccgaagagatctacaaaacgggcctgttgagcggactcgacattatggaagtcaatcccagcctgggcaagaccccagaagaagtgactcgcactgtgaacaccgccgtggccattactctggcctgcttcgggctcgctagagaaggcaaccacaaaccgatcgattatctgaatccaccgaaa

SEQ ID NO: 6695 - DNA, 966 bp, synthetic construct
  misc_feature 1..966: note = source = /note="Description of Artificial Sequence: Synthetic coding sequence"
  source 1..966: mol_type = other DNA
atgtctgcaaaatcacggaccatagggattattggcgcaccgttttctaaaggtcaaccgcgggggggagtcgaggagggtccgaccgtgctgcggaaagctggcctgttagaaaagttaaaagaacaagaatgtgacgtgaaggactatggagacttgccctttgcagatattccgaacgatagcccgttccaaattgtaaagaatcctcgaagtgtgggaaaagcttcagagcagttagcaggcaaagtagcggaagtaaagaaaaatggccgcatttccctggttctgggaggcgatcattccttagccatcggctcaatatcaggccacgcgcgagtacatcccgaccttggagtcatatgggtcgatgcacatacggatattaacacaccgttgacaacaacgtcaggaaacttgcacggccagccggtaagttttctgctcaaggagctgaaaggcaagattcctgatgtcccgggcttctcatgggtcactccgtgcatttcggcgaaggacattgtttacatcggtcttcgagacgtggaccctggggaacactacatcctgaaaactttgggcatcaagtatttctctatgacagaggttgacagactcggcattggtaaagtaatggaagagacgctgtcttatctgttgggcaggaaaaagcgtccgatccatctgtcttttgacgttgacggccttgatcccagcttcacccctgcgacaggtacaccggtggtagggggactgacataccgtgaaggtctgtatatcacggaagaaatttataagactgggttgctctctggccttgacattatggaagttaatccttcactgggaaaaacgccagaggaggtgactcggacggttaatacagcagttgcgattacgctcgcatgcttcggcctggcacgggaggggaaccacaaaccgattgattatttaaatccgcctaaa

SEQ ID NO: 6696 - DNA, 966 bp, synthetic construct
  misc_feature 1..966: note = source = /note="Description of Artificial Sequence: Synthetic coding sequence"
  source 1..966: mol_type = other DNA
atgtccgctaagtcccgcaccatcggaatcatcggtgcgccgttctcgaagggacagcctcggggaggtgtcgaagaagggcccaccgtgctcaggaaggctgggctgctcgagaagctcaaggagcaagaatgtgatgtcaaagactacggggatctgcccttcgctgacattccaaatgactcgccgtttcagatcgtgaaaaacccgcgctccgtcggaaaggcgagcgagcagctggccggaaaggtcgctgaggtgaagaagaatggtcgcatctctttggtgttgggaggcgaccacagcctggccattggctccatcagcgggcacgcccgagtgcaccccgacctcggagttatttgggtggatgcccacactgacatcaacactccgctgactactacgtcgggaaacttgcatggacagccagtgtcattcctgcttaaagagctgaaaggaaagatcccagatgtcccgggattctcctgggtgaccccgtgcattagcgcaaaggacatcgtctacataggtctgcgggacgtcgatccaggcgaacactacatcttgaaaacgctgggtattaagtacttctcaatgacggaagtcgaccgcctcggtatcggaaaggtgatggaggagactctctcctacctccttgggaggaaaaaacggccgatccatctgtcatttgacgtggacggtctggacccatccttcactccagccaccgggacccctgtggtgggcggactgacctaccgtgagggactctacatcactgaagagatctacaagactggactgctttcgggactcgacatcatggaagtgaatccgtctctgggaaagacccccgaagaagtgaccagaactgtgaacaccgccgtggccatcacgctcgcttgcttcgggcttgcgcgagagggcaaccacaaaccaatcgattatctcaacccgccaaag

SEQ ID NO: 6697 - DNA, 966 bp, synthetic construct
  misc_feature 1..966: note = source = /note="Description of Artificial Sequence: Synthetic coding sequence"
  source 1..966: mol_type = other DNA
atgagtgcaaagtcacggaccattggcatcattggagccccctttagcaaaggccagcctagaggcggagtggaagaaggacctaccgtgctgaggaaggcaggactgcttgaaaagctgaaggagcaggagtgtgacgtcaaagactacggagatcttccttttgccgacattcccaacgattcgccattccaaattgtgaaaaacccccgctccgtggggaaggcgtcagaacaactggccggaaaggtggcagaagtgaagaagaacggacgcatatcgttggtcctcggtggggatcactcccttgccatcggcagcatctctggacacgcccgggtgcacccagaccttggggtcatttgggtcgacgcacacactgacataaacactccactcactaccacctccggaaacctgcatggacaaccggtgtcatttctccttaaagaacttaagggcaagattcccgatgtgccaggtttttcctgggtgaccccatgtatttctgccaaggatattgtgtatatcgggctgcgggatgtcgatcctggcgaacattacatactcaagactctcggtatcaagtacttttccatgaccgaagtcgatagacttggaattggaaaggtgatggaggagactctctcgtatcttctgggcaggaagaagcgtccaatccaccttagcttcgatgtcgacggccttgacccatcattcaccccagcgaccggaactcctgtcgttgggggtctgacctacagagaaggtctgtacatcacggaagagatatacaagaccggacttctgtcaggactggacataatggaggtgaacccatcgcttggtaagactcccgaggaagtgacccgtaccgtgaacactgcagttgcaatcacccttgcgtgctttggtcttgcccgtgagggaaaccataagcccatcgattacctgaatccaccaaag

SEQ ID NO: 6698 - DNA, 966 bp, synthetic construct
  misc_feature 1..966: note = source = /note="Description of Artificial Sequence: Synthetic coding sequence"
  source 1..966: mol_type = other DNA
atgtccgcaaagtccaggactattggcattatcggggcgccattttccaagggacaacccagagggggagtggaggaaggaccgaccgtcctcagaaaggccggactgctcgaaaaacttaaggagcaagaatgtgatgtgaaggattacggagatcttccgtttgcggatatacccaacgactcgccctttcaaatagtcaaaaaccctcggtccgtggggaaggccagcgaacaactggcaggcaaggtcgcagaggtgaagaaaaacggccggattagcctggtccttggtggagatcattcgctggccataggcagcatatcaggacacgcaagagttcatcctgacctcggagtgatatgggtcgacgcccataccgatatcaacacccccctgaccaccacgagcggaaatctgcacggccagcccgtgtcctttctcctgaaggaactgaagggtaagatccccgatgtgccaggattttcatgggtgaccccttgtatttcggcaaaggacatagtttacattggtctgcgtgatgtggatcctggggaacattacatcctgaaaaccctcgggattaagtacttttcgatgacggaggtggatagacttggcatcggaaaggtgatggaagaaaccctctcctacctccttggcaggaaaaagcgccctattcatctgtcgttcgacgtggatgggctggatccttcatttactccagcgactggcactccagtggtgggaggacttacgtacagagaagggctttacattacggaagagatctacaagactgggctgctctccggtctggacattatggaagtgaacccttcgctgggcaagacccctgaggaagtcactcggaccgtgaacactgcagtggccatcactctcgcctgtttcgggcttgcgagggaggggaaccacaagccaattgactacctcaatccacctaag

SEQ ID NO: 6699 - DNA, 966 bp, synthetic construct
  misc_feature 1..966: note = source = /note="Description of Artificial Sequence: Synthetic coding sequence"
  source 1..966: mol_type = other DNA
atgagcgcaaagtcccgtaccatcggaatcattggtgcaccattctccaagggtcagcctcggggcggtgtggaagaggggcctaccgtcttgaggaaagcaggccttcttgaaaaactcaaagaacaagagtgtgacgttaaagattacggcgatctgccattcgcagacattccaaacgattcaccttttcaaattgtcaaaaatcccaggtccgtgggaaaggcttcagaacaacttgcgggaaaggtggccgaagtcaaaaagaacggacggatatcactggtgctgggaggtgaccatagccttgccatcggttccataagcggtcacgctagggtgcatccggatcttggtgtcatctgggtggatgcccacactgatatcaacacgccacttactacgacttcgggtaaccttcatggacaacccgtgagctttctcctgaaggaacttaagggcaaaattccagatgtgcccggattttcctgggtgacgccgtgcattagtgctaaggacatcgtgtacattggcctgcgcgacgtagacccaggagagcattacattctcaagactctgggaattaagtacttctcgatgactgaagtggatcgcctgggtataggtaaggtcatggaagaaaccctgtcgtatctccttggtcgaaagaagcgacccatccatctctcgtttgatgtggacggacttgatccttcttttactcccgcaaccggaacccctgtcgtgggtggtttgacttacagagagggtctttacattacggaagagatttacaagactggacttctcagcggcctcgacattatggaagtgaacccttctctcggcaagaccccagaagaagttaccagaaccgtgaacactgcggtagccattactctggcgtgttttggccttgcacgagagggaaatcacaagcctattgactaccttaaccccccaaaa

SEQ ID NO: 6700 - DNA, 966 bp, synthetic construct
  misc_feature 1..966: note = source = /note="Description of Artificial Sequence: Synthetic coding sequence"
  source 1..966: mol_type = other DNA
atgtccgccaaaagtcgcaccatagggatcatcggggccccattcagcaaggggcagccacggggtggcgtagaggagggccccaccgtgcttcgaaaggccggcctactggaaaagctgaaggaacaagagtgtgacgtcaaagactacggcgacctcccttttgccgatataccgaacgatagtccttttcagatcgtgaaaaaccctaggagcgtgggtaaagctagcgaacagttggcgggaaaggtggcagaagtcaaaaaaaacggcaggataagtctcgtgttgggaggggaccattccctcgcaatcggaagcatttccggccacgcccgggtccaccccgatctgggagtcatttgggtggacgctcacaccgatattaacacccctctgacaaccaccagcggaaatttacacgggcagcccgtctccttcctgctgaaagagctgaagggcaaaatccccgacgtacccggcttctcttgggtcactccatgcatctcagccaaggatattgtgtatataggcttacgggacgttgatccaggcgagcactatattctgaagacccttggaataaagtatttctccatgacagaggtcgatcggctgggcattggtaaggttatggaggagacattgtcctatctgctgggccgcaagaaacggcccatccatctttccttcgatgtcgacggcctcgaccctagttttacgcctgccaccggcacaccagtggtgggaggtctgacttatagagagggcctgtatattactgaagagatctacaaaaccggactgctgtctggcctggatataatggaggtgaaccccagtttaggaaagacaccagaagaggtcaccagaaccgtcaacactgctgtggcaataaccctggcttgcttcgggttagctagagaagggaaccacaagcctatcgactacttgaatcctcccaag

SEQ ID NO: 6701 - DNA, 966 bp, synthetic construct
  misc_feature 1..966: note = source = /note="Description of Artificial Sequence: Synthetic coding sequence"
  source 1..966: mol_type = other DNA
atgtcagcaaagtccaggactatcgggatcattggcgcaccgttttcgaagggacaacctcgcggaggcgtcgaagagggaccgacggtcctgaggaaggccggactgctggaaaaactcaaggagcaggaatgtgatgtgaaagactacggggacctcccattcgctgacattccgaacgactccccgttccaaatcgtgaagaacccacgctccgtgggaaaggcgtcggagcagttggcgggaaaggtggcggaggtgaagaagaacggtcgcatctcactggtgttgggcggggaccattcgcttgccatcggttcaatctcgggtcacgcgagagtgcaccccgacctgggagtcatatgggtcgatgcccacaccgatatcaataccccactcacgactacttcgggcaatttgcacggacaaccagtctcattccttctgaaggaactgaagggaaagatccctgacgtgccaggcttctcgtgggtcactccgtgcatctctgccaaggacattgtgtacatcgggctgagagacgtcgatccaggcgaacactacatcctgaaaaccctgggtatcaagtacttctcgatgactgaggtggatcgactcggaatcggcaaggtcatggaagagacgctgagctatctcctggggcgcaaaaagcgccctatccacctttcttttgacgtggatggacttgatccgtcgttcacgccggccaccggtactcccgtggtgggaggactgacctatcgtgaagggctctacatcactgaagagatttacaagaccggactgttgtcaggactggacatcatggaagtaaacccgtcgctcggcaagaccccggaagaagtcaccaggaccgtgaacaccgcggtcgccatcaccctggcctgcttcggactggcgagagagggaaatcacaagccgatcgattaccttaatccgccaaag

SEQ ID NO: 6702 - DNA, 966 bp, synthetic construct
  misc_feature 1..966: note = source = /note="Description of Artificial Sequence: Synthetic coding sequence"
  source 1..966: mol_type = other DNA
atgtcagcgaagtctaggaccatcggaatcataggtgctccgttctctaagggccagccgaggggaggcgtcgaggagggcccaaccgtgctgagaaaggcgggactgctggaaaagctgaaagagcaagaatgcgatgtcaaagattatggtgatctcccgttcgcagatatccctaacgacagcccgttccaaatcgtgaagaaccctcgctccgttggaaaggccagcgagcagctggccggaaaggtggccgaggtcaagaagaatggacggatatccctggtgctgggaggggaccactcgctcgccatcggatcgatctccggacacgcacgtgtgcacccggacttgggtgtcatctgggtggacgctcacaccgacattaacactcctctgaccactacttccggtaatctgcatgggcagcccgtcagcttcctgctcaaggaactcaagggaaaaatcccagacgtgccgggcttctcctgggtcactccttgtatctcggcgaaagacatcgtttacatcgggctgcgcgatgtggatccaggagaacattacattcttaagacgttgggtatcaagtacttttcgatgacggaagttgatcgccttgggatcggcaaggtgatggaagagactttgtcgtacctgctgggaagaaagaaaagaccgattcacctctcatttgacgtggacgggcttgacccctcatttaccccagcgactggaaccccagtggtgggcggcttgacttaccgggaaggactgtacattaccgaggagatatacaagaccggactgcttagcggactcgacatcatggaggtgaacccgtctcttggaaaaacccctgaggaagtcactcgtactgtgaataccgctgtggcgatcactctcgcctgcttcggactggcccgagaagggaaccataaaccgatcgactaccttaacccgccaaag

SEQ ID NO: 6703 - DNA, 966 bp, synthetic construct
  misc_feature 1..966: note = source = /note="Description of Artificial Sequence: Synthetic coding sequence"
  source 1..966: mol_type = other DNA
atgtccgcaaaatcgagaaccataggcatcataggcgcaccttttagcaagggtcaaccacgtggaggtgtggaagaaggaccaacggtgctccgcaaggctggactgctggaaaagctgaaagaacaggaatgtgatgtgaaggattacggagatctgccgtttgcagacattccaaacgatagcccatttcagatcgtgaaaaatcctagaagcgtcggcaaagcctccgaacaactggcaggaaaagtggcagaagtcaagaaaaatggacgaatctctctggtcctcggcggtgatcacagtttggcgatagggtcaatttcgggtcatgcacgcgtccacccggatcttggtgtgatatgggtggatgcacatactgacattaacactccattgaccactacttcgggtaacctccacgggcagccagtgtcgtttctgcttaaggaacttaagggaaagatacccgatgtgcctggattttcgtgggtgactccctgtattagcgctaaggatatcgtgtacatcggcctccgagacgtcgatcctggcgagcattacattctgaaaaccctcgggatcaaatacttctccatgactgaagtagacagactgggaattggtaaggtgatggaagaaaccctgtcgtacttgctggggcgtaagaagcgccctattcatctttcattcgatgtggatggtcttgatcccagctttacccctgccactggaactccagtggtcggcggacttacttatcgagaaggattgtacattaccgaagaaatctacaagactgggctcctgtctggattggatatcatggaagtgaacccttcgctgggtaagactccagaagaggtgacccgcaccgtcaacaccgcagttgcgattacgctggcctgtttcggcctcgctcgggaaggcaaccacaagcctattgattaccttaacccacctaag

SEQ ID NO: 6704 - DNA, 966 bp, synthetic construct
  misc_feature 1..966: note = source = /note="Description of Artificial Sequence: Synthetic coding sequence"
  source 1..966: mol_type = other DNA
atgtcagctaaatcaagaactattggtattataggagctccatttagtaaaggacaaccaaggggtggagtggaggaaggaccaactgttttacgaaaggctggattattagaaaaattaaaagagcaagaatgtgatgttaaggattatggagatctaccattcgcagatattccaaatgattcaccatttcaaattgttaaaaatccaagatcagttggaaaagcatctgaacaattagcaggaaaggttgcagaagttaaaaagaacggaaggatttctcttgttttaggaggagatcatagtcttgcaattggtagtatttcaggacatgctagagttcatccagatttaggagttatttgggtagatgcacatacagatatcaacacacctttaaccactacatcaggaaatttgcatggacaacctgtatcatttttacttaaggaactaaaaggtaaaataccagatgttcctggattttcatgggttacgccttgtatcagtgcaaaagatattgtgtatattggtttaagagatgttgacccaggtgaacactacattcttaaaacattagggattaagtattttagtatgactgaggttgatagattaggtattgggaaggttatggaagaaactctttcctacttattaggacgtaaaaaaagaccaattcatttatcattcgatgttgacggacttgatccatcatttacaccagcaacaggaactccagtagttggaggacttacttatagagaaggattatacattactgaagaaatttataaaactggtttattatctggtttagatattatggaagtaaatcctagtcttggaaagacacctgaagaagttacaagaacagttaacacagctgttgcaattacattggcttgctttggacttgcaagggaaggtaatcataaacctattgattatcttaatccaccaaaa

SEQ ID NO: 6705 - DNA, 966 bp, synthetic construct
  misc_feature 1..966: note = source = /note="Description of Artificial Sequence: Synthetic coding sequence"
  source 1..966: mol_type = other DNA
atgagcgcgaaaagccgcactatcggcatcattggggcaccattttccaaaggacagcccagggggggcgttgaggaaggccctacagtgttgcgaaaagccggattactggaaaagctcaaagaacaggaatgcgatgttaaggactatggcgatctgccattcgcggacatccccaatgacagcccctttcagatcgtgaaaaatccaagaagcgttggaaaagcctccgaacagctggctggaaaggtcgctgaggtgaagaaaaatggaaggattagtctggttctggggggagaccactccctcgcaatcgggtcaatctcagggcacgccagagtacatcctgatctcggcgttatctgggtcgacgcccacacagatattaacactcccctcactaccaccagcggcaacttacatggccaaccagtgagctttctgctgaaagaactcaagggcaagattcccgatgtgccagggttctcttgggtgaccccctgcatcagcgccaaagatattgtgtacattgggctgagagacgtggatcctggagagcactacattcttaagactctaggaatcaaatatttctcaatgactgaagtcgatagacttggcattgggaaagtaatggaggaaaccctgtcttatcttctgggccgaaaaaagcggcccatacatcttagctttgacgtggatgggctggacccatctttcaccccagcaaccgggacaccagtcgtgggcggcctaacctatcgtgaaggtctgtacatcactgaagagatttacaagacaggcctgctgtctggccttgacatcatggaagtgaatccctccctcggcaaaactcccgaggaggtgaccaggacggtcaatactgccgtggcaattacgctagcctgcttcggcctggcccgggaagggaaccataagccaatcgattatctgaatccacccaag

SEQ ID NO: 6706 - DNA, 966 bp, synthetic construct
  misc_feature 1..966: note = source = /note="Description of Artificial Sequence: Synthetic coding sequence"
  source 1..966: mol_type = other DNA
atgagcgcaaaaagccggacaatcggcattatcggagcaccattttctaaaggacagcctcggggaggagtcgaggaaggcccaactgtgctccgaaaagccgggcttctggaaaagctgaaggagcaggagtgtgatgtgaaagattacggcgatttgccattcgccgacattcccaacgactcgccattccagatcgtgaaaaacccccggtccgtcgggaaagctagcgagcaacttgctggcaaggtagcagaggtgaagaagaatggccgtatcagtttggttctagggggagatcacagtctggccatcggctcgattagtggccatgctcgcgtgcacccagacctgggcgtcatttgggtggacgctcatactgacatcaataccccactaacaacaacatctggcaatctgcacggtcaacccgtgtccttccttctcaaagagctcaagggcaaaatccctgacgtgcccggcttttcctgggtcacgccgtgtattagtgcaaaagatatagtgtacatcggtttgcgcgacgtcgatcctggcgagcattacatcttgaagactctgggcatcaagtattttagcatgacggaggtagataggctcggaattgggaaagtcatggaggaaaccctgagctacctgttagggagaaagaaacggcctatccacctgtcctttgacgtcgacggcctggacccttctttcacacctgcaacaggtacaccggttgtcggcggactgacttaccgtgagggactctacatcaccgaagagatatacaaaacagggctcttgtccggattggatattatggaagtgaacccctccttgggcaaaacccccgaagaggttacgaggactgtgaataccgccgtagctatcacgttagcttgttttggattggctcgagagggaaatcataaaccaatagactatttaaaccctcctaaa

SEQ ID NO: 6707 - DNA, 966 bp, synthetic construct; identical to SEQ ID NO: 6686
  misc_feature 1..966: note = source = /note="Description of Artificial Sequence: Synthetic coding sequence"
  source 1..966: mol_type = other DNA

SEQ ID NO: 6708 - DNA, 966 bp, synthetic construct
  misc_feature 1..966: note = source = /note="Description of Artificial Sequence: Synthetic coding sequence"
  source 1..966: mol_type = other DNA
atgtcggctaagagtcggacgattggtattatcggcgcacccttttctaagggccagccgaggggaggtgtggaagaaggccccaccgttcttcgcaaggcgggcctccttgagaaactcaaggaacaagaatgcgacgtcaaagattacggtgatctccccttcgcggatatacccaacgactctcccttccaaatcgttaagaacccccggtctgtgggaaaggccagcgagcaacttgcggggaaggtcgctgaagtcaagaagaacggacgcatcagccttgtcctcggcggagatcattcattggctattggttcaatctctggacatgcacgggtgcaccctgacctaggagtgatatgggtggacgctcacactgatatcaacacgcctctcacaactaccagcggcaatttgcacggccagcccgtctccttcttgttaaaagagctgaagggcaaaattccagacgtccccggatttagttgggtaaccccttgcatatcagcgaaagacatagtttatattggcctccgagacgtggacccaggagaacactatatcctcaagaccctaggtattaagtacttctctatgacagaggttgaccggctgggcatcggtaaagtaatggaggaaacgctgtcttacctgctcggtagaaagaagcgccccatccatctttcctttgacgtcgatgggcttgacccttcattcactccggcgactggtacgcccgtagtcggaggattgacatacagagaagggctttacatcacagaagagatctataaaaccggcctgttgagcggattggatataatggaagtgaatccgagcctcgggaagaccccggaagaagtcacgaggacagttaatacggcagtcgcaatcaccctggcatgcttcggcctggcacgagagggtaatcataagcctattgactacttgaacccccctaag

SEQ ID NO: 6709 - DNA, 966 bp, synthetic construct
  misc_feature 1..966: note = source = /note="Description of Artificial Sequence: Synthetic coding sequence"
  source 1..966: mol_type = other DNA
atgtcagcaaaatctcgtacaatagggatcatcggtgccccgttctcgaagggccagcctagaggcggcgtagaggaaggcccgactgttctcagaaaggcaggcctgctggaaaagttgaaagaacaagaatgcgacgtaaaagattacggggacctcccattcgctgacatacccaatgactctccattccagatcgtgaagaacccaaggagcgtgggaaaggcatccgagcagttggcgggtaaggttgcggaggtgaagaagaacggtcgcatttccttagtgctcgggggagatcactcccttgccatcggttctatctccggacatgcacgcgttcacccggaccttggcgtgatttgggtggatgctcacactgacataaacacccctttgacaaccacgtcgggaaacttacacgggcagcccgtctcttttctgctgaaggaattaaaaggaaagattccagatgtgcccggtttctcctgggtgacgccatgcatttcggcaaaggacatcgtgtatattggacttcgggacgtggatcccggtgaacattatatactgaagactctgggaatcaagtacttctcaatgaccgaagtggacagactcggaatcggtaaagtaatggaggaaacgctttcttacttgctgggccggaagaagcggcctatccacctctctttcgatgtcgacggcctggatcctagttttactcccgctactggtactcccgtcgtcggaggactgacttaccgagaaggcctgtacattaccgaggaaatatacaagactggcctactaagcgggttggatatcatggaggttaatccatccctgggtaaaacacctgaagaagttacgcgaaccgtgaacactgccgtggctatcacactcgcttgtttcggattggcacgggagggtaatcacaagcctatagactacctgaatcctccaaag

SEQ ID NO: 6710 - DNA, 966 bp, synthetic construct
  misc_feature 1..966: note = source = /note="Description of Artificial Sequence: Synthetic coding sequence"
  source 1..966: mol_type = other DNA
atgtccgcaaagtctaggacaattgggataatcggtgcaccttttagcaagggccaaccaaggggcggcgtggaagagggacctactgtactgaggaaagcagggctgctcgagaaactgaaagagcaggagtgtgatgtgaaggactacggagacctgccttttgccgatatccccaacgactcgccttttcaaattgtcaaaaaccctagaagcgtgggcaaggcatctgagcagttggcaggaaaagtcgccgaggtaaaaaagaacggaaggatatcccttgttcttggtggagaccactcgctcgccatcggttccatctccgggcacgctagggtgcatcctgatctgggggttatctgggtggacgctcatacggatatcaatacacccctgaccactactagcggtaatttgcacggccagcccgtgtcattcttgctgaaggagctcaagggcaagatacctgatgttcctggcttttcctgggttacaccctgtatcagtgcgaaagatatcgtttacatcgggctcagggacgttgatccaggggaacattacattcttaaaactttagggatcaaatacttttcaatgaccgaggtggacagacttggcatcggcaaagtaatggaagaaacactgtcttatcttcttggaaggaaaaagcgtcctatccacctctcctttgatgtcgacggcctggacccaagtttcacacctgcgaccggaacccctgtggttggaggcctgacttaccgtgagggcctatatattacggaagaaatctacaagaccggcctgttgagcggactcgacattatggaagtcaaccccagtctggggaagactccagaggaggtaacacgcactgttaataccgccgtagcaattactctcgcctgctttgggctggcccgcgaaggaaaccacaagccaatcgactatctgaatccaccaaaa

SEQ ID NO: 6711 - DNA, 966 bp, synthetic construct
  misc_feature 1..966: note = source = /note="Description of Artificial Sequence: Synthetic coding sequence"
  source 1..966: mol_type = other DNA
atgtcagcaaagtccaggaccatcgggatcattggagcgccctttagcaagggacagcctagaggaggcgtggaggaaggacctactgtgctgagaaaggcagggctgctggagaagctgaaggaacaagaatgtgatgtgaaggactacggcgacctgccattcgccgatatccccaatgactcacctttccaaattgtgaagaaccccaggtctgtcggtaaagcttcagaacaactcgccggtaaggtggcggaggtaaagaaaaacggtagaatttcgctagttttaggcggcgaccactccctggcaattggctctatcagcggccatgccagggtgcacccagacctcggcgtcatatgggtagacgcccacaccgacattaacacacccctgaccactacttctggcaacttacacgggcagccagtgtccttcctcttgaaagagcttaaaggcaagatacctgacgtgccaggatttagttgggtcaccccttgtatttctgctaaggacattgtgtacattggtctgcgggacgtggaccccggcgaacactacattctgaagactctgggcatcaagtacttttctatgactgaggtcgatcgacttggcatcgggaaagttatggaggagactctatcataccttctcggcagaaagaaaaggcccatacacttgagttttgacgttgacggactggatccttctttcacacctgccacgggtacacctgttgtgggaggtcttacataccgcgaaggactctatattaccgaggagatttacaagaccggtctcctctccggcctcgacatcatggaggttaacccttcgctgggaaagactcccgaggaagtgacccggacagttaacaccgccgtcgcgatcactctcgcgtgctttggacttgctcgcgaaggaaatcataagcccattgattacctgaatcctccaaag

SEQ ID NO: 6712 - DNA, 966 bp, synthetic construct
  misc_feature 1..966: note = source = /note="Description of Artificial Sequence: Synthetic coding sequence"
  source 1..966: mol_type = other DNA
atgagtgccaagagcaggaccattggaattatcggggccccattctcaaaggggcagcctcggggcggagttgaggaaggacccaccgtgctgcggaaagctggcctgttggaaaaactgaaagagcaggaatgcgatgtgaaggattatggcgatctccccttcgccgacatacccaacgattcaccgtttcaaattgtcaagaaccctcgctcagtcgggaaggctagtgaacagctcgcaggcaaggtggcagaagtcaaaaagaatgggaggatatctctggtcttgggcggggaccattcactcgctatcggatctatatctggtcatgctagagtgcacccggacctgggcgtgatatgggtggatgctcacaccgacatcaatactccactgacaaccaccagcggtaatctgcatggccagccagtgagttttttacttaaggaactcaaaggcaaaatccccgacgtgcccggtttttcttgggtaaccccctgcatcagcgccaaagatatagtgtatatcgggctgcgagatgtggatcccggggaacattatatcctcaaaaccctgggcatcaagtatttctcaatgactgaggtagaccgtctgggcattggtaaggtcatggaagagacactgtcttacttgctgggccggaagaagagacccattcatctctcatttgacgtcgacgggctagacccttcatttacccccgccacaggaacccccgtggtgggagggcttacgtacagagaaggcctgtacataaccgaggaaatctacaaaaccggactgcttagtggtctagatatcatggaggttaacccatccttgggaaaaacccccgaagaggtgactcggaccgtgaatacagctgtggccatcacgctggcttgtttcgggctggcccgggaaggaaatcataagcccatcgactatctaaatccccccaag

SEQ ID NO: 6713 - DNA, 966 bp, synthetic construct
  misc_feature 1..966: note = source = /note="Description of Artificial Sequence: Synthetic coding sequence"
  source 1..966: mol_type = other DNA
atgtccgccaagtcccgcactattgggatcatcggtgctccattctcaaagggacagcccagaggaggagtggaggaggggccaaccgtccttcgtaaagcgggcctgttggagaaactgaaggaacaggaatgcgatgtgaaggactacggggacctccctttcgccgatatcccgaacgacagcccgtttcagatcgtgaagaatccccggtcggtgggaaaggcatcggagcagcttgcggggaaggtcgccgaggtgaaaaagaatggacggatctcactggtcttgggcggtgaccattctctcgccatcggatcgatctcaggacacgcacgggtccatcctgatctgggagtgatctgggtggacgcgcataccgacatcaacaccccattgaccaccacctctggaaatctgcatggccaaccggtgtcgttcctcctgaaggaactcaaggggaaaatcccggatgtgccggggttctcgtgggtgacgccgtgcatctcagcaaaggatatcgtgtacatcggactgcgcgacgtggaccctggagaacactacatcctgaaaactctcgggatcaagtacttcagcatgaccgaggtcgaccggcttggaatcggtaaggtcatggaggaaactctgagttacctgctcggccgcaaaaagcgcccaatccatctgtcgtttgatgtggatggattggacccgtccttcacccccgcgaccggaacgccggtcgtcggcggcctgacgtacagggaaggactgtacatcaccgaagagatctacaagactggcctcctctcggggctggatatcatggaagtgaacccgtcgctgggtaagacccccgaggaggtcactcggactgtgaatactgccgtggccataactctggcttgcttcggactggcacgggaagggaatcacaagccgatagactacctgaacccgccaaaa

SEQ ID NO: 6714 - DNA, 966 bp, synthetic construct
  misc_feature 1..966: note = source = /note="Description of Artificial Sequence: Synthetic coding sequence"
  source 1..966: mol_type = other DNA
atgtccgccaaatctaggacaattggaataattggggcccctttttctaaaggtcagccgcgggggggagttgaggaggggccaactgtcctgaggaaggcaggcctgctggaaaagttgaaggagcaggaatgtgatgttaaagattacggggacttgccctttgcggacataccgaatgactctcctttccagattgtgaagaatcctaggagtgtgggaaaggcatccgaacaactagctgggaaagtggcagaagttaagaagaatggacgcatctctctcgttctggggggagatcattcattggccatcggatccatttccggccatgcgagagttcatccagacctcggagtcatatgggttgacgcccataccgatatcaatactcctctgacaactacctccggcaatttgcatggacaacctgtctcttttctgctgaaggaattgaaaggaaagatcccagacgtgcctggattctcttgggtgaccccctgcatttcagccaaggatattgtgtacatcgggctacgcgacgtggacccgggagagcattatatcctgaaaacactgggaatcaaatacttcagcatgacggaggtagatcggcttggcatagggaaagttatggaagagacgctgtcatatttgctggggcggaagaagagaccaattcacctgtctttcgacgtggatggcttggacccatcttttacccccgcgacaggaacacccgtggtaggggggctgacttatcgtgaaggcctctacatcactgaggaaatttacaaaaccggtctcctctcagggctggatatcatggaagttaacccttctctgggtaagactcctgaggaagtcaccagaaccgtcaacacagcagtggctattactcttgcttgtttcgggctggctcgagaagggaaccacaaacctatcgactatctcaaccctccaaag

SEQ ID NO: 6715 - DNA, 966 bp, synthetic construct
  misc_feature 1..966: note = source = /note="Description of Artificial Sequence: Synthetic coding sequence"
  source 1..966: mol_type = other DNA
atgagtgccaagagcaggactataggcattatcggagcccctttcagtaagggacagcccagaggaggcgttgaagagggtcctactgtgctcaggaaggcgggcctgttggaaaaactgaaggagcaggaatgcgacgttaaggactatggagatcttccatttgccgacatacctaacgacagtccgttccagatcgtgaagaacccccgctctgtgggcaaggctagtgaacaattggcaggaaaggtcgctgaagtcaagaagaacggtaggatctctctcgtgctgggtggagaccactctctggccattggttcaatatctggccacgcaagagtccaccccgacctgggcgtcatctgggttgatgcccacactgacataaatacgccactgaccacgacctccggtaatctgcacggacagcctgtttctttcctgctgaaggagctgaagggtaagatacctgatgtgccaggcttcagctgggtgactccctgcatatccgctaaagacatcgtctacatcggcctgagggatgttgatcctggagaacactacatcttgaaaacactgggcatcaagtacttctctatgacagaagttgatcgcctgggcatcggtaaggtaatggaggagactctcagctatttgctcggacgcaagaaaaggccaatacacctgagcttcgacgtggacggtctcgatccttcattcacaccggccaccggaactcccgttgtaggtggtctcacgtacagagagggcctgtacatcactgaagagatctacaagacaggactcttgtccggtctggacattatggaagtgaatccgtcactgggcaagaccccggaggaagtgaccaggaccgtgaataccgctgtggctattacccttgcgtgcttcggactggcaagggagggcaatcacaagcccatcgactacctgaaccccccaaag

SEQ ID NO: 6716 - DNA, 966 bp, synthetic construct
  misc_feature 1..966: note = source = /note="Description of Artificial Sequence: Synthetic coding sequence"
  source 1..966: mol_type = other DNA
atgtctgcgaagtcgcgcaccattggtatcattggcgcacctttttcaaagggtcaacctcgaggtggtgttgaagaaggtcccactgttctgcggaaggctggccttctcgaaaaacttaaagagcaggaatgcgacgtgaaggactacggtgatctcccatttgccgacattcctaatgattcgccctttcaaatcgtgaaaaatccgcgatcagtgggtaaggcctccgaacagcttgcaggcaaggtggcggaagtcaagaagaacgggcgcatctcccttgtgctgggcggagatcattcgctcgctattggttcaatctctggtcatgcccgagtgcatcctgacctgggagttatatgggtagatgcccatacggacattaacactcctcttaccactacttcggggaatctccacggacaaccggtgagctttctcttgaaggaactcaagggaaagatacccgatgtgccaggattttcctgggtcactccctgtatctcggccaaggacattgtctatatcggactcagagacgtcgatcctggggaacactacattcttaagactctgggtatcaaatacttttccatgactgaggtggatagattgggaattggaaaagtcatggaagaaactctttcgtatctgctcggcagaaagaaaaggccgatccacttgtccttcgacgtggatgggctggatccttcatttactccagcaactggaaccccagtggtgggcggtctgacctaccgcgaagggctttacattaccgaggagatctacaagacgggactcctctctggcctcgacattatggaagtcaacccttccctcggaaagaccccagaggaggtgaccagaaccgtgaacactgccgtggcaataactctggcttgttttggactcgcaagagagggaaaccataaacctatcgattacctgaacccaccaaag

SEQ ID NO: 6717 - DNA, 966 bp, synthetic construct
  misc_feature 1..966: note = source = /note="Description of Artificial Sequence: Synthetic coding sequence"
  source 1..966: mol_type = other DNA
atgagcgctaagtcccgtaccattggaatcattggtgctcccttctcgaagggccaaccccgtggtggcgtcgaagaaggacccaccgtgttgcgaaaggccggcttgctggagaagctgaaggagcaggagtgcgacgtgaaggactacggtgacctgccattcgctgacatcccaaatgacagtccatttcagatcgtcaagaaccctcgtagcgtgggtaaagccagcgagcagctggccggcaaagtggctgaggtcaagaagaacggtcggatctcgctcgtgctcggcggtgaccacagcctggcgattggatcaattagcggccacgcccgggttcaccctgatcttggcgtgatttgggtggacgctcacacggatatcaatactcccctgacgactaccagcggcaacctgcatggacagcccgtgtcctttcttttgaaggaactcaagggtaagatccccgacgtacctggtttctcttgggtaaccccttgtatctctgccaaggatatcgtgtatattggcctcagagatgtcgatcctggtgagcactacattctcaagaccctcggaataaagtacttctccatgaccgaggtcgataggttgggcatcggtaaagtcatggaggagacactctcgtacctgctgggcaggaagaagaggcccattcacctcagctttgacgtcgacggtctggacccgtcttttacccccgcgacgggcaccccagtggtcggcggtcttacttaccgggagggcctgtacattaccgaagagatctacaaaaccggactgctgagtggcttggacatcatggaggtgaacccctctcttggtaagactcccgaggaggtcacgcgcaccgtcaacaccgcagttgcgatcaccttggcctgcttcggacttgcacgcgagggcaaccacaagcctattgactatctcaaccctcccaag

SEQ ID NO: 6718 - DNA, 966 bp, synthetic construct
  misc_feature 1..966: note = source = /note="Description of Artificial Sequence: Synthetic coding sequence"
  source 1..966: mol_type = other DNA
atgagcgccaagtcccggacgatcgggattattggggcccctttctctaaagggcagccacggggcggcgtggaggaagggccaactgttctgcggaaggcgggcttgctcgaaaaactcaaggaacaggaatgtgatgtgaaagattacggagatcttccgtttgctgacatccctaacgatagtccgtttcaaatcgtcaaaaacccccggtctgtaggcaaggcatccgaacagctagccggcaaagtggccgaggtgaagaagaacggtaggatatctctggtgctcggaggagaccactctttggcaatcggcagtatcagcgggcatgcacgggtgcatcctgacctgggcgtgatctgggtggacgcccacactgatatcaatacccctcttactaccaccagcgggaacctccacgggcagcccgtcagcttcctgctgaaagaactgaaaggaaaaattcccgatgtgcccggcttctcatgggtcacaccctgtatttctgccaaagatatcgtgtatatcggcctgagggatgtggacccaggtgagcactatatactaaagactcttggtattaagtatttctcaatgaccgaggtcgataggttaggcattgggaaagtgatggaggagacgttaagctacctgctggggcgaaagaagcggcctatacaccttagtttcgacgtcgacggtctggacccctcctttactcccgcgacgggtacccccgtagtgggtggcctgacctaccgagaaggattgtacattaccgaggaaatttacaagaccggactgctgtctggcctggacataatggaggtcaaccctagcctgggaaaaacccctgaggaggtcacgaggacagtgaacactgcagtggccatcaccctggcctgcttcggactggccagggagggaaaccataagcctattgactacctgaatccccctaag

SEQ ID NO: 6719 - DNA, 966 bp, synthetic construct
  misc_feature 1..966: note = source = /note="Description of Artificial Sequence: Synthetic coding sequence"
  source 1..966: mol_type = other DNA
atgtccgccaagtcgcgcactatcggcatcatcggagccccgttctcgaagggccagccacgcggaggggtagaagagggtcccaccgtccttcgcaaggcagggcttttggagaagctgaaagaacaagaatgtgacgtgaaagattacggagatcttccatttgcggacatccccaacgattcgccttttcagatcgttaagaacccgagatccgtgggcaaggcatcggaacagctcgctggcaaggtggcggaggtgaagaagaacggacgaatcagcctggtgctcggtggagatcacagcctggccatcggtagcatctcggggcacgctagagtccaccccgacctgggagtgatctgggtggacgctcatactgatatcaatacccctctcaccactaccagcggaaatctgcacggacaaccagtgtcattcttgctcaaggaactcaaaggaaaaatcccggacgtgccgggattctcctgggtaactccgtgcatatccgcaaaggatattgtgtatatcggactgcgcgacgtcgatcctggagaacattacattttgaaaaccctcgggatcaaatactttagcatgaccgaggttgataggctgggcattggaaaggtcatggaagagactctcagttacttgctggggagaaagaaaaggccgatccatctgtcgttcgacgtcgacggtctggacccttcgttcactcctgcgaccggaactccggtcgtgggtggccttacctacagagaaggtctttacattactgaggagatctacaagacgggcctgctgagcggactcgatatcatggaggtgaaccccagtctgggcaaaactccagaagaagtgacgagaaccgtgaataccgccgtggcaatcaccctggcatgcttcggtctggctcgcgaggggaaccacaagccaatcgactacctgaaccctccaaag

SEQ ID NO: 6720 - DNA, 966 bp, synthetic construct
  misc_feature 1..966: note = source = /note="Description of Artificial Sequence: Synthetic coding sequence"
  source 1..966: mol_type = other DNA
atgtctgccaagagccgcacaatcgggataatcggcgctccattctctaaaggccagcctcgcggcggtgttgaagaaggcccaacagttcttcggaaggcgggcttactggaaaaattaaaggagcaggagtgcgacgtaaaagactatggcgacctgccgtttgcggatatccctaatgatagccccttccaaattgtcaagaaccccagaagcgtaggcaaggccagtgagcagctggcagggaaagtagcagaagtcaaaaagaatggacgcatatctctcgtattggggggtgatcattcattagctatcgggtctattagcggccatgctagagtgcaccctgacctgggcgtgatctgggtcgacgcccatactgatataaataccccactgactacgaccagtggaaatctgcacgggcagccagtttctttcctgcttaaagagctgaaaggcaagatcccggatgtgcccggtttcagttgggtcacgccctgtatttcggccaaggacatcgtatatattggcctacgggatgtcgacccgggagagcactatatcctcaagaccttgggaatcaagtatttctctatgaccgaagtggatcgactcggaattggaaaggttatggaagaaaccctgtcttacctactggggcggaagaagcggcccattcatctctccttcgatgtggatgggctggaccccagcttcacgccagcgacaggaacccctgtcgtaggaggcctgacctatcgtgagggcctttacatcaccgaggaaatttataagactggcctgctttcaggactggacattatggaggtgaacccaagtctcggcaagacaccagaagaggtgactaggacagtaaacacggcagtcgctattacactcgcttgtttcggattggcccgggaggggaatcataaacccatcgactaccttaaccctcccaag

SEQ ID NO: 6721 - DNA, 966 bp, synthetic construct
  misc_feature 1..966: note = source = /note="Description of Artificial Sequence: Synthetic coding sequence"
  source 1..966: mol_type = other DNA
atgagtgccaagtcacggactatcggtattataggcgcacctttttccaagggccaaccaaggggcggcgtggaagaggggcctacagtgttacgtaaggctggcctgctggagaaacttaaggagcaggaatgcgatgtcaaagactacggcgacctgccttttgctgatattcctaacgattctcctttccagattgttaagaatcctcgctccgtgggcaaagcaagtgagcaactggccggcaaagtggccgaggtgaaaaagaatggccgtatttcactggtgctgggcggagaccatagcctagctattggctcaatttctggccacgcccgcgtgcatccagatttgggagtgatctgggtcgatgctcatacagacatcaacacacccttaaccaccaccagcgggaacctgcacggacaacctgtttcttttctcctgaaggagctcaagggtaagatccctgacgtgccagggtttagttgggtcaccccttgcatctctgccaaagacattgtttatatcggcctgagggatgtggacccaggggaacattacatactgaagacccttggaatcaagtacttctctatgaccgaagtggaccgtctgggcataggtaaagtcatggaggagactctgagctacttgctaggaaggaagaagagacctatacacctgagcttcgatgtcgatggcctggacccaagttttacccccgccaccgggactccagtggttggcggacttacatatagggagggtctatacattaccgaggaaatctataaaacaggactgctgtctggattagacattatggaagttaacccatctctcgggaagaccccagaagaagtgacccggacagttaacaccgctgtggctattaccctagcttgtttcggcctggcccgggaaggcaatcacaagcctatcgattatctaaatccccctaaa

SEQ ID NO: 6722 - DNA, 966 bp, synthetic construct
  misc_feature 1..966: note = source = /note="Description of Artificial Sequence: Synthetic coding sequence"
  source 1..966: mol_type = other DNA
atgtcagccaaaagccgcaccatcggtattatcggggctccgttttcaaagggccaacctagggggggtgtggaggagggacctaccgtgctccggaaggccggattactagagaagcttaaagagcaagaatgtgatgtgaaagactatggtgatctgccatttgctgacatacctaacgacagcccgttccagattgtgaaaaacccaaggtcggtcggtaaagcgagtgagcaacttgccggcaaggtggccgaggtcaaaaagaacggacggatatctctcgtcctcggcggggatcactcgctggcaatcggctcaatctctgggcatgctagagtgcatcccgatctcggtgtaatctgggtcgacgcccatacagacattaacacgccattgactacgacttcgggtaatctccatggtcagcctgtgtctttcttgcttaaggaactaaagggcaaaattcccgacgtccctggattttcctgggtaactccatgcattagtgccaaggacatagtgtatatcggccttcgggatgtagaccctggagaacactacattctcaaaacactgggcataaagtactttagcatgactgaggtcgatagactcggaataggaaaagtgatggaggagaccctctcctatctcctgggtcgcaagaaacggcctattcacctgtcttttgacgttgacggtttagatccgtcctttacaccagcaacaggaaccccagtagttgggggactgacttaccgggaggggctttacattacagaggaaatctataagacaggcttgttgtccgggctggatatcatggaggttaatccctctcttggcaaaacacccgaggaggtcacgagaaccgtcaataccgccgtggctatcaccctagcctgcttcggtctggcccgggagggtaaccataaacctatcgactatctaaaccccccaaaa

SEQ ID NO: 6723 - DNA, 966 bp, synthetic construct
  misc_feature 1..966: note = source = /note="Description of Artificial Sequence: Synthetic coding sequence"
  source 1..966: mol_type = other DNA
atgtccgctaaatcacgtaccattggcataatcggggctcctttttccaagggccagcctagaggcggtgtggaagagggacccacggtgttgcgtaaggccggactgctggagaaattgaaggagcaggagtgtgacgtgaaagattacggggacttgcccttcgcggacatcccaaacgacagcccgtttcaaatcgtgaaaaatcctaggtccgtggggaaagccagcgagcagcttgctggtaaagttgccgaggtaaagaaaaatggacgtatcagcctggtgctcggaggcgatcattctttggctattggctctatttcaggtcatgcacgagttcatccggatcttggcgttatctgggtggacgctcacacggatattaacacacccctgactacgaccagcggtaacctgcatggacaacctgtgtcatttctcttgaaagaattgaagggtaaaataccagacgtaccagggtttagctgggtcaccccatgtatctccgcaaaggacatcgtttacattggcctccgggacgtagatccaggtgagcactacattctgaagacacttggaataaagtactttagtatgacggaagtggacaggctcgggatcggaaaggttatggaggaaaccctgtcgtacctcctggggaggaaaaagcgccctattcacctgtcattcgacgtggacggcctggatccaagctttactcctgcaacagggacacctgtggttgggggattgacttatagggagggtctatatattaccgaggaaatctacaaaaccggcctgctcagtgggctggacattatggaagttaaccccagtttgggcaagactcctgaagaggttactagaaccgtcaacacggcggtggccattacacttgcctgctttggattggcacgggagggcaatcacaaacccatcgactatctcaatccacccaag

SEQ ID NO: 6724 - DNA, 966 bp, synthetic construct
  misc_feature 1..966: note = source = /note="Description of Artificial Sequence: Synthetic coding sequence"
  source 1..966: mol_type = other DNA
atgagtgcaaagagccgtacaattggtataattggcgcccccttttcgaaaggacagccccgtggcggagttgaagagggaccaactgtgttacgaaaagccggcctacttgagaagctcaaagagcaggagtgcgatgtcaaggattacggagacttgcccttcgccgatattccgaacgactccccctttcaaatagtcaaaaacccgaggtctgtgggaaaggcttcggaacagctggccggaaaggtggccgaagtgaagaagaacggccgtatctctcttgtgttaggaggcgaccactcgttggccattggcagcatctcgggtcacgcccgtgtacatccagatttgggagtcatttgggttgatgcacatacagacataaatacaccgctaaccaccacctcgggcaaccttcacggccagccagtctcctttctcttgaaggagcttaaaggcaagatccccgacgtgccaggcttttcctgggtgaccccatgtatttccgccaaggatattgtgtacatcggtctgagagacgtggaccctggcgagcattacatcctgaagacgctgggcattaagtattttagcatgacggaagttgaccggttgggtatcggaaaggtgatggaggagacgctttcctacctcctgggccggaaaaagcggccaatccatctaagctttgatgtagatggcctggacccctccttcacaccggccacgggcactcccgttgtgggcggtctcacttatcgtgaaggcctttatataacggaggagatttacaaaacagggctcttatcgggtctggatatcatggaagtgaatccatcactgggcaagacgcccgaggaagtgactcggactgtgaacaccgccgtggccataacgttggcctgtttcggactggcccgcgaaggaaaccacaagcccatcgactatctaaatccaccgaaa

SEQ ID NO: 6725 - DNA, 966 bp, synthetic construct
  misc_feature 1..966: note = source = /note="Description of Artificial Sequence: Synthetic coding sequence"
  source 1..966: mol_type = other DNA
atgtcggccaagtcaaggactatcggcatcatcggtgcgccgttctcaaagggacagcctaggggaggcgtggaagaagggcctaccgtcctgcggaaggcaggccttcttgaaaagctgaaagaacaagagtgcgatgtcaaggactacggcgacctgccgtttgcggacattcctaacgactcgccgttccaaatcgtgaagaacccgcggagcgtggggaaggcatcggagcagctggctggaaaggtggcagaggtgaagaagaacggacggatctccctggtgctgggcggcgaccattccttggccatcggctcaatcagcggacacgcccgcgtgcatcccgacctgggggtcatttgggtagatgcgcacaccgacatcaacactccgcttaccacgacttccggtaacctccatggacagccggtgtcgttcctcctcaaggagctcaaaggcaagattccggatgtgccgggcttctcttgggtcactccgtgcatctcagccaaagacatcgtgtacataggactgcgagatgtcgaccctggggaacactacatcctgaaaacgttgggtatcaagtatttcagcatgactgaggtggataggctcggaatcggaaaagtgatggaggaaaccctttcatacctgctgggtcggaagaagcgtccaatacacctgtcgttcgatgtggacggcctggatccgtcctttacccctgccactggaaccccagtggtgggcggactcacctaccgggaaggactctacatcacggaggaaatctacaagaccggcttgcttagcggcttggatatcatggaagtgaatccgtccctgggaaaaaccccagaggaagtcacgcgcaccgttaataccgccgtggccatcactcttgcttgctttggccttgcgcgagaaggcaatcataagccgatcgactacctgaacccaccgaaa

SEQ ID NO: 6726 - DNA, 966 bp, synthetic construct
  misc_feature 1..966: note = source = /note="Description of Artificial Sequence: Synthetic coding sequence"
  source 1..966: mol_type = other DNA
atgtcagccaaatccagaactatcggtatcattggagcgcctttttccaaggggcagccccgtggaggagtggaagagggacctactgtgttgcgcaaagctggcctgctggagaaactaaaagagcaggaatgtgatgtgaaagactacggagaccttccatttgcagatatccccaacgactcaccttttcaaattgtaaaaaaccctcggagcgtcggtaaagcaagcgagcaattggctgggaaggttgccgaggtcaagaaaaatgggcgcatctctctagtgctggggggagaccattccctagcaattggctctattagcggacacgcaagagtgcatccagatctgggggtgatctgggttgacgcccataccgatatcaacactcccctgacgaccacgagtggaaacctgcacggacagccggtgtctttcttacttaaggagttgaagggcaaaattcccgacgtcccaggattttcctgggtcactccttgcatctccgctaaggacatagtttacatcggcctcagggacgtggatccgggtgaacactatattctcaagacgctcgggatcaagtacttcagcatgaccgaagtcgaccggctcgggatcggaaaggtcatggaagaaaccctgagctacctactcggccgcaagaaaagaccaatccacctgtcctttgatgtcgatgggctggaccccagctttacacccgcgacaggcacaccagtagtaggcggcctcacctatcgcgagggcctgtatattacggaagaaatttacaagacgggtctcctgagcggattagatatcatggaggtgaatccctcattaggaaagacacctgaagaggttactaggaccgttaataccgcagtagcaattacgctggcttgcttcggactcgctagggaagggaaccataagcctattgattacctaaaccccccaaag

SEQ ID NO: 6727 - DNA, 966 bp, synthetic construct
  misc_feature 1..966: note = source = /note="Description of Artificial Sequence: Synthetic coding sequence"
  source 1..966: mol_type = other DNA
atgagcgctaagagccgaacgattggcatcattggtgcaccttttagcaaggggcagccgcgcggaggtgtcgaagagggcccaacagtgttacgaaaagcaggactacttgagaaactgaaagaacaggagtgtgatgtaaaggactacggcgacctaccgtttgcagacatcccaaatgattcgccctttcagatagtgaaaaatccccgctcggtgggaaaagcttctgagcagctggctggaaaggtggcagaagtcaaaaagaacgggaggatctccctggtgctcggaggggatcatagtctggcgattggttccatttcagggcacgcccgcgtgcaccccgaccttggcgtcatctgggtcgacgcccacacggatataaatacacccctgacaactacatctgggaacctgcacggacagcctgtgtccttcctcctgaaggagctgaaaggaaaaattccagacgtgcccggattttcttgggtcaccccttgtatctccgccaaagacattgtctacatcggtctgagagacgtggatcctggagagcactacatcctgaagacactaggcatcaaatactttagtatgactgaggttgaccggctgggtataggaaaggtgatggaggagactctgtcatatttgctcggtaggaagaaaaggcccatccacctatcattcgatgttgatggacttgatccaagcttcaccccggccaccgggactccagttgttggcggactaacgtatcgtgaaggcctttatataacagaggaaatctataagactggactcctgtctggcttggacataatggaggtcaaccctagcctgggaaagacacctgaagaagtgacacggaccgtcaacaccgccgtggcaattacactggcatgcttcggtttggccagggagggaaatcacaagcccattgattatcttaatccacctaaa

SEQ ID NO: 6728 - DNA, 966 bp, synthetic construct
  misc_feature 1..966: note = source = /note="Description of Artificial Sequence: Synthetic coding sequence"
  source 1..966: mol_type = other DNA
atgtctgcaaagagtcgaactatcggcattatcggggcgcctttctctaaggggcagcccagggggggggtggaagaggggcctactgtgttgcggaaagctggcctgcttgaaaaactgaaagagcaagaatgcgacgtgaaggactatggcgacctcccattcgccgacatcccgaatgatagcccatttcagatcgtgaaaaatcccagatcagtgggcaaagcatctgagcaactcgcagggaaagtggcggaggtgaagaagaatggaaggattagtttagttctggggggtgaccatagtctggcgattgggagtatatctggacacgcgagagtgcaccccgacctcggcgtcatctgggtagatgcacacaccgacattaacactccacttaccaccaccagtggcaatctgcacggacagcctgtctcgtttctgttgaaggaacttaagggtaagatcccggatgtcccgggattcagctgggtgacaccttgtattagtgcgaaggacattgtgtacatcggtctgagggacgtggatcccggggagcattatattctgaaaacactagggatcaaatacttcagtatgacagaagttgacaggctgggcatcgggaaagttatggaggagacactcagctatttgctgggccgaaaaaaacgaccgattcacctcagcttcgacgtggacggtttggacccctcatttactccggccaccggaaccccagtcgtgggaggcttgacttaccgtgagggtctatatattactgaagagatttacaagacaggactgttgtccgggctggacattatggaagtgaacccaagcttagggaagacgccggaagaagtaacaaggacagtgaacacagccgtggcaataacattggcctgtttcggtctggcgagggagggcaatcacaagcctatagactacttgaaccccccaaaa

SEQ ID NO: 6729 - DNA, 966 bp, synthetic construct
  misc_feature 1..966: note = source = /note="Description of Artificial Sequence: Synthetic coding sequence"
  source 1..966: mol_type = other DNA
atgagcgctaagtcgcgcaccatcgggatcataggggccccatttagcaaaggacagccgagaggaggtgtggaggaaggaccaactgtgctgcggaaggctggactccttgagaagctcaaggaacaggagtgcgatgtcaaagactacggggacctgccctttgctgacatcccgaacgattcaccgttccaaatcgtgaagaacccgagatctgtcgggaaggcgtccgagcaacttgcgggcaaggtggctgaagtgaagaagaacgggaggatttctttggtcctcggaggtgatcactccctcgcgatcggaagcatcagcggtcatgctcgggtgcaccctgatctgggggtgatctgggttgatgcgcatacggatatcaatactccacttacgaccacgtccggcaacctccatggccagcccgtctccttcctgctcaaagaactgaagggaaaaatcccggatgtgccgggattctcatgggtgaccccatgcatcagcgccaaggatatcgtgtacatcggccttcgggacgtggatccgggagaacactacatcctgaaaaccctgggcatcaaatacttctcgatgacggaagtggaccgcctgggaatcggcaaggtgatggaggagactctctcctacctcttgggtcgcaagaagcggcctatccacctctccttcgacgtggacggcctcgacccgagcttcactcccgcaactggaactcctgtcgtgggaggcctgacttaccgggaaggtctgtacattaccgaagagatttacaaaactgggctgctgagcggactcgacatcatggaggttaatccgtctctgggcaagaccccggaagaagtgactcggacggtgaacactgcagtcgctatcaccctggcatgcttcgggctggcacgggagggaaaccacaaaccaatcgattacctcaaccctccgaag

SEQ ID NO: 6730 - DNA, 966 bp, synthetic construct
  misc_feature 1..966: note = source = /note="Description of Artificial Sequence: Synthetic coding sequence"
  source 1..966: mol_type = other DNA
atgagcgccaagtcccgcacgatcggaatcatcggagcccctttctctaaaggccagccgcgcgggggtgtggaggaaggaccaaccgtgctgagaaaagctggtctgctcgaaaagctcaaggagcaggagtgcgatgtgaaggactatggtgacctgccgttcgccgacattccaaatgattccccatttcaaatcgttaagaaccctcgctcagtgggaaaagctagcgagcaactggccggcaaagtggcggaggtcaagaaaaacggacgcatctcgctcgtcctgggaggtgatcattccctggcgatcggctcaatatcgggacatgcgagagtccacccggaccttggcgtgatctgggttgatgcccacactgacattaacaccccgttgactaccacctcgggcaacctgcatgggcagcctgtttccttcctcctgaaagaactgaaaggtaagattccagacgtgcccggcttcagctgggtgaccccttgcatttcggcgaaggatatcgtgtacatcggactccgggatgtggacccgggcgagcactatatcctgaaaactttggggattaagtatttctcaatgacggaggtggaccggctcgggatcgggaaggtgatggaagaaaccctcagctatctgctgggacgtaagaagcgcccgattcacctctcgtttgacgtggacgggctggacccatccttcactccggctaccggaaccccggtagtcggagggctcacctaccgggaagggctctacatcactgaggagatttacaagactgggctcttgagcggactggatatcatggaggtgaacccgtccctgggcaaaaccccagaggaagtcacgcggacggtcaacaccgccgtggccattactctggcatgtttcggactggcacgggaaggaaatcataagcctattgattacctcaatccgccgaag

SEQ ID NO: 6731 - DNA, 966 bp, synthetic construct
  misc_feature 1..966: note = source = /note="Description of Artificial Sequence: Synthetic coding sequence"
  source 1..966: mol_type = other DNA
atgagcgcgaagtcccgcactatcggtatcatcggcgctccattcagcaagggccaacctcgcggaggcgtcgaagagggaccgaccgtcctgcgaaaggccggcctcctggaaaagctgaaggagcaagaatgcgacgtcaaggactacggtgacctgccgttcgcggacataccgaacgattcgccattccagatcgtgaagaacccccggtccgtcggaaaggcatcggagcagttggcgggaaaagtggccgaggttaagaaaaacggacggatctcactcgtgctcggaggggaccactccctcgctatcggatccatcagcggacacgcccgggtgcaccccgatctcggagtgatttgggtcgacgcacataccgatatcaacaccccactcaccaccacctccggaaatctgcacggtcagccagtgtcgtttcttctgaaggaactgaagggaaagatcccggatgtccccggctttagctgggtgaccccatgcatttccgcaaaggacatcgtgtacatcggactgcgggatgtggatcctggggagcactatatcctgaaaactctggggatcaagtacttctcgatgactgaagtggaccggttgggaatcggaaaggtcatggaggagactctgtcgtatctcttgggaaggaagaagcggccaatccacttgtccttcgatgttgatggtctggatccttcattcactcctgcaactgggactccagtggtgggagggcttacttaccgggagggattgtacatcaccgaagagatatacaagaccggactccttagcggcctggacatcatggaagtgaacccgagcctgggtaaaactccagaggaagtgaccaggactgtcaataccgccgtggccatcactctggcctgctttggtctggcccgggagggcaaccataagccgatcgactacctgaatccaccgaag

SEQ ID NO: 6732 - DNA, 966 bp, synthetic construct
  misc_feature 1..966: note = source = /note="Description of Artificial Sequence: Synthetic coding sequence"
  source 1..966: mol_type = other DNA
atgtctgcaaagagcaggacaatcggaattattggagcccccttctccaagggccagcctcgcggtggcgtcgaagaaggccctactgtgcttaggaaggctggcctgcttgagaagctcaaggagcaagagtgcgatgtcaaagattacggcgatctcccattcgccgacatccccaacgacagtcctttccagattgtaaagaatcctaggagcgtgggaaaggcctctgagcaactggcaggaaaggtggctgaggttaagaagaacggcaggatttctcttgttctcggtggtgaccacagcctggctatcggaagtatctccggacatgccagggttcacccagacctgggagttatctgggtcgatgcacacacggacatcaatacaccactcaccaccacctccgggaaccttcacggccaaccagtatccttcttgctgaaggaactcaagggcaagattcctgatgtaccaggcttcagctgggtaaccccatgtatctctgcaaaggatattgtgtatatcggtctgcgcgatgtggacccgggcgaacattacatccttaagactctggggatcaagtacttttcaatgacagaggtggaccgcctgggcatcggtaaggtgatggaggagacgctgtcatatctgctcgggagaaagaagcgaccaattcatctttcttttgatgtcgacggtttggacccaagtttcactccggccacggggactcccgttgtgggaggtctgacatacagagaggggctctatatcactgaggagatctataagacaggccttctttccggcctcgacattatggaggtcaaccccagtctcggaaagactcctgaagaagtgaccaggactgtcaacacagcagtggccataactcttgcatgctttggacttgcaagggaggggaatcacaaacccattgactatctgaacccccctaag

SEQ ID NO: 6733 - DNA, 966 bp, synthetic construct
  misc_feature 1..966: note = source = /note="Description of Artificial Sequence: Synthetic coding sequence"
  source 1..966: mol_type = other DNA
atgtctgccaagagtcgcaccatcggcattattggggcgcccttttctaagggccagccacgaggtggcgtggaggaggggccaaccgtgctacgcaaagcagggctcttggaaaagctgaaggaacaggagtgcgacgttaaagattatggagatctgccttttgcagatatccccaatgattccccgtttcaaatcgtgaaaaaccccagatcagtagggaaagcctcagagcaattggccggtaaagtggccgaagtgaaaaaaaacggcaggattagcctcgttcttggaggcgaccactcgctggccattggttccatctctggacacgcgcgggtgcatccggacctgggcgtgatctgggtggacgcccataccgacatcaacaccccgctcacaactacaagcgggaaccttcacggacagccagtgtcattccttctgaaagaactcaaaggtaagatacccgatgttcctggtttctcgtgggtcactccctgtatttccgcgaaagatatcgtgtacatcggcctgagagatgtagatccaggggagcattatatcctgaagactcttggtattaagtatttctccatgactgaagtcgataggctgggtattggaaaggtaatggaagagaccctctcctatctactgggccggaagaagcggccaatacatttatccttcgatgttgatggtctggatccttctttcacacccgccacaggaaccccagtggttggagggctgacttatcgagaaggtctctatattacagaggaaatctacaagactggtctgctgtcaggactggatataatggaggtcaaccccagccttggcaaaacgcccgaagaagtgacgcggactgtaaataccgcggtcgccatcacccttgcttgtttcggcttggcccgggaggggaaccataaaccgattgactatctaaacccccccaag

SEQ ID NO: 6734 - DNA, 966 bp, synthetic construct
  misc_feature 1..966: note = source = /note="Description of Artificial Sequence: Synthetic coding sequence"
  source 1..966: mol_type = other DNA
atgtctgctaaatcccgcacgatcggtattataggggcccccttttctaaaggacaacctaggggtggagtggaggaaggtccaactgtgctgcggaaagccggtctgttggaaaaattgaaagaacaggaatgtgatgttaaagactacggtgatcttccctttgcagatatccctaacgactccccctttcagattgtcaagaaccccagaagcgtcggcaaggcctctgaacagttggccggaaaggttgccgaagtgaagaagaacggtaggatctccctcgtcctgggcggagatcatagcctggccattggcagcatttccggacacgctagagttcaccccgacctcggagtgatctgggttgatgcacacactgacatcaatacacccctgaccactacctctgggaacttgcacgggcagcctgtgtccttcctcctcaaagagcttaagggtaaaatccctgacgtgccagggttttcttgggtgaccccatgtatcagcgctaaggacattgtgtatattggtctgcgcgatgtggacccgggtgaacattacatcttaaagacattaggcataaagtatttctccatgaccgaagttgatcgcctgggcatcggaaaagtaatggaggaaacactctcctacctgctgggaaggaaaaaaagacctatacacttgtccttcgacgtggatggcctagacccgagcttcactcctgccaccgggacccctgtggtgggagggttgacatatagagagggattgtatatcaccgaagagatctataaaactgggttgctgtcagggttggacatcatggaagtcaatccctccctgggtaaaacacctgaggaagtgaccagaacagtgaatacagctgtggctattaccctggcctgctttggcctggccagagaggggaaccacaagcctatcgactatttgaatcccccgaag

SEQ ID NO: 6735 - DNA, 966 bp, synthetic construct
  misc_feature 1..966: note = source = /note="Description of Artificial Sequence: Synthetic coding sequence"
  source 1..966: mol_type = other DNA
atgtctgctaaaagcagaaccatcgggatcattggtgcacccttctctaagggccagcctcggggaggcgtcgaggagggtccgactgtcctcaggaaggctggcttgctggagaaactgaaagaacaagaatgtgacgtcaaggactacggggacctgccgttcgcagatataccaaacgattcaccgtttcagatcgtgaagaacccacgatctgtgggcaaagccagcgagcagttggccggtaaagttgcagaggtgaagaagaacggcagaatcagccttgtccttggaggagaccattcactagcgatcggttctatctcgggccatgcacgcgtgcaccctgacctaggagtgatttgggtcgatgcccacacggacataaacacccccctgaccaccacaagcgggaatttgcatggccaacctgtgagttttctgcttaaggaacttaaaggtaagattccagacgtccctggattttcctgggtgaccccctgcatatcagcgaaggatattgtttacatcggactcagggatgtcgatccgggggagcattacattttaaagaccttaggcattaaatacttctcaatgactgaggttgatcgactgggtatcgggaaggtgatggaagaaacacttagttacctactcggtcgaaagaaacgtcccatacatctcagctttgatgtagacgggctggatcccagttttacccctgccactggcaccccggtggtggggggactaacctacagagaaggattgtacattaccgaggagatatataaaaccggccttttgtcgggtctagacattatggaggtgaatccgtctctgggaaaaacgccggaagaagttacacgcactgtgaatacagccgtggccatcactttggcatgctttggacttgcccgcgaaggcaatcacaaaccaatagactatctgaatccgcccaag

SEQ ID NO: 6736 - DNA, 966 bp, synthetic construct
  misc_feature 1..966: note = source = /note="Description of Artificial Sequence: Synthetic coding sequence"
  source 1..966: mol_type = other DNA
atgtcggcaaagagccgtactatagggattattggagcacctttctcaaaaggacaacctcgcgggggcgtcgaggaaggtccaaccgtgctcagaaaggcgggactcctcgagaaactgaaagagcaggaatgtgacgtgaaagactacggagatctcccatttgcagatataccgaacgattcaccatttcagattgtgaagaacccgaggtcggtgggtaaggcatcagaacaacttgcggggaaagtggcagaagtgaaaaagaatggtagaatctccctcgtgcttgggggtgaccattccttggcaatcggatcgatctccgggcatgcacgggtgcatcccgatctgggtgtgatttgggtcgacgcacacaccgatatcaacactcctctgaccactacttcgggtaacctgcatggtcagccagtctcatttctcctcaaggaacttaaggggaaaatccccgacgtgcctggattttcgtgggtgaccccatgtatctccgcaaaggacattgtgtacatcggtctgcgcgatgtggatccaggcgaacactacatactgaaaactctgggcatcaaatacttctctatgactgaagtggatcggctgggaatcggaaaggtgatggaagaaactctctcctaccttcttggacgtaagaagcggcccatacatctgtcattcgacgtcgacggtcttgatccttcatttactccggcaaccggtactcctgtggtgggcggattgacctaccgcgaaggactgtacattactgaagaaatctacaagacgggccttctgagcggattggatatcatggaggtgaacccttcgcttggcaagactcctgaagaggtgacccgcaccgtcaatacggcagtcgcaatcacgctggcatgcttcgggctggcacgtgaggggaatcataaaccaattgactaccttaatccacccaag

SEQ ID NO: 6737 - DNA, 966 bp, synthetic construct
  misc_feature 1..966: note = source = /note="Description of Artificial Sequence: Synthetic coding sequence"
  source 1..966: mol_type = other DNA
atgtcagcaaagagcagaactatcggaataatcggtgccccattctcgaagggacaacctcgaggaggggtggaggaaggtccgaccgtgctgcgcaaggcagggcttctcgaaaagctgaaagaacaggaatgtgacgtcaaagattacggagatctgcctttcgccgatatccctaacgactccccatttcaaatcgttaagaaccctcgttcggtcgggaaggcttccgaacagcttgctggtaaggttgcggaggtgaaaaagaacggtcgtatttccttggtgctgggtggagatcatagcttggcaatcggctcgatttctggacatgcacgagtccatccagatctgggagtcatttgggtggacgcgcacactgacattaacacccccctcactaccacttccggcaaccttcatggtcaaccagtgtccttcctgcttaaggagttgaagggaaagataccagatgtccctggattttcgtgggtcactccctgtatttccgcaaaggatatcgtctatattggactgagagacgtggatccaggagagcactacattcttaagaccctgggtattaagtactttagcatgaccgaggtcgatcgccttggaattggaaaggtgatggaagaaactttgtcctacctgctgggcaggaagaagcgaccgattcacctttcctttgatgttgatggcctggatccgagcttcaccccagcaactggaactcccgtggtcggagggctcacttatcgtgaaggactttacataacggaggagatatacaaaaccggccttctctctggtctggacattatggaggttaatccctcgctcggcaagacgcccgaagaagtcaccagaaccgtgaacaccgcagtggcaatcactcttgcctgctttgggcttgcacgggagggtaatcacaaaccaatcgattacctgaatcctccaaaa

SEQ ID NO: 6738 - DNA, 1392 bp, synthetic construct
  misc_feature 1..1392: note = source = /note="Description of Artificial Sequence: Synthetic coding sequence"
  source 1..1392: mol_type = other DNA
atggcttcggaatcagggaagctgtggggcgggagattcgtgggcgcagtcgaccctattatggagaagtttaacgcatccatcgcttatgatcgccatctgtgggaagtggacgtgcaaggttctaaggcctacagccgaggcctggagaaggcaggtctgctgaccaaggcagaaatggaccagatactgcatggtttagataaggtggcagaggagtgggcacagggaacttttaagcttaattccaacgatgaggacatccataccgcaaatgaacgtcgcctgaaggagctaatcggagctacagccggcaaattgcacacaggacggtctcgcaatgaccaagtcgtgacggacctgcggttatggatgaggcagacttgctctacgctcagcgggctattgtgggagctcatccggacaatggtcgaccgcgccgaggccgaaagggacgtgctttttcccgggtacacacacctgcagcgtgcacagcccattcgttggtcgcattggatcttgtctcacgctgttgcattgacgcgcgacagtgaaaggctgctggaagtgaggaagcgcataaatgtgctgccgctcggttctggtgcaatagcaggtaacccacttggagtggatagggagctactaagggctgagctgaatttcggggcaattacccttaattccatggacgctacaagcgagcgagattttgtggctgagttcctcttctgggcctcactgtgcatgacccatctgagtcgaatggccgaggaccttattctctattgtacaaaggagtttagctttgtacagctgtcggatgcatatagcacgggcagcagcctgatgccgcagaaaaaaaaccctgattcattagaattgatacgcagcaaagcaggccgcgtcttcgggaggtgtgcgggcctgttaatgaccctgaaaggcctcccctctacatacaacaaggatctgcaggaagataaagaggccgtgtttgaagttagcgatacaatgagcgctgtcctgcaagtggctactggagtgatcagcaccctgcagatccaccaggagaatatgggccaggcactgtccccagacatgctggctactgacctcgcgtactacctcgtgcgcaagggcatgccttttcggcaggctcacgaagcctcagggaaagcggtgttcatggctgagacgaagggagttgccttaaatcagctgtctttgcaggaattgcagacaatctctcccctctttagcggagatgttatctgcgtgtgggattatggccattctgtcgagcagtatggcgccctgggaggcacagcgcggtcctcagtagactggcagattcggcaggtgagagcgctcctccaggcccagcaggcc

SEQ ID NO: 6739 - DNA, 1392 bp, synthetic construct
  misc_feature 1..1392: note = source = /note="Description of Artificial Sequence: Synthetic coding sequence"
  source 1..1392: mol_type = other DNA
atggcatcggaatcgggtaagctgtggggtggccgctttgtcggcgccgtggatcctatcatggaaaagtttaacgcatcaattgcctacgatcgtcatctttgggaagtggatgtccaagggtctaaggcatactcacgggggcttgaaaaggcaggacttctgaccaaggcagaaatggaccaaatcctccacggccttgacaaagtggcagaagaatgggctcagggtactttcaaactgaactccaacgatgaggatatccataccgccaatgaaaggagactcaaggagctgatcggggcgactgccggtaagctgcataccggaaggtcgcgcaacgatcaagtggtcaccgacctgcggctctggatgcgtcaaacctgcagcacgctgtcaggtctgctgtgggaactgattcgcacgatggtggacagagcggaggccgagagagacgtgttgttcccaggatacactcatctgcagagagcacaaccaataagatggagccattggattcttagccacgccgtcgctcttaccagggactccgagaggcttctggaggtgagaaagagaattaacgtgctgccactgggctccggagcaattgccgggaaccctctgggcgtggacagggaattgctgcgggcagaactgaacttcggtgcgattacgctcaactcgatggatgccacctcggaaagggattttgtggcagaatttctcttctgggcctccctgtgtatgactcacctctccaggatggcagaggatctgattctgtactgtactaaggagtttagctttgtgcaactttctgacgcatactcgaccggaagctcactcatgccacagaaaaagaacccagattccctggagctcattcgctcgaaggcagggagagtgttcggccggtgcgccggtctgctcatgacccttaaagggctcccatccacttacaacaaagatctccaggaggataaggaagcagtgttcgaagtgagcgatacgatgtcggcagtcctgcaagtggcaactggcgtgatctcgaccctgcaaattcatcaagaaaacatgggtcaagctctctcccctgacatgctggctaccgatctggcatactaccttgtgagaaaagggatgccctttcgccaggcccacgaagcgtccggaaaggcggtgttcatggcagaaaccaagggagtggcactcaatcaactgtcacttcaggaactgcaaacgatatctcccctgttctcgggtgacgttatttgtgtgtgggattacggacattccgtcgagcagtacggcgcacttggtggcaccgcacggtcctccgtggactggcagattcgccaggtacgcgcacttcttcaagctcagcaggca

SEQ ID NO: 6740 - DNA, 1392 bp, synthetic construct
  misc_feature 1..1392: note = source = /note="Description of Artificial Sequence: Synthetic coding sequence"
  source 1..1392: mol_type = other DNA
atggcctcagaatccggaaagctgtggggaggaagatttgtgggagctgtcgacccaatcatggaaaagttcaacgccagcatcgcatacgaccgacacctgtgggaagtggatgtgcaggggtctaaagcctactctcggggactggagaaagcgggactgctgaccaaggctgagatggaccaaatcctccatggattggataaggtcgcggaagaatgggcccagggcactttcaagctgaactcgaacgacgaggacatacatacggcaaatgagcgccgcctgaaggagctcatcggagccaccgccggaaaactccatacgggacggtccaggaatgaccaagtggtgactgatctgagactgtggatgcggcagacttgctcgacgctcagcggcctcctctgggaattgatcagaactatggtggaccgcgctgaggctgagcgggacgtgctgtttcctggatatacccacctccagagagcacagccgataaggtggagccactggatcttgtcacacgcggtggcgctcacgagggattccgaacggctccttgaggtccgcaagagaatcaatgtgctccccctcggatcgggagccatcgcggggaacccacttggagtggaccgtgaactgctgcgcgcggaactcaatttcggggccatcaccctgaactcaatggatgccacctcggaacgggactttgtcgcggaattcctcttctgggcctcgctctgcatgacccacctgagtcggatggccgaggatctgatcctctactgcactaaggagttcagcttcgtgcagctgagcgatgcttactcgaccggaagctcgttgatgccacaaaagaaaaacccggactcactggagctcatcaggagcaaggcaggtcgggtgttcgggaggtgtgctggtctgctgatgaccctgaagggactcccatctacttacaacaaggatttgcaggaggacaaggaagctgtctttgaagtcagcgacacgatgtccgctgtcctccaagtcgccaccggcgtcatttccaccttgcagatccatcaagagaacatgggacaggcgctgtccccggacatgctggctactgacctggcttattaccttgtgcgaaaaggcatgccgttccggcaagcacatgaggcttcaggaaaggccgtgttcatggccgagactaaaggtgtcgccctgaatcaactgtcactgcaggaattgcaaactatcagcccgctcttcagcggggacgtgatctgtgtgtgggactacgggcacagcgtcgaacagtacggtgccctcggcgggaccgcacgatccagcgtggattggcagatcaggcaagttcgggcactgcttcaggctcagcaggca

SEQ ID NO: 6741 - DNA, 1392 bp, synthetic construct
  misc_feature 1..1392: note = source = /note="Description of Artificial Sequence: Synthetic coding sequence"
  source 1..1392: mol_type = other DNA
atggcctctgagtccggaaaactatggggcggaagattcgttggggctgtcgatccaattatggagaaattcaacgcttccatcgcttacgatcgacacctctgggaagtggacgtgcagggtagcaaagcctattctagaggacttgagaaggccggtctgctgaccaaagcagaaatggatcagattctccacggcttggacaaggtggctgaagagtgggctcagggtacctttaaacttaatagcaacgacgaggacatacatacagctaacgaacgacggctcaaggagttgataggggcaaccgccgggaagttgcacacagggcgctctcgaaacgatcaggtggtcacagatcttcggctgtggatgaggcagacatgctctacattaagtgggctcctttgggagttaattcgtactatggtggacagagccgaggccgagagggatgtcctgttccccgggtacactcatctgcaacgggctcagccgattcggtggtctcattggatactgtcacacgctgtcgccttaactcgtgattccgaacgacttctggaagtcaggaaaagaatcaatgttctgcctttgggttcgggtgcaattgccgggaatcccttaggggtagatagggagcttctgagggcagagctcaacttcggcgccataactctcaactcgatggatgcgacctctgaacgcgatttcgtcgccgaattcctcttctgggcgtctctgtgcatgacccatttgtcacggatggctgaagatcttatactgtactgcactaaagaattcagctttgtccagttgtctgatgcttatagcaccgggagtagcctgatgccccagaagaagaaccctgattccctggaactgatccgctccaaagccggcagagtatttggtagatgcgctggtttactcatgacacttaaaggccttccgtccacatataataaggacctgcaggaagacaaagaagccgtctttgaagtcagcgacacaatgagcgccgtgctccaagtggctacaggggtgatttccactttgcagatccatcaggagaacatgggtcaagctttgagtcctgatatgctggcaactgatctggcctattatctagtaaggaaaggcatgccattcaggcaggctcatgaggcatctggcaaggctgttttcatggccgaaactaaaggcgtcgccctgaatcagctctcactgcaggagttacaaacgatcagtcctttgttttctggggacgttatatgtgtctgggattatggccactccgtcgagcagtacggggctttggggggtaccgcgagatcatcagtcgactggcagattcgtcaggtccgagctctgctgcaggctcagcaggcc

SEQ ID NO: 6742 - DNA, 1392 bp, synthetic construct
  misc_feature 1..1392: note = source = /note="Description of Artificial Sequence: Synthetic coding sequence"
  source 1..1392: mol_type = other DNA
atggcctcagagtccggcaagctctggggtggccgctttgtgggcgccgtggatcctataatggagaagttcaacgctagcatcgcctacgaccgccacttgtgggaggttgacgttcagggttccaaggcctacagccgcggtctcgagaaggcaggtctgttgaccaaggccgagatggatcagatcctccacggacttgataaggtcgctgaggagtgggcgcagggaacattcaagctcaatagcaacgacgaagacatacataccgcgaacgaacgccgcttgaaagaactgatcggtgctactgccggcaagcttcatacaggtagatcacgcaacgatcaagtggtaaccgatctgaggctgtggatgcgccagacctgttccaccctgagtggattgctgtgggaactcattaggaccatggtagaccgcgccgaagcggagagggatgtcctgtttcctggttacacacacttgcaacgcgctcagcccatcaggtggtcccattggatcttgtcccatgccgtggccctcacacgcgatagcgaaagactgttggaggttagaaaaaggatcaatgtgctcccacttggcagcggagctatcgctggcaaccccctgggcgtagatagagagctgctgagagccgaactcaattttggcgctataacactcaattcaatggacgctacttccgagagggattttgtggcagagttcttgttttgggccagcttgtgcatgacacacctttcccgcatggctgaggacctcattctgtattgcactaaggagttcagtttcgtccaattgtcagacgcttattcaacgggctctagcctgatgccgcaaaaaaaaaaccctgacagtctggagctcatcaggagcaaggcgggcagagtgttcggaaggtgtgctggtctgctcatgaccttgaagggactgccaagcacctacaacaaagacttgcaggaagacaaggaagccgtgttcgaagtctctgacacaatgtcagccgtgctgcaggtcgcaacaggtgtcatcagcacgttgcaaatccatcaggagaacatgggtcaggcattgtcccctgacatgctggccacagacttggcctattacctggttagaaagggcatgccattcagacaagcccatgaagcctcaggtaaggccgttttcatggctgaaacaaagggcgttgccctgaaccaactgtcactgcaggaacttcaaacaatctctcccctcttctccggagatgttatctgtgtctgggactacggtcactctgtagaacagtacggcgctctcggtggcaccgcgcgcagttcagtggattggcagatccgccaggttagggctttgctgcaggcacaacaagct

SEQ ID NO: 6743 - DNA, 1392 bp, synthetic construct
  misc_feature 1..1392: note = source = /note="Description of Artificial Sequence: Synthetic coding sequence"
  source 1..1392: mol_type = other DNA
atggcatcagaaagtggtaagctctggggaggacggtttgtgggcgccgtcgatccgatcatggagaagttcaacgcctccatcgcttacgacagacacctctgggaagtggacgtgcagggatccaaggcgtatagccgcggacttgaaaaagctggcttgctgacgaaggccgaaatggaccagatccttcacggcctggacaaggtggccgaagagtgggcacaaggaactttcaaattgaactcgaacgatgaggacatccataccgcgaacgaacgccgcctcaaagaactcatcggggcaaccgcaggtaagctccataccggccggtcgagaaatgatcaggtggtcactgacctccggctgtggatgcggcagacctgctcgactctcagcggcctgctttgggaattgatccgcaccatggtggacagggcagaggcagagcgggatgtgctgttcccagggtacacccacctgcaacgagcccagcctatccggtggagccactggatcctgtcgcacgccgtcgcattgacgcgcgattccgaacggctgctcgaagtccgaaaaagaatcaatgtgctcccactgggctccggagcgatagcaggaaacccccttggcgtggatcgcgaactcctgagagccgagctcaacttcggtgccattacgctcaactcaatggacgccaccagcgagagagacttcgtggctgaatttctgttctgggcctcactgtgcatgacccatctctcgcggatggctgaagatctcatcctctactgcaccaaagaattttcctttgtccaattgtctgatgcctacagcaccggctcatccctgatgcctcaaaagaagaatccagactcgttggagctcattcgttccaaggctggacgcgtattcggtcgctgtgcaggactcctgatgactctgaaaggactgccttctacctataacaaagacctgcaggaggataaggaagcggtgttcgaagtctcagacactatgtcggcagtgctccaggtggctacgggagtgatctcgactcttcagatccaccaggagaatatgggccaggccttgtcgcctgacatgctcgccactgacctggcatactaccttgtccggaagggaatgccgttccgccaggcacatgaagccagcggtaaagcggtgttcatggccgaaactaagggagtggcacttaaccagctcagcctccaggagctgcagactatctcgccgctttttagcggtgacgtgatttgtgtgtgggactacgggcattcagtggaacagtacggtgccctgggaggcaccgctagatcgtcggtggactggcagatccggcaagtgcgcgctctcctgcaagcgcagcaggcc

SEQ ID NO: 6744 - DNA, 1392 bp, synthetic construct
  misc_feature 1..1392: note = source = /note="Description of Artificial Sequence: Synthetic coding sequence"
  source 1..1392: mol_type = other DNA
atggcttcggagtcgggaaaactgtggggaggtcggttcgtcggagcagtggatccgatcatggagaagttcaacgcttccatcgcgtacgaccggcacctgtgggaggtggacgtgcagggatctaaggcctactcgcgcggcctggaaaaagcaggcctcttgactaaagctgaaatggatcagatcctgcatggactggacaaagtggctgaggagtgggcacaaggcactttcaagttgaattccaatgacgaggatatccatacggccaacgaacggcgtcttaaagaactgattggagccaccgcaggcaagttgcacacgggccgctctcgcaacgaccaggttgttacggatctgagattgtggatgaggcagacctgttcaacgctctccggactgctctgggagctcattcgtaccatggtggatagggctgaagcggaacgcgatgtgctgttccctggatacactcacttgcagcgcgcgcaaccaatccgctggtcgcattggatcctctcacatgcggtggcactgactcgcgactcagagagactgctggaagtcaggaagaggattaatgtactgccgctcggatccggggcaattgcgggcaacccgctgggtgtcgacagagaactgctgcgcgccgagctgaattttggagcgatcacgctcaactccatggatgctacttcggaacgggattttgtcgccgaattcctgttttgggccagcctgtgcatgactcatctgagcagaatggcagaggacctgatcctttattgcaccaaagagttctcgttcgtgcaactctcggacgcttacagcactggctcctcactcatgccgcagaaaaagaaccccgactcactggaactcataaggtcgaaggcgggccgggtgttcggtagatgcgcgggactgctgatgactctgaagggccttccatccacctacaataaagacctgcaagaagataaggaggcagtattcgaagtcagcgacaccatgagcgcggtgctgcaagtggccaccggggtcatctccactctgcagatccatcaggaaaacatgggacaggccctgtcccccgacatgctcgccacggatctggcgtactaccttgtgcgcaagggcatgccattcaggcaggcgcacgaggccagcggaaaggccgtctttatggccgagactaagggggtggctttgaatcagctgtccctccaagaattgcaaactatctccccactgttcagtggtgatgtgatttgtgtctgggattacggacactcggtcgagcaatacggagcactgggagggaccgcccgatcctccgtggactggcagatccgccaggtgcgcgctttgctgcaggcgcaacaggcc

SEQ ID NO: 6745 - DNA, 1392 bp, synthetic construct
  misc_feature 1..1392: note = source = /note="Description of Artificial Sequence: Synthetic coding sequence"
  source 1..1392: mol_type = other DNA
atggcatcagagtcaggcaagctgtggggggggcgattcgtgggcgccgtggatcctatcatggagaagttcaacgcttccatcgcttacgacaggcatttgtgggaggtggacgtacagggatccaaagcctactcaagaggcttagaaaaggccggtctcctgaccaaggccgagatggatcagatactccacggtctcgacaaggttgccgaggagtgggctcagggaacatttaagctgaatagcaatgacgaggatatacacacagccaatgaaagacggctgaaagagctgatcggtgccacagccggcaaacttcataccgggagaagtagaaacgatcaggtggttacggatctgaggttatggatgagacaaacctgtagcactttatctggcttactctgggaattgattaggaccatggtggaccgtgctgaggcagagcgtgacgttctgttcccaggctatactcacttacagagagcacagccgatccggtggagtcattggatcctgtcccacgccgtcgccctcaccagggattcagagcgactgcttgaagttagaaaacggatcaacgttctcccgttgggaagcggtgctatagccggcaatccacttggagttgaccgggaactgttgcgagcagagcttaacttcggggcgattaccctcaactccatggacgccacttctgagagggacttcgtggccgaattcctgttttgggccagcctgtgtatgactcatctctcacggatggctgaggacttgatattgtattgcaccaaagaatttagttttgtacagctgagcgatgcctattccacaggcagctctctaatgccacagaaaaagaacccagacagtctggagctcatccgcagtaaagctggtcgcgtgttcggcaggtgcgcgggtctgcttatgacccttaagggccttccttcgacatacaacaaggacctgcaagaagataaagaggcagtattcgaggtgagcgacacgatgagtgccgtgctgcaggtcgccaccggtgtgatctcgacgttgcaaatccaccaggaaaacatggggcaggcactgagccctgatatgttagccactgatctggcttactatctggtgagaaagggtatgcctttccgccaggcccacgaggcttctgggaaagccgtgttcatggccgagaccaagggggtggcgctaaatcaactgtctctgcaggagttgcagacaatcagcccccttttcagtggggatgtgatatgtgtttgggactatgggcacagcgtggaacagtacggcgcccttggggggacagctagatcttctgttgattggcagatccgccaggtgagggcactgctgcaggcccagcaggct

SEQ ID NO: 6746 - DNA, 1392 bp, synthetic construct
  misc_feature 1..1392: note = source = /note="Description of Artificial Sequence: Synthetic coding sequence"
  source 1..1392: mol_type = other DNA
atggcgagcgagtcaggcaaactttgggggggtcgattcgtcggagccgtggatcccatcatggagaaattcaacgccagtattgcatatgaccggcacctgtgggaggtcgacgtgcaaggaagcaaggcttatagtaggggcctcgagaaagctggactcctgacaaaggctgaaatggaccagatccttcacggcctggacaaggtggccgaggaatgggcgcagggtacgtttaagctcaacagtaacgatgaggatatccatactgccaacgaacggcgtttaaaggaactgatcggagcgactgccggcaagctgcacacaggacgttctagaaacgatcaagtcgtgaccgacttacgtttgtggatgaggcaaacctgctcgaccttgagtggacttctctgggaactcataagaaccatggtcgaccgcgcagaggctgagcgcgatgtgttgttccccggatatacacatctgcagcgggctcagccgatcagatggagccactggatcctgtcgcatgccgtggcccttactagagattctgaaagattgctggaggtccgaaagcgcatcaacgtcctgccgctcgggtcaggggccatagccggaaacccactgggagtagacagggaattacttcgcgctgagctgaacttcggtgccatcactctcaactccatggatgccacttctgagcgggatttcgttgctgaattcttattttgggcttctctgtgcatgacacatctctcccgtatggccgaggacttgatcttgtactgtacaaaggagttttcctttgtccagctgagcgacgcctactccacggggtcttccctgatgccacaaaagaaaaaccccgacagtcttgaattgataagaagtaaggcaggcagggtgtttgggagatgcgcggggctgctgatgacgctgaagggactccctagtacatacaataaagatctccaggaagacaaagaagccgtatttgaagtgagcgacactatgtccgccgtgttgcaggtcgcaacaggcgtaatctccacactccagatccaccaggagaacatgggccaagctctgtcaccagacatgcttgccacagacttggcatattacctggtccgaaaaggcatgccctttcgacaggcacacgaggcaagcggcaaagccgtgtttatggcagagacaaagggggtggctctgaatcagctctcacttcaggagctgcagaccataagtccgctcttctctggggacgtcatttgcgtgtgggattacggacattcggtggagcagtatggggcgctgggcggcacggcgagatctagcgtggattggcagatccggcaggttcgggcgctgctacaggctcagcaggca

SEQ ID NO: 6747 - DNA, 1392 bp, synthetic construct
  misc_feature 1..1392: note = source = /note="Description of Artificial Sequence: Synthetic coding sequence"
  source 1..1392: mol_type = other DNA
atggcttctgagtccggcaaactgtggggcggccgtttcgtcggcgctgtggacccgatcatggagaagttcaatgccagcattgcttatgatagacatctgtgggaagtcgatgttcagggttccaaggcttatagtcgtggtctggagaaagcgggacttctcaccaaggctgagatggatcagatcctccacgggttagacaaggtggctgaagaatgggctcagggtacattcaagctcaactctaacgacgaagatatacatactgccaacgagcgacggttgaaggagctgatcggagccacagctggcaagctgcatactggtagatctaggaacgatcaagtggtgacagacctgaggttgtggatgcgccagacctgctctaccttatcaggacttctctgggagttgatacgcacaatggtggatcgggcggaagccgagcgggatgtcttgtttcccgggtatacgcacctgcagagagcgcaaccgatccgatggtcccattggatactgagccacgctgttgcactcacacgggattccgagcggctactggaagtgaggaagaggattaacgtcttaccgctgggctcaggcgcaatcgcaggaaatccactgggcgtcgacagggaactcctgagggccgagctgaatttcggagccataactctgaactccatggatgccacaagtgaacgagactttgtcgcagagttcctgttctgggcttcactttgtatgactcatttgtctcgaatggccgaggatctcattctttattgcacaaaggagtttagcttcgttcagctgagtgacgcctactccacgggttcatcactgatgccccagaagaaaaaccccgatagcctggagctcatccggagtaaggccggacgcgtctttggtagatgcgccgggctactgatgacattgaagggcctcccatcgacctataacaaggacttacaggaggataaagaggccgttttcgaggtgagcgataccatgtccgccgtcctgcaagtggctacaggcgtcatatctacgctccaaatccaccaggagaatatggggcaagctctgtcgccggatatgcttgcaactgacctggcctactaccttgtccgaaaagggatgccattcaggcaggcccacgaggcatccggcaaggctgtctttatggcagagacaaagggggtggccctcaaccagttgtcattgcaggagctgcagacaatatctccattgttcagcggcgatgtcatttgcgtttgggattatggccattctgtcgaacaatacggtgccttgggagggacagctcggtcttcagtcgactggcaaatccgccaggtgcgagcactcctgcaggcccagcaggct

SEQ ID NO: 6748 - DNA, 1392 bp, synthetic construct
  misc_feature 1..1392: note = source = /note="Description of Artificial Sequence: Synthetic coding sequence"
  source 1..1392: mol_type = other DNA
atggcatcggaatcaggaaagttgtggggcggacggtttgtgggtgcagtggaccccatcatggagaagtttaatgcttccattgcatatgatcgtcatctttgggaagtcgatgtccagggaagcaaggcatattcgcggggactcgaaaaagctgggctgctcaccaaggccgaaatggaccaaatcctgcatgggctcgacaaggtggccgaagaatgggcccaaggtactttcaaacttaacagcaacgatgaagatattcataccgcgaacgaaagacggcttaaagaacttatcggagcgaccgcgggaaagttgcacacgggaagatcaaggaatgaccaagttgtcaccgatcttcggctttggatgagacagacctgcagcactctgtcggggctgctttgggagcttattcgtactatggtcgatagagccgaggcagaaagagacgtgctgttccccggttacactcatctccaacgggcgcagcctattagatggtcccactggatcctgtcccatgcagtcgcactgacgcgggattcagaaaggcttcttgaagtgcggaagcggatcaatgtgcttcccctcggatcaggggcaattgccggaaacccgctcggagtggacagggagctccttcgggcagaacttaactttggggcaattacccttaacagcatggatgcaactagcgagagggattttgtggcggaatttctgttttgggcatctttgtgcatgacgcatctttcgagaatggcagaagatctgatactgtactgtactaaggaattctcgttcgtgcagctgagcgatgcatacagcactggctcatcgttgatgccgcagaagaaaaatcctgattcactcgagctgattcgatcgaaggcaggtagggtttttggccgatgcgcagggcttctgatgactctcaaaggactcccatccacctacaataaggatctccaagaagataaggaggcagtgtttgaagtctccgacaccatgtctgcggttcttcaagtggcaaccggggtcatttccactctgcaaatccatcaagaaaacatgggtcaggcattgtcgccagacatgctggctactgacctcgcatactacctcgtgcgaaagggtatgccattcagacaagcacacgaagcatcaggaaaagctgtgttcatggctgagactaagggagtcgccctcaaccaactctcgttgcaggagttgcaaaccatttcacccttgtttagcggagatgtgatctgtgtgtgggactacggtcactccgtggaacaatacggtgcactgggaggtaccgcgcgttcgtccgtggattggcaaatccgccaagtgcgcgcgcttctgcaagcacagcaggcg

SEQ ID NO: 6749 - DNA, 1392 bp, synthetic construct
  misc_feature 1..1392: note = source = /note="Description of Artificial Sequence: Synthetic coding sequence"
  source 1..1392: mol_type = other DNA
atggcgtcggaatcgggaaaactttggggaggacgctttgtgggggcagtcgatccgatcatggaaaagtttaacgcttcaatcgcttacgaccggcacctctgggaggtggatgtgcaaggatccaaggcgtactcgcgcggtctggagaaggcggggctcctgactaaagcagagatggatcaaatcctgcacggtttggacaaggtcgcggaggaatgggcgcagggaactttcaagctcaacagcaatgacgaggacatccacacggcgaacgaacggaggctcaaggaactgatcggagccaccgccggaaagctccataccgggcgctcccgcaacgaccaggtggtgactgacctgcgcctctggatgcggcagacttgcagcaccctctccgggctcctgtgggaattgatccgcaccatggttgacagagccgaggccgagagggacgtgctgtttccgggatatacccacctccagcgagcgcaacctatccgctggtcacattggatcctcagccacgccgtcgccctgaccagagacagcgagcggctgttggaggtgaggaaacgcatcaacgtgttgccgctcgggagcggagcaatcgccggaaatccactgggagtggacagagaactcctccgcgccgaactgaatttcggcgccatcaccctcaactccatggatgcgacctccgaacgggattttgtcgccgagttcctgttctgggcctccctgtgcatgacccatttgtcgcggatggccgaggacctgatcctgtactgcactaaagagttttcgttcgtgcagctctcggatgcatactccaccggatcctccctgatgccgcagaagaaaaatccggattcgctggaactcattcgctctaaagccggcagggtgttcgggcggtgtgcaggactgcttatgactctgaagggcttgccgtccacctacaacaaagacctccaggaagataaggaagccgttttcgaggtcagcgataccatgtcggccgttctgcaggtcgcaacgggggtgatctccactctccagatccaccaggaaaacatgggacaggccttgagccctgacatgctggccaccgacctcgcctactacttggtccggaaaggcatgcccttccgccaggcccacgaggcctccggaaaagccgtgttcatggcggaaaccaagggggtggctcttaatcagctctctcttcaggagctgcaaaccatctcccccctgttctcgggagacgtgatctgcgtgtgggactacggccacagcgtcgagcagtacggggccctcggaggcaccgcaagaagctccgtcgattggcagatcagacaagtgagagccctgcttcaggcacaacaagca

SEQ ID NO: 6750 - DNA, 1392 bp, synthetic construct
  misc_feature 1..1392: note = source = /note="Description of Artificial Sequence: Synthetic coding sequence"
  source 1..1392: mol_type = other DNA
atggcctctgagagcgggaagctttggggcggtcgctttgtcggggcagttgatcccatcatggagaagtttaacgcatctatcgcttacgatcgccacctgtgggaggtggatgtccaggggagcaaagcgtattcaagagggctggaaaaagcgggccttctcactaaagctgaaatggaccaaatcctccatggtctcgacaaagtggcagaggagtgggcacaagggaccttcaaactgaacagtaacgacgaggatatccataccgcaaatgagcggaggcttaaggaactaatcggagccaccgctgggaagctgcatacaggtcggtctaggaacgatcaggtcgtgactgacctaagactgtggatgagacagacctgttcaaccctgtctgggctgctttgggagctgatacgcacaatggtggatagagctgaggccgagcgagacgtgttattccccggatatacccacctgcaaagagctcagcccatccgctggtcacattggatcttgagtcacgccgtggcattgaccagggacagcgaacggctgctcgaagtacggaaaagaatcaacgtcctcccgctcgggagcggtgccattgccggcaaccctctcggcgttgaccgggagctcctccgcgcggagttgaattttggtgcaattactttgaattccatggatgccactagtgagagagacttcgtagcagaattcttattttgggcatcgctatgcatgacccacttgtcccggatggctgaagatctgattctgtactgcacgaaggaattctcctttgtacagctgtctgatgcctactcgactgggtcaagcctgatgccccagaagaagaatccagactcactggagctcattcggagtaaagctggtcgggtcttcgggaggtgcgccggtttgctcatgacacttaaggggctgccttctacctacaacaaagatctgcaggaggacaaagaagccgttttcgaggtttctgataccatgagcgctgtgctgcaggtagcaaccggtgtcatatccaccctccaaatccaccaggaaaacatgggccaagctttgtcaccagacatgttggctaccgaccttgcctactatctcgtgaggaaggggatgccattcaggcaggcacacgaagcgtccgggaaggcagtgtttatggctgagacaaaaggggtcgctctgaaccaactaagcctgcaggaacttcaaacaatctctccgcttttttcaggggacgtgatctgtgtgtgggattatggacacagcgtggagcagtacggagcgttgggaggcacagctaggtcctccgttgattggcaaatccgacaggttcgggccctgctccaagctcaacaggct

SEQ ID NO: 6751 - DNA, 1392 bp, synthetic construct
  misc_feature 1..1392: note = source = /note="Description of Artificial Sequence: Synthetic coding sequence"
  source 1..1392: mol_type = other DNA
atggcgtctgagtcaggaaaactttggggaggccggtttgtgggagcggtggaccccatcatggagaagtttaacgcgtcgatcgcttatgatcgccatctctgggaagtggacgttcaaggatcgaaggcctactcacgcggactggagaaggcaggactgctgaccaaagcggagatggatcagatcctgcacggactcgataaggtggccgaagaatgggcacagggcactttcaagctcaatagcaatgacgaggacatccacactgctaacgagagacgcctcaaggaactgatcggagcgactgcaggaaagttgcacaccggacgctcacggaacgaccaggtggtgaccgacctgaggctgtggatgcgccagacttgctccaccctgtcaggactgctctgggagttgatcagaacgatggtggaccgagctgaggcagaacgggatgtgctgttcccggggtacacccacctgcaacgcgctcaacctatccgctggtcgcactggatcctgtcccatgccgtcgcactgaccagggactccgagcgcctcctcgaggtgcggaaacggatcaacgtgctgccgctgggaagcggcgccatcgccggaaatccgttgggagtggaccgggagctgctccgcgcagagctgaacttcggcgcgattacgctcaattcgatggatgccacctcagagagggattttgtcgcggagttcctcttctgggcgagcctgtgcatgacgcacctgtcgcggatggcggaagatcttatcctttactgcaccaaggaattctcgttcgtgcagctgtcagacgcgtacagcactggaagctccctgatgccgcagaagaagaacccggactcgctggaactcatccggtcgaaggcgggacgggtgttcggccgctgtgccggacttcttatgaccctgaaaggtctgccaagcacctacaacaaggacctgcaggaggacaaggaggccgtgttcgaggtgtcggatactatgtcggccgtgctccaagtggccaccggagtgatctcgacgttgcagatccatcaggaaaacatgggacaggcactgagcccagacatgctcgcgactgatttggcctactacctggtgcgcaagggcatgccgttccgccaggcccacgaagcgtcgggtaaagcggtgttcatggcagaaaccaaaggagtggccctgaaccagctgtcgctgcaagagctccagactatcagccctctcttcagcggcgacgtgatctgtgtgtgggattacggccactcggtcgaacaatacggcgcactgggagggactgcccggtcgtctgtcgattggcaaatccgccaggtaagagctctgctccaagcccagcaggcg

SEQ ID NO: 6752 - DNA, 1392 bp, synthetic construct
  misc_feature 1..1392: note = source = /note="Description of Artificial Sequence: Synthetic coding sequence"
  source 1..1392: mol_type = other DNA
atggccagcgaatccggtaagctctggggtgggaggtttgttggcgcagtcgatcccatcatggagaaattcaacgcatcgattgcatacgatcgacacctttgggaggttgatgtgcagggatcgaaggcctactctcgcggactcgagaaggctggccttcttaccaaggcagagatggaccagatcctccacggccttgataaggtcgccgaagagtgggcccagggaacgttcaagttgaactccaatgatgaagatatccatactgctaacgagaggaggcttaaggaactgattggagctactgcagggaaactgcatactggtaggtcaaggaacgatcaagtcgttaccgatctcaggctttggatgaggcaaacctgtagcaccctttcgggtttgctctgggaacttatacgaactatggtggatcgtgccgaagccgaacgagatgtgctgtttccgggttacactcatcttcaacgcgcccagcccatacggtggtcgcactggattctgagccatgccgtggcacttactcgcgattccgagaggcttctggaagtgagaaagagaattaacgtgctgcccctcggatcaggagccattgcgggtaatcctctgggagtggatcgagaattgttgcgcgctgagctgaacttcggcgcaattactctgaactcaatggatgcgaccagcgagcgtgatttcgtcgcagaatttcttttttgggcatctctttgtatgacccatctttcaagaatggccgaagatctgattttgtactgcactaaggaattctcgtttgtgcaactgtccgacgcatattccacggggtcgagcctgatgcctcaaaagaagaatccagatagcctggaactgattcgatccaaggcggggagagtgttcggaagatgtgctggactgctgatgacgctgaagggattgccttccacgtacaacaaggacctccaagaagataaagaggcagtgttcgaagtgtccgacaccatgagcgcagtgctgcaggtggcgaccggcgtgatatcgacccttcagatccaccaggagaatatggggcaagcactgtcacccgacatgcttgcaactgatctcgcgtactacctggtgagaaagggcatgccatttagacaagcacacgaggcatcaggtaaagcagtctttatggcagaaaccaaaggtgtggccctgaatcagctttcgctgcaggaactccaaaccatttcgccacttttctccggtgatgtgatttgtgtgtgggattacgggcatagcgtggaacagtacggagcactcgggggcaccgccagaagctccgtggactggcagattagacaggtccgcgcactgcttcaagcccagcaggcg

SEQ ID NO: 6753 - DNA, 1392 bp, synthetic construct
  misc_feature 1..1392: note = source = /note="Description of Artificial Sequence: Synthetic coding sequence"
  source 1..1392: mol_type = other DNA
atggcctctgaatctggcaagctctggggaggccgctttgtcggggcggtagacccgattatggaaaagttcaatgctagcatagcttacgatcgccatctatgggaagtggacgtgcaggggtctaaggcctactccaggggccttgagaaggcaggcttactaactaaggccgaaatggatcagatattgcatggtcttgacaaggtcgctgaagagtgggcccagggaacatttaaactgaatagtaatgacgaggatattcataccgccaatgagcgccgtcttaaagagctaatcggagctaccgccggcaagttgcacaccggccgctcgcgaaacgatcaggtagtgacggatctgaggctgtggatgcgacagacgtgctctaccctttctggcctactgtgggaactcatacgaaccatggtggacagagcagaagctgaaagggatgtgctgttcccagggtacacacaccttcagcgtgctcaacccattaggtggtctcactggatcctctctcacgccgtggcactgacccgcgacagtgaaagattgttagaagtccgcaaaagaattaatgtactccccttgggcagtggggctatcgccggcaaccccttgggtgttgatcgggagttgttacgggcagagttgaacttcggagccattacactaaactctatggatgcaacctctgagcgggatttcgtggctgagttcttattctgggcttccctttgtatgactcacctttcacgcatggcggaagacttaatcctgtattgcaccaaggagttcagctttgtgcaattgtctgatgcctactctacaggttcttcactgatgccacaaaagaaaaaccccgattccctcgaattgatccggtccaaagctggcagagtctttggaaggtgtgcaggtctactgatgactctgaaagggttgcctagcacctataacaaggacttgcaagaggacaaggaggcagtcttcgaggtcagtgacaccatgtccgccgttctgcaagtggccacaggagttatctcaactttacagatccaccaagagaatatgggacaggcgctgagcccagatatgctggcgactgacctcgcctactatctagtgcgcaagggaatgccctttaggcaggcccacgaggcctcaggcaaagccgttttcatggctgagaccaagggtgttgcccttaaccagttgtccctccaagagctccagacgatatctcccctttttagcggcgacgtgatttgtgtgtgggactatgggcacagcgtggagcagtacggcgccttgggaggaaccgcccgctcatcagtcgactggcaaattcggcaggtgagagccttgttgcaggcccaacaggcg

SEQ ID NO: 6754 - DNA, 1392 bp, synthetic construct
  misc_feature 1..1392: note = source = /note="Description of Artificial Sequence: Synthetic coding sequence"
  source 1..1392: mol_type = other DNA
atggcatcggagagcggaaaactctggggtggacgctttgtcggggccgtggatccaattatggaaaagttcaatgcctcgatcgcgtacgacaggcacctctgggaagtggacgttcagggctctaaagcctactcaagaggccttgagaaggcaggacttctcacgaaggctgaaatggaccaaattctgcacggcctggataaggtggccgaagaatgggcacaaggaaccttcaaactgaattcaaatgatgaggatattcacactgcaaacgagcgcaggcttaaagaactgattggagcaaccgctggtaagctccataccggccgcagccgcaacgatcaagtggtgactgatcttcgcctgtggatgaggcaaacgtgttccaccctgtcgggcctgctttgggaacttatccgaactatggtggaccgtgcggaggcagaacgcgacgtcttgttccctggatatacccatttgcagcgtgcacagccaatccgctggagccattggattctttcgcacgcagtggcgctgacgagggattcagaacgcctgctcgaggttagaaagcggattaacgtcctgccactgggttcgggggcaattgcaggaaaccccctgggggtcgaccgcgaactcttgagagcagaacttaactttggtgcaattactctgaattctatggatgcaacctcggagcgagatttcgtggcagaatttcttttttgggcgtcactctgcatgacccacctgagccgcatggcggaagatcttatcctgtattgtaccaaggagttttctttcgtccagcttagcgacgcatactcaaccggatcatcgctcatgcctcagaaaaagaaccctgattcgcttgaactcattagatcgaaggcgggtcgggtctttggaaggtgtgccgggcttttgatgacgcttaagggtctgccgtccacctacaataaggaccttcaggaagataaggaagcagtgttcgaagtgagcgacactatgagtgccgtgttgcaagtcgcaactggcgtgatttctaccctgcagatccatcaggaaaacatgggacaagcactctcgcctgatatgcttgccacggacctggcctactacctcgtccgcaagggaatgcccttcagacaagctcacgaggcctcgggaaaggccgtgttcatggccgaaaccaagggagtggcgctgaaccaactgtcactgcaagagctgcaaactatttccccgcttttttccggtgatgtgatttgcgtctgggactacggacattcggtggaacaatacggggctctgggaggtactgccagatcctctgtcgactggcaaattagacaggtccgagcccttctgcaggcacaacaggca

SEQ ID NO: 6755 - DNA, 1392 bp, synthetic construct
  misc_feature 1..1392: note = source = /note="Description of Artificial Sequence: Synthetic coding sequence"
  source 1..1392: mol_type = other DNA
atggcgtcagagagtggaaaactgtggggaggacgcttcgtcggagccgttgatcctatcatggagaagttcaatgcgtccatcgcctatgatcgccacttgtgggaggtggacgtgcagggatctaaggcgtatagtagggggctggagaaggctggactcctgacaaaggcagagatggatcaaatcctccatggtctggacaaggtggcggaggagtgggcacagggaacgttcaaactgaactctaatgatgaagatatccacacagctaacgagcgacgactgaaagaactcattggggcaacggcagggaagctgcacactggcaggagccggaatgatcaggtcgtgactgacttgcggctgtggatgagacagacgtgcagcacgctgtccggattgctgtgggaactgatccgcacgatggtggaccgcgccgaagcggaacgcgacgtgctgttccccggctacacccacctgcagagggcccaacccatcaggtggtcacattggattttgagtcatgccgtggcactgacacgagactctgaaaggctgctcgaggtgcggaagcgcatcaacgtactgcccctcgggagtggagcaatcgccggaaacccactcggggtggacagggagctgctcagggccgaactgaatttcggggccattaccctgaatagcatggacgccacatcagaaagagacttcgtagctgaatttctcttctgggcctctttgtgcatgactcacctgagtagaatggccgaagatctgattctttattgcacaaaggagttctccttcgtgcaactcagcgacgcttactctacaggcagctcactcatgccacagaaaaagaatcccgatagcctggagctcattcggtcaaaagccggacgcgtattcggcaggtgtgcgggattgctgatgactcttaaaggtcttcctagcacctataacaaggatctgcaagaggataaggaggccgtgttcgaggtgtcagataccatgagtgcagtcctgcaggttgccaccggagttatatccactcttcaaatccaccaggaaaacatggggcaggcacttagccccgatatgctggccaccgatctggcatactatctcgtgcgcaagggcatgccgttcagacaggctcacgaagcttccggtaaggcggtgttcatggccgaaacgaagggagtcgctcttaaccagctgagtctgcaagagctgcagacaattagcccactcttcagcggggatgtcatctgcgtgtgggattacgggcacagcgtggagcaatacggcgcgctcggtgggacggcccgatcaagtgtagactggcagatacggcaggtaagggctttgcttcaggctcagcaggct

SEQ ID NO: 6756 - DNA, 1392 bp, synthetic construct
  misc_feature 1..1392: note = source = /note="Description of Artificial Sequence: Synthetic coding sequence"
  source 1..1392: mol_type = other DNA
atggcttcagagtctggtaaactttggggtggacggtttgtgggcgctgttgaccccattatggagaagttcaacgcgtctattgcatatgataggcatttatgggaggtcgacgtccaggggtctaaagcctattcgaggggtctggagaaagccgggttgctcactaaggcagaaatggatcaaattcttcacgggctggacaaagtcgcagaggaatgggctcagggcacttttaaactcaattctaatgacgaggatatccacaccgccaacgagaggcggttaaaggagctaatcggtgcgaccgctggtaagctgcacacaggccgcagccgaaacgatcaggtggtgacggatctgcgactctggatgagacagacctgctctaccctgtcaggcctgctgtgggaactgattaggaccatggtggatagagctgaggctgaaagagatgttctgttccctggctacactcatctacagagggctcagccgataagatggtcacattggatcctgtcacatgcagttgcactgacgcgcgactcggagaggctactggaagttaggaaacgcatcaatgtcctgccgctaggaagcggtgcaatcgcgggaaatccgctcggcgtggatcgagaactgctcagagctgaactgaacttcggcgcaattacactgaacagcatggacgctacatctgaaagagacttcgtggccgagttcctgttctgggcctctctctgtatgactcaccttagcagaatggccgaagacctcatactatattgcaccaaggagttttcctttgtccaactgtctgacgcctattccactggaagttctctaatgccacagaagaaaaaccctgacagtttggagttgatcaggtcaaaggctggaagagtgttcggtaggtgcgctggcctgcttatgacactgaagggccttcctagtacctacaacaaggaccttcaggaagacaaggaggccgtgttcgaggtgtccgatacaatgtcagccgtactgcaggtggctactggagtgatcagcacgcttcaaatacatcaagaaaacatgggccaggccctcagccccgacatgcttgccaccgatctcgcctactacctggtgagaaagggtatgcctttcaggcaggcgcacgaagccagcggtaaggccgtattcatggccgagactaagggggtggctctcaaccagctcagtctacaagagctgcagaccatatcccctctgttttctggtgacgtgatctgtgtctgggactacggtcattctgtggagcaatatggggcactcggtgggaccgctcgttcttccgttgattggcagatcagacaagtgagggccctgttgcaagcccagcaggct

SEQ ID NO: 6757 - DNA, 1392 bp, synthetic construct
  misc_feature 1..1392: note = source = /note="Description of Artificial Sequence: Synthetic coding sequence"
  source 1..1392: mol_type = other DNA
atggcctcggagtccggaaagctctggggcggacggttcgtgggtgccgtcgacccaatcatggagaagtttaacgcgtccatcgcttacgatcggcacctgtgggaggttgatgttcagggatctaaggcttattcgcgaggactggaaaaggcgggcctgttgaccaaagccgaaatggaccagatcctgcacggcttggataaagtggccgaagaatgggcccaaggaacttttaagctgaactctaatgatgaagatatccatacggccaacgagagacgattgaaggagctcatcggagccactgcgggtaagttgcacactgggcgtagccgcaacgaccaggtggtgactgacctgaggctctggatgcgtcagacttgctcgaccttgagtggactcttgtgggaactcatccgcactatggtggaccgggcagaagccgagagagacgtgctcttccctggatacacgcacctccaaagggcacagccgatccgatggagccactggatactgtcacacgccgtcgcactgaccagggactcggaacgcctcctcgaggtccgcaaacggatcaatgtgctcccgttgggatcgggggctatcgctggaaatccgctcggagtcgatcgggaactgctcagggccgaactgaactttggcgcaattaccctgaacagcatggacgccacttccgagcgcgatttcgtggcagaattcctgttctgggcatctctgtgcatgacccatctgagcaggatggcagaagatctcatcctgtactgcacgaaagagttctcctttgtccagttgtccgacgcctactcgacggggagttccctgatgccacagaagaaaaatccagattcacttgaacttattagatcgaaggctggacgcgtgttcggcaggtgtgccggactcctgatgactctgaagggactgccgtccacctacaacaaggacctgcaagaggacaaggaagccgtgttcgaggtgagcgataccatgtcggcggtcctccaagtcgctaccggagtcatttcgaccctgcaaatccatcaggagaatatgggtcaagcccttagcccggatatgctggctaccgacctcgcatactaccttgtgcggaaggggatgcctttccgccaggcgcatgaggcgtcaggaaaagcggtgttcatggcagaaaccaagggcgtggcactgaaccagctctcgctgcaagagctgcagaccatttcaccccttttctccggagacgtaatctgcgtgtgggactacggtcattcagtagagcagtacggcgcgctgggtggcactgcacgctcatcagtggactggcagatccggcaagtccgcgcccttttgcaggcgcagcaagcc

SEQ ID NO: 6758 - DNA, 1392 bp, synthetic construct
  misc_feature 1..1392: note = source = /note="Description of Artificial Sequence: Synthetic coding sequence"
  source 1..1392: mol_type = other DNA
atggcctcggagtccggaaagctgtggggcggacggttcgtcggagcagtcgacccgattatggaaaagttcaacgcctcgatcgcatacgatcgccatctgtgggaagtggacgtgcaaggctcgaaggcttactcccggggactggagaaggcagggctcctcaccaaggctgagatggaccagatcctgcacggacttgataaggttgccgaagagtgggcccaaggcacctttaaactcaatagcaacgatgaagatatccacactgccaatgaaagaagactcaaagagctgatcggagcgactgccgggaagctgcacaccggaagaagccggaacgatcaggtcgtgaccgacctccggctctggatgcgccagacctgctctaccttgtccgggctgttgtgggagctcatccgcaccatggtggaccgcgccgaagccgagagagacgtgctcttccctgggtacacccatctgcagagagcacaacctatcagatggtcgcactggatcctttcccatgcggtggctctgacccgcgacagcgagaggctcctcgaggtccggaagcgcatcaatgtgctgccgttggggtcgggagctattgcaggaaaccccctgggagttgaccgagaactgctgcgcgcagaactgaattttggagctatcacgctcaactcgatggatgctacctccgagcgggatttcgtggcagaattcttgttctgggcgtcactgtgcatgactcatctgtcccggatggctgaggaccttattctgtactgtactaaggaattctcatttgtccaactgagcgacgcttacagcaccggatccagccttatgccgcagaagaaaaaccccgattcattggaactgatccgctccaaagctggacgggtcttcggcaggtgtgcagggctcctgatgactctcaaaggcctgccgtccacttacaataaagacctgcaggaggacaaggaggccgttttcgaagtcagcgacacgatgtcagccgtgcttcaggtggctacgggagtgatcagcactctccaaatccaccaagaaaatatgggacaggccttgtcgcctgacatgctggcaaccgacctcgcctactacctcgtgcgtaagggcatgcctttccgccaggcacacgaagcctcgggaaaggcagtgttcatggccgaaaccaagggagtcgcactgaatcaactttcccttcaagagctccaaactatatctccactgttctctggagacgtgatctgcgtgtgggactacggtcactcagtcgagcagtatggagctctcgggggcactgcccgctcgtcggtggactggcagatcaggcaggttcgggcccttctgcaagcccagcaggcg

SEQ ID NO: 6759 - DNA, 1392 bp, synthetic construct
  misc_feature 1..1392: note = source = /note="Description of Artificial Sequence: Synthetic coding sequence"
  source 1..1392: mol_type = other DNA
atggcatccgaatcgggaaaactttggggaggacgttttgtcggggcagtggaccctatcatggaaaagtttaacgcatcaatcgcatatgaccgacatctgtgggaagtggatgtgcagggaagcaaggcatactccagaggtctggaaaaggctggtctgttgaccaaggcagaaatggatcaaattcttcatggtcttgataaagtggcagaagagtgggcccagggaaccttcaagctgaactccaacgacgaggatatacataccgccaatgagcggagactgaaagaacttattggtgcaactgcaggtaaattgcacactgggaggtcccgcaacgatcaagtggtgaccgacctgcggctgtggatgagacagacttgtagcactctttccgggcttctgtgggagcttataaggaccatggtggaccgggcggaggcagaacgtgatgtcctgtttcctgggtacactcatctgcaaagggcacagcctattcggtggtcccattggatcctttcacacgcagtggcactgacccgagattcagaaaggcttctcgaagtgaggaagaggattaacgtgctgcccctcggttcgggggcaattgcaggtaaccccctgggagtggatagagagctgctccgtgccgagctgaatttcggagcaatcactctgaattccatggatgcgacttcagaaagagatttcgtggcagaattcctgttttgggcgtcgttgtgcatgacccatctgagccgaatggccgaagatcttattctttactgtaccaaggagttttccttcgtgcaactgtccgatgcctacagtaccggttcgagcctgatgccacagaagaaaaaccctgattcactcgagcttattcgcagcaaagcaggacgggtctttgggcgctgcgcaggtctgctgatgaccctcaagggtctgccgtcgacttacaacaaagacttgcaggaggacaaagaggcagtctttgaagtcagcgacaccatgagcgcggtgctgcaagtggccactggagtcatctccactctgcaaatccaccaggaaaacatgggacaggccctctccccggatatgcttgctaccgatctggcatactacctggtgagaaaaggtatgccatttaggcaggcccacgaggcgtccggaaaggctgtctttatggcggaaactaagggcgtggcgctgaaccagctttcgctgcaggagcttcaaactattagccctctcttcagcggagatgtgatctgtgtgtgggattacggccattccgtggaacagtacggagcactgggaggaaccgccaggagctcagtggactggcaaattcgtcaagtgagggcattgttgcaagcgcagcaagct

SEQ ID NO: 6760 - DNA, 1392 bp, synthetic construct
  misc_feature 1..1392: note = source = /note="Description of Artificial Sequence: Synthetic coding sequence"
  source 1..1392: mol_type = other DNA
atggccagcgagagcggaaagctctggggaggccgcttcgtcggcgccgtggatcccataatggagaagttcaacgcctccatagcttatgacagacacctgtgggaggtcgacgtgcagggatctaaggcctatagcaggggcctggagaaggccgggcttctgacgaaggcagagatggatcaaattctacacggacttgacaaagtggcagaagaatgggctcaaggaacctttaaactgaatagcaatgacgaggatattcataccgctaacgagagacgcctgaaggaactcattggcgccaccgctggtaaactgcacaccggtagaagccggaatgatcaagttgtgacagacctgagattgtggatgcgccagacctgtagtactctgtccgggcttttatgggagctcatccggactatggtagacagagcagaggcagaaagagacgtcctcttcccaggatacacccatctacagcgcgcccaacctattcgatggtcccattggatactgtcccacgctgtggccctgacgagagactcagagcggctgctcgaggttcgtaaacgtatcaatgtgttaccgctgggctccggcgcaattgccggcaatcctctcggggtggaccgtgaactcctgcgggccgaactgaattttggagctatcacactgaactctatggatgctacgagcgaacgcgactttgttgctgaatttctgttttgggcctctctgtgtatgacccatttatccaggatggccgaagacttgatcttgtactgcacaaaagagttttcatttgtgcaattaagcgatgcgtattctacgggttctagcctgatgccacagaagaaaaaccccgatagtctggaacttatcagatcaaaggcaggaagggtgttcggcaggtgcgcgggactgctcatgaccctcaagggacttccaagcacttacaacaaagatttgcaagaagacaaggaggccgtctttgaggtgagcgacacaatgagtgctgtgctacaggtggcaaccggtgtgatttcaactctgcagatccaccaggagaatatggggcaggcactgtctcccgacatgctggcaactgatttagcctactatctggtcagaaagggaatgcccttcaggcaggctcacgaagcctctggaaaagctgtgttcatggccgagaccaaaggcgtggctctgaaccaactgagtctccaagagcttcaaactatctcccccctgtttagcggagacgtgatttgtgtctgggattatgggcactccgttgagcagtatggcgcattgggcggcaccgcgcgttcaagcgtcgattggcagatacgacaggtgagagcgctattgcaagctcagcaagcg

SEQ ID NO: 6761 - DNA, 1392 bp, synthetic construct
  misc_feature 1..1392: note = source = /note="Description of Artificial Sequence: Synthetic coding sequence"
  source 1..1392: mol_type = other DNA
atggcttccgagtccggaaagctttggggaggaagatttgtgggcgctgtcgaccctatcatggaaaagttcaacgcatccatcgcctacgatcgtcatctctgggaggtggacgtacagggttccaaggcctactcccgcggtcttgaaaaggctggcctcttgaccaaagctgagatggaccagattcttcacggacttgataaggtggctgaggagtgggctcaaggtacttttaagttgaacagcaacgatgaggatattcatacagccaatgaaagacgcctgaaggagctgatcggcgctacagccggaaagctgcacaccggacgctccaggaacgatcaggtcgtgaccgatcttagactttggatgagacaaacctgttctaccctgtctggactcctgtgggagctgattaggactatggtcgaccgcgcagaagccgagagagatgttctcttcccaggttacacccaccttcaaagggcccaacccatcaggtggtcccattggatattgtctcacgcagtggcactcacccgcgacagcgaacgcctgctggaagtcaggaagcgtatcaacgtcctgcccctgggcagcggagctattgccggcaaccctctgggagtggaccgtgagctgttgcgtgctgagttgaattttggagctatcaccttgaattcaatggatgctaccagtgaaagagatttcgtggcagaatttctgttttgggcatctctttgtatgacccatctgagtcgtatggctgaggatcttatcctctattgtacaaaggagttcagctttgtacagctgtcagatgcttattctaccggctcttcccttatgccccagaagaagaatccagattctctcgagctcatacgctccaaggccggtcgtgtgttcggacgttgtgccggcctgcttatgactcttaaaggtctgccctctacatataacaaggatctccaagaggacaaggaagctgtcttcgaagtctccgacactatgagcgccgtccttcaggtcgctaccggcgtgataagcaccctgcagatccatcaagagaatatgggtcaggccttgtcacctgacatgctggctacagatctcgcctactaccttgtaagaaaaggaatgccttttaggcaggcacatgaagcaagtggcaaggctgtttttatggcagagacaaagggagtagctctgaatcagttgagtctccaagagctccaaacaatctctcctctgttctctggtgatgtcatctgcgtttgggattacggtcacagcgttgagcagtacggcgcccttggtggcaccgctcgttctagcgtggactggcagatcagacaagtgcgcgcactccttcaagcccagcaggct

SEQ ID NO: 6762 - DNA, 1392 bp, synthetic construct
  misc_feature 1..1392: note = source = /note="Description of Artificial Sequence: Synthetic coding sequence"
  source 1..1392: mol_type = other DNA
atggcatccgagtccgggaagctctggggaggccgctttgtgggcgctgtggatcctattatggaaaagttcaacgcgtcaatcgcctacgaccgccacctgtgggaagtggatgttcaggggtcaaaggcgtattcacgcgggttagaaaaagcggggctgttaacaaaggccgaaatggatcaaatcctgcacgggttagacaaagtggccgaggagtgggcccaagggacatttaagcttaattctaacgacgaagatatacacacggctaacgagaggcgactcaaggaattgataggagcaaccgccgggaaactccataccgggaggagcaggaacgaccaggtggtcacagacctgcgtctttggatgcgtcagacctgttccaccttgtctggactcttgtgggaattgatacgaactatggtagaccgggccgaagcagaacgggacgtactgttcccgggctacacccacttacagcgagctcaaccaatccgctggagccattggattctttctcacgctgtggcccttactagagactccgagcgcctgttagaggtcagaaagagaattaatgtgttacctttggggtccggagcgatcgccggaaaccccctcggcgtggacagggagctgttgagagcagagctgaatttcggcgcaattacattaaattccatggacgccaccagcgaacgggatttcgttgcagagtttttattttgggctagcttgtgtatgactcatctttcccgaatggccgaggacttgatcctgtactgtaccaaggagtttagtttcgtccaactgtctgatgcatactcaaccggcagcagcctgatgccccaaaagaagaatcctgatagtctagagcttatcagatccaaggctggaagggtgtttggcaggtgtgccggcctgctcatgactttaaaaggcctccccagtacttacaataaagacctccaagaagacaaggaggccgtgttcgaggtgtctgatactatgagcgcggtgctccaggtggccacaggcgtgatttccaccctccagattcatcaggagaatatgggtcaggccctgtcgcctgacatgctggccaccgacctggcctactatctcgttcggaaggggatgccgtttagacaggcccatgaggcatctggcaaggccgtctttatggctgagacgaagggggttgcactcaaccagttgtccctacaggagttgcaaactatctctcctctattcagcggggatgtgatctgcgtctgggactatggccactctgtggaacaatacggtgcccttggaggcaccgccaggagctccgtggactggcagattcggcaggtccgcgcccttctgcaggctcagcaagcc

SEQ ID NO: 6763 - DNA, 1392 bp, synthetic construct
  misc_feature 1..1392: note = source = /note="Description of Artificial Sequence: Synthetic coding sequence"
  source 1..1392: mol_type = other DNA
atggctagtgaaagtgggaaactttggggcggaagatttgtgggggccgtcgatcccattatggagaaatttaatgcttccatcgcgtatgatcgacacctgtgggaagttgacgtccagggatctaaagcctattcacggggactggagaaggccggtttgctgacaaaggctgagatggaccagatacttcacggattggataaagtagcagaggaatgggcacagggaacgtttaaattaaattccaacgacgaagacatccacaccgcgaacgagaggagactcaaagagctgatcggagctacagccggcaagctccatacagggcgatcccgtaacgatcaggtagtgacagatttgcggctgtggatgcggcagacctgctccaccctgtctggattgctttgggagctcattcgaaccatggtggaccgcgccgaagctgagcgggacgtcctgttccccggatatacacacctgcagcgcgcacagcctattcggtggagccattggatcctgagtcatgccgttgcactcacccgcgacagcgaacggctgctggaggtgcggaaacggatcaatgtcttgcccctggggagcggtgccatcgcaggtaatcccctcggggttgatcgggaattgctgagggcagagttgaacttcggtgccattacactaaatagtatggacgccacatcggagagggacttcgtcgccgagtttctgttctgggcttcactgtgcatgacgcatctttcccggatggctgaagacctcatactctattgcaccaaagaatttagctttgtccagctcagtgatgcttatagtactggaagttccctaatgccacaaaagaagaaccctgactcgttggagctgataaggagcaaggcgggcagagtcttcggccgctgtgctgggcttttaatgactctcaaagggttaccaagcacctataacaaggacctccaggaggacaaggaggccgtgttcgaggtgtcggacaccatgtccgctgtgctccaggtggcgaccggcgttatcagtaccttgcagatccatcaagagaacatgggtcaggccctcagtcctgacatgctggccactgacctggcatactatctcgttaggaagggtatgcccttcagacaggctcacgaggcatccgggaaggctgtcttcatggctgagacaaaaggggtcgcgctgaaccagctgtcccttcaggaattacagacgatatctccgctgttttccggggacgtgatttgtgtgtgggattatggccattcggtggagcagtatggcgctttggggggcaccgctcgttcatcggtggactggcagatccgccaggtcagggccctgctacaggcgcagcaggcc

SEQ ID NO: 6764 - DNA, 1392 bp, synthetic construct
  misc_feature 1..1392: note = source = /note="Description of Artificial Sequence: Synthetic coding sequence"
  source 1..1392: mol_type = other DNA
atggcatctgaatcgggaaagctctggggtggtcgtttcgtgggagccgtcgatccgatcatggagaaattcaacgcttcgattgcctacgatagacatctttgggaagtggatgttcagggctcgaaggcatatagcagggggcttgaaaaagcaggcctgttgaccaaggctgaaatggaccagattcttcatggacttgataaggtcgcagaggaatgggcccagggcacctttaagctgaactccaatgatgaggatatacacactgcaaatgaaagacgcctcaaggagcttatcggcgcaactgcaggcaaattgcacactggaaggtcgaggaacgatcaagtggtgactgatttgaggctttggatgcgacagacctgttccactctgtcgggactgctgtgggagctgattcgcactatggtcgatagagcagaagcagaacgcgatgtcctgttccccgggtacactcatcttcagcgtgctcagcccatcaggtggagccactggattctgtctcacgcagtcgcattgaccagagattcggaacgcctgctggaagtgaggaagcgaattaacgtgctcccactgggatcaggagcaatagctggaaatccactcggggtggatcgcgaacttcttcgggccgagcttaactttggagcgattaccctgaactcaatggatgcaacttccgagagggatttcgtagccgaatttcttttttgggcctctctgtgtatgacccatctgtcaagaatggcagaggacctgattctttactgtaccaaggagttttccttcgtccagctcagcgatgcttactcaaccggttcgtcattgatgccacaaaagaagaatcctgattcactggaactgattagaagcaaggcaggacgggtgtttggaaggtgcgcaggtctgctgatgactcttaagggcttgccatcgacgtacaacaaggatcttcaagaagataaggaggccgtgttcgaagtgtcggacaccatgagcgcagtgcttcaggttgcaacgggagtgattagcacgctgcaaattcatcaagagaatatgggtcaggcgctgagcccagatatgctggcaaccgatttggcttactacctcgtgcgcaaagggatgccatttcgccaagcgcatgaagcatcgggtaaggcagtgttcatggcggagactaaaggtgtggcactcaaccaacttagccttcaggaacttcagaccatctcgcctctctttagcggagatgtgatttgcgtgtgggattacgggcattcggtcgaacaatacggggcacttgggggcaccgcacgctcatcagtggactggcaaatccgacaggtccgtgcgctgcttcaagcacagcaagca

SEQ ID NO: 6765 - DNA, 1392 bp, synthetic construct
  misc_feature 1..1392: note = source = /note="Description of Artificial Sequence: Synthetic coding sequence"
  source 1..1392: mol_type = other DNA
atggcatccgaatccggcaagctgtggggcggacgattcgtcggcgctgtggaccctatcatggagaagtttaacgcctccatcgcttatgatagacacttgtgggaggttgatgtccagggcagcaaggcatattctcgaggtctcgaaaaagcgggattgttgacaaaagcggaaatggaccagatccttcacggactggataaagttgcagaggaatgggcccaaggtacctttaagttaaacagtaatgacgaggacattcatactgctaacgaaaggcgactgaaggagctgatcggcgcaacggccggcaaactccacacaggacgcagtagaaatgatcaagtggtcaccgacttgcggctgtggatgaggcagacctgttcgacactgagtggattgttgtgggagttaataaggaccatggtcgacagggcggaagcagagcgggatgttcttttccccggctacacccaccttcagcgcgcacagcctatacgctggtctcactggattctaagccatgcagtggcccttacccgtgattcagagcgactgctagaggtgaggaaacgaataaacgttctgccacttggctcaggagcgatagcggggaaccctttgggagtcgacagggagttactgagggctgaactgaactttggcgctattactctgaatagtatggatgctacctccgaaagggatttcgtagccgaattcctgttttgggcatccttgtgcatgacacatctgtctagaatggctgaagacctgatcttatactgcactaaagagttttcgttcgttcagctatctgatgcatattcgaccgggtctagtctgatgccgcagaagaagaaccccgacagcctggagttgatcagatctaaggccggtagggtctttggcagatgcgctgggctgcttatgacacttaaaggcctgccaagtacctacaataaggatctgcaggaagataaagaggccgtctttgaagtatctgacacgatgagtgctgtgctgcaggttgcgactggcgtcatctcgaccctgcaaatccaccaggagaatatggggcaggcactgtcacccgacatgctcgctacagacctggcttactacctagtccggaagggcatgccttttcgacaggctcacgaggcatcaggaaaagctgtcttcatggctgaaacaaagggcgttgcattgaatcagctaagcctccaggagctccagacgatttcccccctgttttcgggtgatgtaatctgcgtgtgggattatggtcactctgtcgagcagtatggtgcattgggtggcacagcccggtcatccgtggactggcagatccgccaggtgcgcgccctgctgcaagcgcagcaggcc

SEQ ID NO: 6766 - DNA, 1392 bp, synthetic construct
  misc_feature 1..1392: note = source = /note="Description of Artificial Sequence: Synthetic coding sequence"
  source 1..1392: mol_type = other DNA
atggcatcagaaagtggcaagttgtggggaggcagatttgttggagccgtggacccgatcatggagaaatttaacgcgtctatagcatacgatcgacatttgtgggaggtggatgtgcagggctcgaaagcttactcgagaggcttggaaaaagcaggcctcttgacaaaggcagaaatggaccagattcttcacggccttgacaaggtcgccgaggagtgggcccaaggtaccttcaagctcaactctaacgacgaagacattcatactgcaaacgaacggaggcttaaagagctgattggggctacggcgggaaagctgcatactggacgcagcagaaacgatcaggtcgtcactgatttgagactgtggatgcgtcagacctgctccactctctcagggctgctgtgggagttgattcgcaccatggtagatcgtgccgaagcagagagagatgtgcttttcccagggtacactcatctccagcgagcccagccaattcgctggagtcactggattctgtctcacgcagtggcactgacccgagattctgaaagactgctcgaagtaagaaaacggatcaacgtacttcctctaggctctggtgcaatagccggaaatccgcttggcgtggatcgcgaactgctgcgggccgagctgaacttcggggcaattaccctgaactctatggacgctaccagtgagcgggacttcgtggctgaattcctgttttgggcatcactctgcatgacacatttatccagaatggctgaagacctgatcctgtattgcactaaggagttttctttcgtccagctctcggacgcctacagcaccggatccagcctaatgccacagaaaaagaaccctgattcgctggaactcatccgatccaaggctggccgcgtcttcggccggtgtgctggcctacttatgactctcaaaggtctcccctcaacatacaataaggatctgcaggaggacaaggaagccgtctttgaggtttcagatacaatgtccgcagtactgcaggtcgccacgggcgttatcagcacactgcagatacaccaggaaaacatgggacaagccctgtcacctgacatgctggctaccgacttggcctactatttggtcagaaaggggatgccttttcgccaagcccatgaagcatccggaaaagccgtctttatggccgagacgaagggagtcgccctcaaccagctgtctcttcaggaacttcagacaatcagcccactcttttctggagacgtgatttgcgtctgggattacgggcacagtgtagagcagtatggagcgttaggcggcaccgctaggtcatcagtggactggcagatacggcaggtaagagcactgctgcaagcacagcaggcc

SEQ ID NO: 6767 - DNA, 1392 bp, synthetic construct
  misc_feature 1..1392: note = source = /note="Description of Artificial Sequence: Synthetic coding sequence"
  source 1..1392: mol_type = other DNA
atggcgtcggaaagcggaaaactgtggggaggccggttcgtgggagcagtggatccaattatggagaagtttaatgcttccattgcatacgatagacatctttgggaagtggatgtgcagggtagcaaggcgtactcgagaggcttggagaaagctgggttgcttactaaggccgagatggatcaaatcctgcatggcctcgacaaggtggcagaggaatgggcacaaggaacttttaagctgaactcaaacgacgaggacatccacacggcgaacgagaggcgcttgaaggaactgattggggcgacggcagggaaactgcatacgggtagatcgcggaacgaccaagttgtgacggacctccgtctttggatgcggcaaacctgttcgaccctgagcggacttctctgggaactcataaggactatggtggatagggcagaagcagaacgcgatgtgctttttccaggatacacgcacctgcaacgggcacaacctattagatggtcacactggatccttagccacgcagtcgcacttactcgggactccgaacggttgcttgaagtgaggaagcgaattaacgtgcttcctctcggaagcggtgcaattgctggaaatccgcttggggttgacagagaactgttgagggcagagctcaactttggtgccatcactcttaacagcatggatgcgacttccgagcgcgattttgtggcagagttcctgttttgggcgtccctctgtatgacccatcttagccgcatggcagaagatctcatcctttactgtactaaggaattctcctttgtccaactgagcgacgcatactcaaccggatcctcactgatgccgcaaaagaaaaatccagattcgctggaacttattaggagcaaggctggacgtgtgttcggtcgatgtgcagggcttctcatgacccttaaaggcctgcctagcacttacaacaaagatcttcaagaagataaggaggccgttttcgaagtgtcagataccatgtcggcggtcctccaggtcgcaaccggagtgatctcaactctgcagattcaccaggaaaacatggggcaggcactttcgcccgatatgttggctactgacctcgcgtactacctggtgcgaaagggtatgccattcaggcaagcacatgaagcaagcggaaaagccgtgtttatggcagagactaagggagtagcgctgaaccagctttcgcttcaagaactccagacgatctctccactcttctcaggagacgtcatctgtgtgtgggattatggacattcagtggaacagtacggagcacttggcggcactgcacgaagttccgtggattggcaaatcagacaggtcagagcattgctgcaggcacaacaagca

SEQ ID NO: 6768 - DNA, 1392 bp, synthetic construct
  misc_feature 1..1392: note = source = /note="Description of Artificial Sequence: Synthetic coding sequence"
  source 1..1392: mol_type = other DNA
atggcgtcagaatcgggaaagctgtggggaggacgatttgtgggcgcggtcgaccctatcatggagaagttcaatgcctccatcgcttacgatcgccatctttgggaagttgacgtgcagggatcaaaggcttattcacgaggtttggaaaaggctggccttctcaccaaggcagagatggaccaaatcctgcatggactggataaggtggccgaagaatgggcgcagggaaccttcaaactcaactccaatgatgaggacatccatactgccaacgagcggcggctcaaagaactgattggtgcaaccgccgggaaactccacaccggccggtcccgcaacgaccaggtggtgacggaccttcggctgtggatgcgacaaacctgctcgacgctcagcggactgttgtgggagctgatccgcactatggtggatcgggcggaagccgaacgggatgtcctgttcccaggttacacccacttgcagcgcgcccaaccgatcaggtggtcgcactggatcctgagtcacgcagtcgcccttacccgggactcagagagactgctggaggtgcggaagcgaataaacgtcttgccgctcgggtccggagccatcgctggaaaccccctgggagtcgatcgcgagctgctccgcgctgagctgaatttcggagcgatcactctgaattccatggacgctacttcagaacgggacttcgtggcagaattcctcttctgggcatcgctgtgtatgacccatctttcccgtatggcggaagatctgatcctctactgcaccaaggaattttcattcgtgcaactgtcggacgcgtactcaaccggctcgagtctcatgccacaaaagaagaatccagactcgctggagctgatcaggtcgaaggccggtagagtgttcggaagatgcgctgggctgttgatgactctgaagggacttccttccacttacaacaaagatctccaggaggacaaggaggccgtgtttgaagtctcagacactatgtccgcagttctccaggttgccactggggtcatctccaccctgcagattcaccaggaaaacatgggacaggcactgtcaccagatatgctcgcgactgatttggcctactacctggtccgcaaaggtatgccgtttcggcaggcccatgaagcctcgggcaaggccgtgttcatggcggaaacgaaaggtgtggcccttaaccagctgtcactgcaggaactgcaaaccatatcacctctcttctctggagacgtcatctgcgtgtgggactatggtcactcagtcgaacaatacggggcgctgggaggaaccgctagaagctcggtggactggcaaatccgccaggtgagagcacttctgcaagcccagcaggcc

SEQ ID NO: 6769 - DNA, 1392 bp, synthetic construct
  misc_feature 1..1392: note = source = /note="Description of Artificial Sequence: Synthetic coding sequence"
  source 1..1392: mol_type = other DNA
atggctagcgaaagtgggaaactgtggggaggtcggtttgtaggcgcagtggaccccatcatggaaaaatttaatgctagtatcgcttacgatcgacatctgtgggaagtcgacgttcagggttccaaagcatattctagggggctggaaaaggctggcctgctgacaaaggctgagatggaccagatcctgcacggactggacaaagtagctgaggagtgggcccagggtacgtttaagctcaattccaacgacgaggacatacacactgctaacgaaagaagactgaaggaacttatcggagcaacggcaggcaagctgcacaccggtagatctcgcaatgaccaggttgtgactgacctgcggctttggatgagacagacatgttccacactgtctggactgttgtgggagctgattcgaaccatggtggatcgggccgaggcagaaagagatgtactgttcccgggatatactcacctccaacgcgcgcagcctattcgctggagccactggattctctctcacgcggttgctctcacccgcgacagcgagcggttacttgaggtgagaaaacgaattaatgtactaccactcggaagtggcgctatcgccggtaatccacttggtgttgaccgcgagctcctgcgggcagagctgaattttggagccataactttaaatagcatggatgctacgagcgagcgagattttgtcgcagaattcctgttctgggccagcttgtgtatgacccatttgagccggatggcggaggatttgatattgtattgtactaaggaattctcatttgtgcagttgagcgacgcttacagtaccggcagctcgcttatgcctcagaaaaaaaatcccgactctctggagttgatccgaagtaaggcgggacgagtattcggtaggtgtgctggcctgctgatgacgctgaaaggtcttccctcaacatacaataaggatctgcaggaagacaaagaagccgtcttcgaagtcagcgatacaatgagtgctgtgctccaggtggctaccggcgtcatttctaccctccagattcaccaggagaacatgggtcaggctctcagccccgacatgctggcaacagatctagcatactatctggtgaggaaggggatgccctttcggcaggcccatgaagcgtccgggaaagccgtattcatggccgagacaaaaggtgtggccctaaaccagctttcactgcaagagttgcagaccatctccccgctgttcagcggagatgtaatctgcgtgtgggattacggtcattcagtcgaacagtacggcgctctagggggtacggcaaggagcagcgtcgactggcagatacggcaggtgcgggccctcctccaggcccagcaagca

SEQ ID NO: 6770 - DNA, 1392 bp, synthetic construct
  misc_feature 1..1392: note = source = /note="Description of Artificial Sequence: Synthetic coding sequence"
  source 1..1392: mol_type = other DNA
atggcctcagagtcgggaaagttgtggggtggccgcttcgtgggagccgtcgatccaatcatggagaaattcaatgcatctattgcgtacgatcgccatctgtgggaggtggacgtgcagggctcgaaagcgtactcacgtggtttggagaaggctggtcttcttaccaaggcggaaatggatcagatactacacggtcttgataaggttgcagaagaatgggcccaggggacgttcaagctcaatagtaacgacgaggacattcacactgcgaatgagcgtcgattgaaagagctgatcggcgcgacggcaggtaagctgcacacgggccgttcccgaaacgatcaagtcgtgacagacctacgtctgtggatgcgtcagacatgctcaacgctgtcgggcctgctgtgggaattgatccgtaccatggtggaccgcgcggaggccgagagggacgtcctcttccccggatatactcacttgcagcgcgctcagcccatacgctggtcgcactggatactcagccacgcagtggctctgacgagggacagtgaaaggctgctggaggtacgtaagcgaattaacgtgctccccctgggatcgggtgccatcgcgggaaacccactaggcgtagatcgcgagcttctgcgtgccgagctgaacttcggcgcaatcactctcaactccatggacgccactagcgagcgcgatttcgtggcagagtttctattctgggcctcgctgtgcatgacacacctttccaggatggcggaagatctgatcctttattgcaccaaggaattctccttcgtccaactgtctgatgcctactcgacgggctcgtccctgatgccgcaaaagaagaaccccgattctttagagctaatccgatctaaggctggcagggtgtttggtcgttgcgcaggactgctgatgaccctgaagggcctccccagtacctacaacaaggacctgcaggaggacaaggaggctgtgttcgaagtaagtgatactatgtcggctgtactacaggtggccaccggcgtgatatccaccctccagatccatcaggagaacatgggacaggccctgtccccagacatgttggctacagatctagcctactatctggttagaaaaggaatgccctttcgccaggcacatgaggcctcgggcaaagctgtgttcatggcggagactaagggtgttgctcttaaccagctgagtttgcaagagctacagaccatctcgcctctgttcagcggcgacgtgatatgcgtttgggattatggccatagcgttgaacagtacggagccttgggaggtacggctcgaagttcagtcgactggcaaatccgacaagtgcgcgcgctgctgcaggcgcagcaggca

SEQ ID NO: 6771 - DNA, 1392 bp, synthetic construct
  misc_feature 1..1392: note = source = /note="Description of Artificial Sequence: Synthetic coding sequence"
  source 1..1392: mol_type = other DNA
atggcgtcggaatcgggtaaactatggggtggtcgatttgttggtgcggttgatccgataatggaaaaatttaatgcgtcgatagcgtatgatcgacatttatgggaagtagatgttcaaggttcgaaagcgtattcgcgtggtttagaaaaagcgggtctattaacgaaagcggaaatggatcaaatattacatggtttagataaagttgcggaagaatgggcgcaaggtacgtttaaattaaattcgaatgatgaagatatacatacggcgaatgaacgacgactaaaagaattaataggtgcgacggcgggtaaactacatacgggtcgatcgcgaaatgatcaagtagtaacggatttacgactatggatgcgacaaacgtgttcgacgttatcgggtctactatgggaactaatacgtacgatggtagatcgagcggaagcggaacgtgatgtattatttccgggttatacgcatttacaacgagcgcaaccgatacgttggtcgcattggatattatcgcatgcggtagcgctaacgcgtgattcggaacgattattagaagttcgaaaacgtataaatgttctaccgttaggttcgggtgcgatagcgggtaatccgctaggtgtagatcgtgaactattacgtgcggaattaaattttggtgcgataacgctaaattcgatggatgcgacgtcggaacgtgattttgtagcggaatttttattttgggcgtcgctatgtatgacgcatttatcgcgtatggcggaagatctaatactatattgtacgaaagaattttcgtttgtacaactatcggatgcgtattcgacgggttcgtcgctaatgccgcaaaaaaaaaatccggattcgctagaactaatacgatcgaaagcgggtcgagtttttggtcgatgtgcgggtctactaatgacgctaaaaggtttaccgtcgacgtataataaagatttacaagaagataaagaagcggtttttgaagtatcggatacgatgtcggcggtattacaagtagcgacgggtgtaatatcgacgttacaaatacatcaagaaaatatgggtcaagcgctatcgccggatatgttagcgacggatctagcgtattatctagtacgaaaaggtatgccgtttcgacaagcgcatgaagcgtcgggtaaagcggtatttatggcggaaacgaaaggtgtagcgctaaatcaactatcgctacaagaattacaaacgatatcgccgttattttcgggtgatgtaatatgtgtatgggattatggtcattcggtagaacaatatggtgcgctaggtggtacggcgcgatcgtcggtagattggcaaatacgacaagtacgtgcgttactacaagcgcaacaagcg

SEQ ID NO: 6772 - DNA, 1392 bp, synthetic construct
  misc_feature 1..1392: note = source = /note="Description of Artificial Sequence: Synthetic coding sequence"
  source 1..1392: mol_type = other DNA
atggcgtcggaatcaggaaagctgtggggagggcgcttcgtgggcgcagtggacccaatcatggaaaagttcaacgcgtcaatagcctacgaccggcacctctgggaggtggatgtgcagggcagcaaggcgtacagccgtggcttggagaaggcaggactcctgactaaggccgaaatggatcagattcttcatggacttgataaagtggcggaggagtgggcccaggggacctttaagctgaattcgaacgacgaggacatccataccgcaaatgagcggcggctcaaagaactcatcggtgcgactgccgggaagctgcatactggacgctccagaaacgaccaggtcgttactgatctgcgactgtggatgagacagacgtgttccaccctgagcggactcctctgggaactcatccgcacgatggtggaccgcgccgaagcggagcgggacgtcctgttccctggatacactcatctgcagcgcgcacagccgatccggtggagccactggatactgtcacacgccgtggcgctgactcgagattcggaacgccttctggaggtccgcaagcgaatcaacgtcctgccgctcggctccggtgccatcgctggtaatccgctcggcgtggaccgggagctcctgcgcgcggagttgaacttcggagcaattactttgaactcgatggacgcaacctccgaaagagatttcgtggccgaattcctcttttgggcgtcactgtgcatgacccaccttagccgtatggctgaggacctgatcctgtattgcaccaaggaattctccttcgtgcagctgtccgacgcgtactcgactggatcgtcgctgatgccgcagaagaaaaacccggacagccttgaactcattcggtcgaaggccggacgggtgtttggccggtgcgctggtctgctcatgactctcaaaggactcccgtcaacctacaacaaggacctgcaagaggataaggaagcagtctttgaggtgtccgatacgatgtccgccgtgctccaggtggctactggcgtgatttccaccctgcaaatccaccaggaaaacatgggacaagcactttcacccgatatgctggcgaccgacctggcctactaccttgtgcgcaaaggtatgcccttcaggcaagcccatgaagcaagtgggaaggccgtgttcatggctgaaactaagggagtggcactgaatcagctgtcgctccaggagctgcagaccatctcgccgctgttctcgggagatgtgatctgcgtgtgggattacggccactcggtggagcaatacggagcactcggtggtaccgcacgctcatctgtggactggcagatccgacaggtgagggcacttttgcaagcccaacaggca

SEQ ID NO: 6773 - DNA, 1392 bp, synthetic construct
  misc_feature 1..1392: note = source = /note="Description of Artificial Sequence: Synthetic coding sequence"
  source 1..1392: mol_type = other DNA
atggcctcggagtcggggaaactgtggggcggccggtttgtgggagcagtggacccgattatggagaaattcaatgcgtcgattgcctatgacagacacttgtgggaagtggacgtgcaaggctcaaaggcttactcgcggggattggagaaggccgggctgcttactaaagccgaaatggatcagattctgcacggactggataaggtggccgaggagtgggcccaaggaacctttaagctcaactcgaacgatgaagatatccatactgctaacgagagacgcctcaaagagctgatcggagctactgccggtaaactgcacaccgggcgatccagaaatgatcaagtggtcaccgacctgcggctgtggatgcggcagacctgtagcactctttcaggactgctgtgggagcttattcgtactatggtggatcgggcggaagcggaaagagacgtcctctttcccggatacactcatctgcaacgagcccagccgatcagatggtcgcattggattctgtcccacgccgttgccctgacccgcgactcagaacgcctgctggaagtccggaaaagaatcaatgttctgcctctgggatcgggagccatcgctggaaatccactgggagtcgaccgcgaactgcttcgcgccgagctgaattttggtgccatcactctgaacagcatggacgcgacctccgaaagagatttcgtggctgagtttctcttttgggcatcgctgtgcatgactcatttgtcccgcatggccgaagatttgattctgtactgcaccaaggaattcagcttcgtgcaactcagcgacgcatactcgacgggaagctccctgatgccacagaagaaaaacccggactccctcgaactgatccggagcaaggccggacgcgtgtttggaagatgcgctggcctcctcatgacgctgaaaggcctgcctagcacttataacaaggatctgcaggaagataaggaagccgttttcgaggtgtcggacaccatgtctgccgtgctccaagtcgcaaccggcgtgatcagcaccctgcaaatccaccaggagaatatgggccaggccctgtctcctgatatgctggcgaccgacctcgcctactacctcgtgaggaagggtatgccattcaggcaagcacacgaggcatcagggaaagcagttttcatggcggaaactaagggtgtcgccctcaatcaactgtcactgcaggagctccagactatcagcccgcttttctcaggagacgtcatctgcgtgtgggattacggtcatagcgtggagcagtacggagccctcggcggaaccgcacggtcgtcggtggattggcaaatacgacaagtgcgcgccctgctgcaggcccaacaggct

SEQ ID NO: 6774 - DNA, 1392 bp, synthetic construct
  misc_feature 1..1392: note = source = /note="Description of Artificial Sequence: Synthetic coding sequence"
  source 1..1392: mol_type = other DNA
atggccagcgaatcgggaaagctctggggtggacgctttgtgggcgcggtcgacccaatcatggagaaattcaacgcatctatcgcatacgaccgccacctgtgggaggtggatgtgcagggatcgaaggcgtactccagaggattggaaaaggccggtctgctgaccaaggcggaaatggaccaaattctgcacggactggacaaggtcgctgaggagtgggcccaaggaactttcaagctgaactccaacgatgaggacatccataccgccaacgaacggaggctgaaagagcttatcggggcgaccgcaggaaagctgcacaccggacgctcaagaaatgatcaagttgtgactgacctccgcttgtggatgcggcagacttgctcgactctgtccggcctgctctgggaactcatcaggactatggtcgaccgtgcagaggcagagagagatgtgctgtttcccggatacacccacctccagcgggctcaaccgattcggtggtcccactggatcctttcgcacgcggtggctctgacccgggactccgagcgccttctcgaagtccggaagcgaatcaatgtccttcctctcggtagcggggctatcgccggaaatccactgggtgtggatcgggagctcctgagagcggaactgaacttcggagctatcaccctgaactcgatggacgccacctctgaacgcgactttgtggcagagttcttgttctgggcttccctgtgcatgacgcatctctcacggatggctgaggacttgatcctgtactgcaccaaagagttctcatttgtgcaactgtcggacgcatacagcacgggaagttcgctgatgccgcagaagaagaatccagattcactcgaactgattcgcagcaaagcgggccgcgtgttcgggagatgtgccggcctccttatgacgctgaaagggctgccgtccacctacaacaaggatcttcaggaagataaggaagccgtgttcgaggtcagcgacactatgtccgcggtgctccaggtggcaactggagtgatctcgactctccagatccatcaggaaaatatgggacaagccttgtcgcctgatatgctggccactgacctcgcctactacctggtgcgcaaaggcatgccgttcaggcaggcccacgaagccagcggcaaggccgtgttcatggccgaaaccaagggcgtagcgctgaaccagctgtcgctgcaagaactccaaaccattagcccgctgttctcaggcgacgtcatctgcgtgtgggactacgggcattcagtggaacaatatggagctctcggaggcactgcaaggagctccgtcgattggcagatccgccaggttagagccctgttgcaggcccagcaggcg

SEQ ID NO: 6775 - DNA, 1392 bp, synthetic construct
  misc_feature 1..1392: note = source = /note="Description of Artificial Sequence: Synthetic coding sequence"
  source 1..1392: mol_type = other DNA
atggcatcagaatcagggaaactttggggaggaagatttgttggagcagtggaccccattatggagaagtttaatgcgagcatcgcatacgatagacatctttgggaagtcgacgtgcagggatccaaggcttacagccggggtttggagaaggcaggtctgctcaccaaggcagaaatggaccaaattcttcatggacttgataaggtcgctgaagaatgggcacagggaaccttcaagctcaattccaatgatgaggacattcataccgcgaacgagagacgccttaaggagctgatcggagcaactgccggcaagctgcataccgggaggtcacgaaacgaccaagtcgtgactgatttgagactgtggatgaggcagacgtgcagcacgctctccggacttctgtgggaactgatcagaactatggtggatagagcagaggcagaacgggatgtgctctttcctggttacacccaccttcaaagagcccagcctattagatggtcccattggattctgtcccatgccgtcgcacttactagagattccgaacggctgcttgaagttagaaaacggattaatgtgctgcccctggggtcgggggcaattgccggcaacccgctcggggtcgatcgggaactgcttcgtgcggaattgaattttggggcaattactcttaactccatggatgcaacctcggagcgggattttgtcgcagagttcctgttctgggccagcctttgtatgacccacctgtctcggatggcggaggaccttattctttactgtaccaaggaattctcgtttgtgcaactttcggatgcgtactccaccggctcctccctcatgcctcagaagaagaacccggactccctggagcttattcgcagcaaggccggacgtgtctttggaagatgcgccggtttgttgatgacccttaaaggccttcctagcacgtacaacaaggatctccaagaagataaggaggcagtgtttgaagtctctgatactatgagcgcagtccttcaggtggcaaccggtgtcatctcgaccctgcaaatccatcaggaaaacatgggacaagccctcagcccagacatgctggcaactgacctggcatactacctggtgagaaaggggatgccttttagacaagcacatgaagcatccggtaaggcagtgttcatggctgaaactaagggtgtggccctgaatcaactttccctccaagaacttcaaaccatctcgccactgttttcgggtgacgtgatctgtgtgtgggactacggtcatagcgtcgagcagtatggagcacttggaggcaccgccaggtcctcggtggattggcagatcagacaagtcagggccctgctgcaagcacaacaggca

SEQ ID NO: 6776 - DNA, 1392 bp, synthetic construct
  misc_feature 1..1392: note = source = /note="Description of Artificial Sequence: Synthetic coding sequence"
  source 1..1392: mol_type = other DNA
atggcctccgagtccgggaagctctggggtggacgctttgttggagccgtggatcctattatggaaaagtttaacgcgtctatagcttatgaccgacacctgtgggaggtggacgtgcagggatccaaggcctactctagaggactcgagaaagccggtctcttaaccaaggcagagatggatcagattttgcatggcctagataaggttgcagaagagtgggcccagggcacttttaagttgaattctaatgatgaagacattcatacagccaatgaaaggagactcaaggaactgattggggctaccgccggaaagctacacacgggacgttccaggaacgaccaagtggtcaccgatctgagactctggatgagacagacttgcagtaccttaagcggtcttttgtgggagctgattagaaccatggtcgatcgcgctgaggcggagcgagacgtgttgtttccaggttacacccacctccaacgcgcccaaccaatacggtggtcacactggatactctcccacgccgttgctctcaccagagattccgagagactcctggaggttaggaaaaggatcaatgtactcccactgggatctggagccattgctggcaatccactgggggtcgatcgggagctgctccgcgctgagctgaatttcggcgccattacactgaattccatggacgccacatccgagcgcgacttcgtggcagaatttctcttctgggcctctctttgcatgacacacttatcccgcatggctgaggacctcatcctttattgtaccaaggagttctctttcgtgcagttgagcgacgcctattcaaccggctcttccttgatgccgcagaagaaaaaccctgactctctagagctcattcgtagcaaagcaggcagagtattcgggcggtgcgctggacttctgatgaccctgaagggattaccctccacctataacaaggacctacaagaggacaaggaagccgtatttgaggtatcagacacgatgtctgcggttctccaggtcgcaaccggcgtgatctcaactcttcagatccaccaggagaatatggggcaagccctttcaccggatatgctcgcaaccgacttggcgtattacctggtgaggaaagggatgcccttccgacaggctcatgaagcaagcggaaaggccgtgttcatggctgagacgaagggcgtagctttgaaccaattaagtctccaggagctgcaaacaatcagccctttgttctccggcgacgtaatctgcgtgtgggattatgggcactccgtggaacagtacggtgccctgggaggaaccgcaaggtcctctgtcgattggcagattcggcaggtacgagctctgctgcaggcacaacaagca

SEQ ID NO: 6777 - DNA, 1392 bp, synthetic construct
  misc_feature 1..1392: note = source = /note="Description of Artificial Sequence: Synthetic coding sequence"
  source 1..1392: mol_type = other DNA
atggcgtccgaatctgggaagctgtggggtggaagatttgtgggagcagtggatccaatcatggaaaagtttaatgcttccattgcctacgatagacatctgtgggaggtggacgtgcaaggctcgaaggcgtactcgagggggttggagaaagcaggactgctcactaaagccgaaatggatcaaattcttcatggtctggacaaggtcgcagaggaatgggcacaaggaacttttaagctgaattccaacgacgaagatatccataccgcaaacgagcgaaggcttaaggaattgatcggagctacggcagggaagctccatactgggaggtcgcgtaatgatcaagtggtgactgaccttagactctggatgcgacaaacctgttcgactcttagcggtttgctctgggaactcatccgtaccatggtggatcgcgcagaggcagagagagatgttctttttcccggatacactcatctgcagagggcacaaccaatcagatggtcgcactggatcctgagccatgcggtggcgcttacccgagattcagaacgcttgcttgaggtgagaaagcggattaatgtccttccgcttgggtcaggtgcaattgccggaaaccctctcggggtggatcgggaacttctccgggcggaactgaactttggagcgattacgctgaattcaatggatgcaacctccgaaagagatttcgttgccgaattcctgttctgggcgtccctttgcatgacgcatctgtcacgaatggcagaagatttgattctgtactgtacgaaggaatttagctttgtccaactgtccgatgcctactccaccgggtcctcactgatgcctcaaaagaagaaccctgattcgctcgagctgatcagatcgaaagcaggacgcgtgtttggacgatgtgcgggccttctcatgaccttgaaaggactccctagcacttacaacaaagatctgcaggaagataaagaagcagtgttcgaagtctcagacactatgtcagcagtgttgcaggtggcaactggtgtcatttccactttgcaaattcatcaagagaatatgggacaagccttgtcgccagatatgttggcaactgacctcgcttactaccttgtccgtaagggaatgccctttcgccaggcacacgaggcatcaggtaaagccgtgtttatggccgaaacgaagggcgtagcacttaatcagctgagcctccaagaacttcagaccatttcgccgcttttttccggtgatgtgatctgtgtctgggattacgggcattcagtggaacaatacggtgcccttggcggaactgcaagaagctccgtggattggcagatacggcaggtccgcgcactcttgcaggcgcaacaggca

SEQ ID NO: 6778 - DNA, 1392 bp, synthetic construct
  misc_feature 1..1392: note = source = /note="Description of Artificial Sequence: Synthetic coding sequence"
  source 1..1392: mol_type = other DNA
atggcaagtgagtctggaaagctttggggcggccggttcgtaggagccgtggaccccatcatggagaagtttaacgcttccattgcttatgaccgacatctatgggaagtggacgtccaggggagtaaggcgtatagtcgagggctggaaaaagctggccttctcacaaaagctgagatggaccagatactgcatggcctagataaggttgctgaggagtgggcccagggtacctttaaactgaacagcaatgacgaagacatacacactgcaaatgaacgccggcttaaggagctaattggggcaacggcgggtaagctacatactggaagatcccgtaatgatcaggtggtgactgaccttaggctctggatgcgccaaacctgtagtaccctttcagggctcctttgggagctcattagaacaatggtcgaccgggcggaggctgagagagatgtgttgttccctgggtatacccaccttcaaagagcccagccgattcgctggtcacattggatcctcagccacgccgtggcccttacgagggatagtgagcggttgctagaggtgcggaaaagaattaatgtcctgcccctcgggagtggtgccatcgccggcaaccccctcggagttgatagggagttgctgcgcgccgaattaaactttggtgctatcaccctgaattccatggacgccacgtcagagagagactttgtggccgagtttctcttttgggcgtccctgtgcatgacacacctctcgcgcatggccgaggatcttattctatattgcaccaaggaattcagcttcgtgcagctctcagatgcgtactcaacaggatcttctttaatgccgcagaaaaagaaccccgactctctggaactgatcagatcaaaagctggcagggtgttcggaagatgtgctggcttgctgatgaccttgaaagggctgcccagcacatacaataaggacctgcaagaggacaaagaggccgtctttgaggtgtcagacacaatgtccgcggttctgcaagtggctacgggggtaatcagtacccttcagattcatcaggagaacatggggcaggctctgtcacctgacatgctggccacagacctggcctattatctggtgcggaaaggcatgcccttccgacaggcacacgaagcgagcgggaaggccgtgttcatggcagaaacaaagggcgtggctttgaaccagttatctctgcaagagctccagacaataagccccctattttcaggtgacgtcatctgcgtgtgggattacggccattccgtcgaacagtatggggctctcggtgggaccgcacgcagcagcgtagactggcagattcggcaggtgcgagctctgcttcaggcacagcaggcc

SEQ ID NO: 6779 - DNA, 1392 bp, synthetic construct
  misc_feature 1..1392: note = source = /note="Description of Artificial Sequence: Synthetic coding sequence"
  source 1..1392: mol_type = other DNA
atggcaagtgagtctggcaaactttggggcggacgttttgtcggtgcagtcgatcccattatggaaaaatttaatgctagcatcgcatatgatagacacctctgggaagtggatgtccaaggttcgaaggcctatagtaggggattggagaaggcaggcctattgacgaaagctgaaatggaccaaatcttgcatggacttgataaagtggcggaagaatgggcacaaggcacgttcaagctaaattcgaacgatgaggatatacatacggctaatgagcgtcgactcaaggagctgattggagcgaccgctggaaagctgcacacgggacgttcgagaaacgatcaagttgttaccgatcttaggctttggatgcgtcaaacgtgctcaacgctgtcaggcctgctttgggaacttatccgtaccatggtcgatcgggctgaagctgaaagagatgttctcttccccgggtatacacatctccaacgtgcgcagccgattaggtggagtcactggattttgtcacatgctgtggcactcaccagggattctgaacggttacttgaagtacgtaaacgtattaatgttcttcctcttggatcaggagccatcgcgggcaacccactgggcgtggaccgcgaacttctgcgtgccgaactgaattttggtgcgattaccctcaattccatggatgcaacgtccgaaagagatttcgttgcggagtttttgttttgggcatccttgtgtatgacacatctgtccagaatggccgaagacttgattctatactgcacaaaagagttttctttcgtccaattgtcagacgcttattctacaggttcatcacttatgccgcagaagaaaaatccagattcactagagctcataagatctaaggccggcagagtattcggacgttgtgcaggactcctgatgactctaaaaggtttaccgtctacatataataaagatcttcaggaggacaaggaagcagttttcgaagtttcggacactatgtctgcagtgttgcaagttgcaacgggagtcataagcacgctgcagattcaccaagagaatatgggacaggcactatcaccggacatgctcgctacagaccttgcttattacctagtaagaaaggggatgccgtttcgtcaagctcatgaggccagtgggaaagctgtttttatggctgaaacaaagggagttgcgttgaatcagctgtccctccaggagcttcaaacaatatcgccacttttttcaggggatgttatttgtgtgtgggattacgggcacagtgtcgaacaatacggtgcgctaggaggaacagctcgctcgtcagttgattggcagatcagacaagtccgcgctctgcttcaagcacaacaggcc

SEQ ID NO: 6780 - DNA, 1392 bp, synthetic construct; identical to SEQ ID NO: 6776
  misc_feature 1..1392: note = source = /note="Description of Artificial Sequence: Synthetic coding sequence"
  source 1..1392: mol_type = other DNA

SEQ ID NO: 6781 - DNA, 1392 bp, synthetic construct
  misc_feature 1..1392: note = source = /note="Description of Artificial Sequence: Synthetic coding sequence"
  source 1..1392: mol_type = other DNA
atggcctctgaaagcggcaagttgtggggtggcagattcgttggggctgtggatccaattatggagaaatttaatgccagcatcgcctacgacagacacttgtgggaggtggacgtccaagggtctaaggcttactcaagaggcttagaaaaagccggtttgctcacgaaagcagaaatggaccagatattgcacggattggataaggtagcagaagagtgggcgcaggggactttcaagctgaattcaaatgacgaagacatacatacagcaaatgaacgacgattaaaggagctcattggggccaccgcagggaagcttcacacaggcaggtctagaaatgaccaagtggtcactgacctgaggctgtggatgcgccagacgtgctccaccctgagcggtctcctgtgggaattaatcagaaccatggtggaccgtgcagaagccgaacgcgatgtgctcttccccgggtatacccatctacaacgggctcagccaatcaggtggagccactggattctctcacacgcggttgctctaactagagatagtgagcggcttctggaggttcgaaaacgcatcaatgtgctgccacttggcagcggtgctattgctggcaaccccttaggggtggaccgggagctattgagagcggagctgaatttcggtgccattaccctcaatagtatggacgcaacctctgagcgggattttgtagccgaattcttgttctgggccagcctctgcatgacgcatttaagccgaatggccgaagacctcatcctctattgtacaaaagagttctcatttgtacagttgtcagatgcttatagcacaggaagcagcctgatgccccaaaagaaaaatcccgattctctcgagctcataaggtctaaggcgggaagggtattcgggagatgtgccggtttgttgatgactctgaaagggttaccatcgacctacaacaaggacctgcaggaggataaagaggcagtattcgaggtgtccgatactatgtccgccgtgctccaggttgcaactggtgtcatttccactctccaaattcatcaggagaacatgggacaggccctgtcgcctgacatgctggcaactgacctggcgtattaccttgtgaggaagggcatgccctttaggcaggcccacgaagctagcggaaaggctgtgtttatggctgaaacgaagggcgtcgcattaaaccagttgtctctgcaggaactccagactatctcaccactgttctctggggatgtcatatgcgtgtgggattacggccactctgtcgaacagtacggcgctcttggcggcacagcgaggagctccgtggattggcagatacgacaggttagagccctgctgcaggcgcagcaggct

SEQ ID NO: 6782 - DNA, 1392 bp, synthetic construct
  misc_feature 1..1392: note = source = /note="Description of Artificial Sequence: Synthetic coding sequence"
  source 1..1392: mol_type = other DNA
atggcctctgagtccggaaaactttggggagggagatttgtcggagccgttgatcctatcatggagaagttcaatgcaagtatagcatatgatcggcacctgtgggaagttgatgtacagggatctaaagcatattctagaggattagagaaggccggactgctgactaaggcagaaatggatcagatcctacacgggctcgacaaagtcgctgaggaatgggcacagggaacatttaaactaaactctaacgatgaggatatacatacagccaacgaacggagacttaaagaacttataggagcaactgctggaaaattacatactgggaggtctcgaaacgatcaggtcgtgacagacctcagactatggatgagacagacttgctcgacactgtcggggctgctatgggaactaatacggactatggtggatcgggccgaagcagaacgcgatgtgctgtttcccgggtatactcatttacagagagcgcagccaatccgttggtcccattggatcctcagtcacgcagtcgcactgactagggattccgaaaggctcctcgaagttagaaagcggataaacgtgctgcccctagggtcaggagcaatcgcgggaaatccccttggagtcgatcgagaactgctgagggctgaactcaatttcggagctatcacacttaactccatggatgcaacttcagaacgggatttcgtggctgagttcctattctgggcctccctgtgcatgacacacctatccagaatggcggaagacctaatcctctactgtactaaagaattctcattcgtccagctgtctgatgcttattcaactggaagttcactcatgccccagaagaaaaaccccgactccctcgaactgatacgctctaaagctggacgggtgttcggacggtgtgctggactgctcatgactcttaaaggactcccttctacatacaacaaagatctccaggaagataaggaagccgtatttgaagtaagtgatactatgagtgcggtgcttcaggtggctacaggagtcatctccacactccagatccatcaggaaaatatgggacaggctctctcccccgacatgctcgccacagacttagcttattatttagttcgaaaagggatgccattcagacaggcccatgaggcctccgggaaagctgtctttatggccgagacaaaaggagtagccctaaaccagttgtccctccaggaactccagacaatctcgccactattctcgggagatgtgatatgcgtttgggactacgggcattccgtggaacagtatggggccttagggggaactgctagaagtagtgtggattggcagatccgccaggttcgcgccttgctccaggcccagcaagct

SEQ ID NO: 6783 - DNA, 1392 bp, synthetic construct
  misc_feature 1..1392: note = source = /note="Description of Artificial Sequence: Synthetic coding sequence"
  source 1..1392: mol_type = other DNA
atggccagcgagtcaggaaagctttgggggggccgtttcgtaggagctgtggatccaatcatggagaagtttaatgcttccatcgcatatgataggcacctttgggaggttgacgtgcaaggtagtaaagcctattcaaggggtctggagaaagccggccttctaacaaaagctgaaatggaccagatactacatggactggataaagtggcagaggaatgggcacaaggtacgttcaaattgaactctaatgacgaggatatacataccgccaacgagcgtagactaaaagaattgattggtgcgaccgctggtaagttgcatacagggaggtcgcgaaatgatcaagtcgtaaccgacctgaggctttggatgagacaaacttgttctacattgtcaggattgttgtgggaactcataagaaccatggtggatagggcagaggcagaacgtgacgtactattccctggttacactcacctccaaagagcacagccgatcaggtggtcgcactggattctctctcatgccgtcgcactcacaagggactctgaaaggttactcgaggtgagaaagcgcataaatgttttgccactgggttctggtgccattgccggaaacccattgggcgtagatcgggaacttcttcgagctgaattgaattttggtgctattaccttgaattctatggatgctacaagcgagcgtgattttgtggccgagttcttgttttgggcttctttatgcatgacccacttatctcgaatggcggaagatcttatcctgtattgtacgaaagaattctctttcgtccaattgtcggatgcatatagtactggaagcagcttaatgccacagaaaaagaaccctgatagtctagaattgattcgttccaaggctggacgagttttcggaaggtgtgctgggttattgatgacattgaagggtctgccgagcacttacaataaggaccttcaagaggataaagaagcagtgttcgaggttagtgataccatgtccgcagtgctacaagttgccactggagttatttcgaccttacaaattcatcaagagaacatgggtcaagcactctctccagatatgctagcaacagacttggcttactatctggtacgaaagggcatgccctttagacaggcacatgaggctagcgggaaggcagtgtttatggcagaaacaaagggtgtcgcactaaatcaactgtcactgcaggagctgcaaaccatatcacctttgttttctggtgatgttatatgtgtttgggactacggtcacagtgttgagcagtatggggcacttgggggtacagctagaagttcggtcgattggcaaatacgccaggtcagagctcttctccaagcccagcaggct

SEQ ID NO: 6784 - DNA, 1392 bp, synthetic construct
  misc_feature 1..1392: note = source = /note="Description of Artificial Sequence: Synthetic coding sequence"
  source 1..1392: mol_type = other DNA
atggcttcggaatcagggaagttgtggggcgggagattcgtcggcgctgtcgatcctatcatggagaaattcaacgcctctatcgcttatgatcgccatttgtgggaagtggacgtgcaggggtcgaaggcctactcccggggcttggagaaggcggggctgctgaccaaagcagagatggatcagattctgcacggactggacaaggttgcggaggaatgggcacaaggaaccttcaagttgaattctaacgacgaagatatccacactgcaaacgagcgcaggctgaaggaactgatcggagcaactgccggaaaattgcacacgggaagatcccggaacgatcaggtcgttaccgacctgaggctctggatgcggcaaacctgctcaactttgtcgggactgttgtgggagttgatcagaactatggtggatcgcgcagaggccgaacgggacgtcctttttcccggttatacccatctgcagcgagcgcaaccgatccggtggtcgcattggattttgtcacacgccgtcgcgctcacccgggactccgagcgcctgctggaagtgcggaagcggatcaatgtgctgccgctcggaagcggcgccatcgccggaaatccactcggtgtcgatcgggagttgctgcgtgcagagcttaacttcggtgcaattactctgaactcgatggacgccactagcgaacgggattttgtggccgaattcctcttctgggcctcactctgtatgacccaccttagccgcatggcggaggacctgatcctctactgcacgaaggaattcagctttgtgcagctgtccgacgcgtacagcaccggctcaagcctgatgccgcagaaaaagaatcctgactccctggagctcatccgcagcaaggctggacgggtgttcggcagatgcgccggcctgcttatgacgctgaagggactgccgtcgacgtacaacaaagacctccaagaagataaagaagccgtgttcgaagtcagcgacaccatgagcgcagtgctgcaggtggctaccggggttatctcgaccctccagattcaccaggagaatatgggacaggctctgtcgcctgatatgctcgcgaccgacctggcgtactaccttgtgagaaagggaatgccatttagacaagcccatgaggccagcggaaaggctgtgttcatggcggaaaccaaaggagtcgcactcaaccagctgtcgcttcaggaacttcaaactatctcgccgctgttctcgggagacgtgatatgcgtctgggactacggtcacagcgtggaacaatacggcgcgctgggcggtacggcccgctctagcgtggactggcagatccggcaggtccgggcgctgttgcaagctcaacaggcg

SEQ ID NO: 6785 - DNA, 1392 bp, synthetic construct
  misc_feature 1..1392: note = source = /note="Description of Artificial Sequence: Synthetic coding sequence"
  source 1..1392: mol_type = other DNA
atggcctccgaatcgggaaagctgtggggcggccgattcgtgggtgccgtcgatccgatcatggagaaattcaatgccagcatcgcatacgaccggcacctgtgggaggtggacgtccagggctcaaaggcgtactcgagaggactggaaaaggctggcctcctgacgaaggctgaaatggatcagattctgcacgggctggataaagtggcagaggagtgggcccagggtaccttcaaactgaattctaacgacgaggatattcacactgcgaatgaacggcgcctgaaggagctgattggtgccactgctgggaaacttcacactggacgctcgcggaacgaccaggtcgtgactgacctccggctgtggatgcgccagacctgctcaaccctgtccggactgttgtgggaactgattaggaccatggtggaccgcgccgaagccgagcgggatgtcctcttcccgggctacacccatctgcagcgggcgcagccaatccgctggtcccattggatcctttcccatgcagtcgcgctcacccgggactcagagcgtctgctcgaagtgcggaaacgaatcaatgtgctcccgctgggctcaggcgccatcgcaggcaaccccctgggagttgacagggaactcctgcgggccgaactcaacttcggagcaataacgctgaatagcatggacgcaaccagcgagcgggacttcgtggcggagtttttgttctgggcctccctgtgtatgacccatttgagccggatggccgaagatttgatcctgtactgcaccaaggagttcagcttcgtgcaactgtccgacgcgtacagcactggatcgtcgctgatgccacaaaagaaaaacccagactcactggaactgatccgtagcaaggcaggaagagtgtttggaagatgcgcgggacttctcatgaccctcaagggccttcctagcacttacaacaaggacctccaggaagataaggaagcggtgttcgaagtttccgacaccatgtctgcagtcctgcaggtggcaaccggagtgattagcaccttgcaaatccaccaggagaacatggggcaagccctgagcccggacatgctcgccaccgacctggcatactacctggtccggaagggaatgccattcagacaggcacatgaagcatcggggaaagccgtgtttatggccgagactaagggtgttgctttgaaccaactgtccctgcaggagctccaaaccatcagcccactcttttccggagatgtcatatgcgtttgggactacggtcactccgttgaacagtatggagccctgggagggactgcccgctcttccgtggactggcaaatccggcaggtgcgggcgttgctccaggcccaacaggct

SEQ ID NO: 6786 - DNA, 1392 bp, synthetic construct
  misc_feature 1..1392: note = source = /note="Description of Artificial Sequence: Synthetic coding sequence"
  source 1..1392: mol_type = other DNA
atggccagcgagtcagggaagctgtggggcggccgcttcgtcggcgcagtggacccaattatggagaagtttaatgcttctatcgcttacgataggcacctgtgggaggtggatgtgcaggggagcaaagcttattcccggggattagagaaggctggtttactgactaaggccgaaatggatcaaatccttcatggactcgataaagtagccgaggaatgggctcaggggacctttaagctcaactctaacgacgaagatatccacactgccaatgaaagaaggctgaaggagctgatcggagctaccgctgggaaactacacaccgggagaagtcgcaatgaccaggtggtcaccgacctgcgtctgtggatgagacagacctgctctaccctgagtgggctcctgtgggaactgatcagaaccatggtggatcgggctgaggcagaacgggatgtgctatttccaggatatactcatcttcagcgggctcagccaatccgctggagtcattggattctgtctcatgccgtggccttaaccagagatagcgaacggctgctagaggtgcggaagagaatcaatgtgctccccctgggctcaggcgctatagccggtaaccctctgggcgtcgaccgagaactgctacgagccgagctcaacttcggcgctataaccctgaattccatggacgccaccagcgaacgggactttgtcgctgagttcttattctgggccagcttatgcatgacccatctgtccagaatggccgaggaccttatactctactgcacaaaagaatttagttttgtccaactgtccgacgcatattccacaggctcttccctgatgccacagaaaaagaaccctgactccctagaactgatcaggtctaaagctgggcgggtgttcggccggtgcgcagggctgctgatgacactcaaagggctcccaagtacatataacaaggacctccaagaagataaagaagcagtctttgaggtgtctgacactatgtccgctgtcctgcaggtggccaccggcgtgataagcaccttacagatacaccaggagaacatgggccaggctctctctccagatatgctggcaaccgatcttgcctattatttggtcaggaaggggatgccttttaggcaggcccacgaagctagcggcaaggccgtgttcatggccgagactaaaggcgtggctctaaaccagttgagcctgcaggagctccagacaatcagtccactgtttagtggcgatgtcatttgtgtttgggattacggccattctgtggagcaatacggcgctctgggtggtaccgcaagaagcagcgtagactggcagataagacaggtccgtgccctgttacaggcacagcaggct

SEQ ID NO: 6787 - DNA, 1392 bp, synthetic construct
  misc_feature 1..1392: note = source = /note="Description of Artificial Sequence: Synthetic coding sequence"
  source 1..1392: mol_type = other DNA
atggcctccgagagcggtaagctgtggggaggtagatttgtgggggcagtggatccaattatggagaaattcaacgcaagcattgcttatgaccggcacctgtgggaagtggacgttcaaggctccaaggcttactcaagaggactggaaaaggcaggactgcttaccaaagccgaaatggatcagattctccatggccttgataaggtggccgaggaatgggcccaaggaacctttaagctgaactcgaatgacgaagatattcacactgcaaacgagcgcagacttaaggaactcattggagccaccgcggggaagttgcataccgggcggtccaggaacgaccaggtcgttaccgatctgagactttggatgcgacagacctgctcaactctttctggacttctttgggagctgatacggaccatggtggatagggcagaggcagaaagagatgtgctctttcctggatatacccatcttcagagagcccaaccaattcggtggtcccattggattctgtcacacgctgtcgcattgacccgcgactcggaaagacttctggaggtgagaaagagaattaacgtacttccacttggatcgggcgccatcgcaggaaacccgcttggtgtggatagggagcttctgagagcagaactcaactttggtgccatcaccctcaactcaatggacgcaacgtcagaacgcgatttcgtcgcagagttcctgttttgggcttcgctgtgtatgactcatctgtcccgcatggcagaggatcttattctttactgcaccaaagagttttcgtttgtgcaactgtcagatgcatacagcaccggttcatcactgatgccacaaaagaagaaccccgattccctggagttgattagatcgaaagcaggaagagtctttggcaggtgtgcaggtttgcttatgactctgaaaggactgccttctacctacaataaggatctgcaagaggacaaggaggccgtgtttgaagtgtcggataccatgtcggccgtgcttcaggtcgcaactggcgtgattagcactctgcaaatccatcaagagaatatgggtcaagcattgtcccctgatatgctcgcaactgacctggcatactaccttgtgcgaaagggcatgccttttcgtcaggcacacgaagcatcaggtaaggccgtgttcatggctgaaaccaagggagtggctcttaatcagctgtcgctccaggaactccagactatttcgcctctgttttccggggatgtcatatgtgtttgggactacggacattcagttgagcaatacggagccctgggcggaacggcccgttcgagcgttgactggcaaattagacaggtgcgggcactgctccaagcccaacaggcc

SEQ ID NO: 6788 - DNA, 1392 bp, synthetic construct
  misc_feature 1..1392: note = source = /note="Description of Artificial Sequence: Synthetic coding sequence"
  source 1..1392: mol_type = other DNA
atggcttccgagtcaggcaaattgtggggaggcagattcgtgggcgctgtggaccctataatggagaaattcaatgctagtattgcctatgatagacatctatgggaggtggacgttcagggatctaaggcctattcacgaggccttgagaaggcgggtttgcttactaaggcagaaatggatcagattttgcacggactggataaagtcgcggaggagtgggcccaagggactttcaaactgaacagcaatgacgaagatatccacaccgcaaacgagcggcgtctgaaggaattaatcggcgctactgccggaaagctgcatactgggcgctccagaaacgatcaggttgtcaccgatctgcggctgtggatgcgtcagacctgtagtaccctaagtggcttgctgtgggagctaatccggacaatggtcgacagagctgaggctgagagggacgtactgttcccaggctacacccatctgcagcgggctcaacccatccgttggagccactggatactctcccacgctgttgctctgactcgggattctgaacgcttgctcgaagtgagaaagagaattaacgtgttgcccctgggctctggcgcaattgctggtaacccactgggcgtggatagggagctgctgcgcgccgaacttaatttcggtgcaattaccctgaattctatggatgcgacctccgagagggacttcgtggccgagttcttgttttgggcctcactctgcatgacccacttatcacggatggccgaggatctgattctctattgtacaaaggagttctcattcgtccagctgtcagacgcctatagcaccggatcgagtctgatgccccagaaaaagaatcctgattcccttgagctgatccgaagcaaagccggaagggtgtttgggcggtgtgctggcctcctgatgacactcaagggactgccctcaacttacaataaagacctacaggaggataaggaagcggtgttcgaggtgagtgacacaatgagcgctgtactgcaggtggccacgggagtgatatcaactcttcagatccaccaggagaatatgggacaagccctgtcacccgacatgctcgcaacagacctggcgtactacctagttcgcaaagggatgcccttccgccaggcccacgaggcatctggtaaagccgtgtttatggcggagaccaaaggcgttgccctcaaccagctcagtctccaagaactgcagactatcagcccgctgtttagtggtgatgtgatttgcgtgtgggactatggacattcagtggagcagtacggggccttagggggaacagctaggtccagcgtggactggcagataaggcaagtacgcgcccttctgcaggctcagcaggcc

SEQ ID NO: 6789 - DNA, 1392 bp, synthetic construct
  misc_feature 1..1392: note = source = /note="Description of Artificial Sequence: Synthetic coding sequence"
  source 1..1392: mol_type = other DNA
atggcttcagaatcaggaaaattatggggtggacgattcgttggagcagtcgatcctataatggaaaaatttaatgcatctatagcatatgatagacatttatgggaagtggatgtacaaggatcaaaagcttattctcgtggattagaaaaagcaggtttattaactaaagctgagatggatcaaattttacatggattagataaagtagccgaagaatgggcacaaggtacttttaaattaaattcaaatgatgaagatatacatactgcaaatgaaagaaggttaaaagaattaattggtgccactgctggaaaactacatactggaagatctagaaatgaccaagttgtaactgatttgagactttggatgagacaaacatgctccacactttcgggtcttctttgggaattaattagaactatggttgaccgtgcagaagcagaaagggatgttttattcccaggatatacacatttacagagagcacaacctattagatggagtcattggattttgtctcatgctgtcgcacttacacgtgattcagaacgacttttagaagttagaaagagaattaatgttctaccattaggaagtggagcaattgcaggaaatccattaggtgttgatagagaattacttcgtgcagaattaaatttcggtgctattactcttaattctatggatgcaacttcagaaagagactttgttgctgaatttcttttttgggctagtttatgtatgacacatttatcaagaatggcagaagatcttattttatattgtactaaagaattctcatttgttcagctttcagatgcatattcaacaggatcttctcttatgccacaaaaaaaaaatccagattctttagaacttataagaagcaaagctggaagagtttttggaagatgtgcaggtcttttaatgacattaaaaggacttccatcaacttataataaggacttacaagaagataaagaagctgtctttgaagtttcagatacaatgtctgctgttttacaagttgcaacaggagttatatctactttacagattcatcaagagaatatgggacaagcacttagtccagatatgttagctacagatcttgcatattatcttgtcagaaaaggaatgccttttcgtcaagctcacgaagcatcaggaaaagcagttttcatggcagaaactaagggagtagctcttaatcaattatccttacaagaacttcaaactatttcaccacttttctctggagacgtcatttgtgtttgggattatggacacagtgtagaacaatatggagctttaggtggaactgcaagatcaagtgttgattggcaaattcgtcaagttcgagcattattacaagcacaacaagca

SEQ ID NO: 6790 - DNA, 1392 bp, synthetic construct
  misc_feature 1..1392: note = source = /note="Description of Artificial Sequence: Synthetic coding sequence"
  source 1..1392: mol_type = other DNA
atggcctcggaatcaggtaaactctggggtggtcggtttgtcggtgcggtggaccctataatggagaaattcaacgcgtcgatcgcatacgaccggcacctctgggaggtggacgtgcaaggatccaaagcatactcccggggtctggaaaaggcgggacttctcaccaaggccgaaatggatcaaattctgcacggtcttgataaggttgcagaggaatgggctcaaggaacctttaagctgaattcaaacgatgaggatatacataccgcaaacgaacgcaggctgaaagaactgattggcgcaactgcaggaaagctccatactgggagatcccgtaacgaccaagtcgtcaccgatcttaggctttggatgaggcaaacttgtagcactctctctggactcctttgggagcttatccgaactatggtcgatcgggcagaggcagaaagagacgttcttttccccggatacacgcatctgcaacgggcacagcctatccgctggagccattggatactgtcacacgccgtggcgcttactcgtgattccgaaagacttcttgaagtgaggaagcgcattaacgtcctcccactgggatcaggagctatagcgggaaatccgcttggcgtggaccgtgagctgctccgtgccgagctgaactttggagcaattactctgaactctatggatgcgacttcggagcgtgattttgtcgcagaatttctgttttgggcaagcctttgcatgacccacctgagccgcatggcagaagatctgattctttactgtaccaaagagttcagctttgtgcaactgtctgatgcatactcaacgggtagctcgctcatgccacagaagaagaatcctgactcgctggaacttattagatccaaggcgggtagagtgttcggaagatgtgcaggactgctgatgacccttaagggactgcccagcacgtacaataaggatcttcaagaggataaagaagccgtgtttgaagtgtccgatactatgtctgcagtgttgcaggttgcaacgggagtcattagcacccttcaaatccatcaagaaaacatgggacaggcactctcgcccgacatgttggccacggatctggcgtactacctcgtgagaaaaggcatgccatttagacaagctcatgaagcatccggcaaggcagtgttcatggccgagactaagggagtggcattgaatcaactttctctgcaagaactgcaaaccatttcgcctcttttttcgggtgatgtgatttgcgtgtgggactacgggcattccgtggaacagtatggcgctctgggtggaacggcacggtcgtcagtggactggcagattaggcaggtccgggcactcctccaagcacagcaggcc

SEQ ID NO: 6791 - DNA, 1392 bp, synthetic construct
  misc_feature 1..1392: note = source = /note="Description of Artificial Sequence: Synthetic coding sequence"
  source 1..1392: mol_type = other DNA
atggcctctgagtctggtaaactgtggggaggcagattcgtcggtgccgtcgatcccattatggagaaattcaatgcctctatcgcctacgaccggcacctgtgggaggtggatgtccagggctccaaagcttacagtagagggctcgagaaggctggtctgctcactaaagcggaaatggatcagatcctgcatggtctggacaaagtggctgaggagtgggcccagggcaccttcaaacttaacagtaatgacgaagatatccataccgctaacgaacggcgcctcaaagaactgatcggtgcaaccgccgggaaattgcacaccgggcgctctaggaatgaccaggtcgtgactgatctcaggctctggatgagacaaacttgcagcacacttagcggccttctgtgggagctcattaggaccatggtagatcgggcagaggcagaaagagatgtcctgttcccgggatacacgcacctgcaacgggcccaaccaattagatggtcacattggatcctgtcacatgcagttgccttgactagagattcagagcggctgctggaggtgcggaaacgcatcaatgtcctgcctctcgggtccggagccatcgccgggaacccccttggggtggatcgagagcttctccgcgccgagcttaactttggggcaataacattgaattccatggacgccacatccgaacgagactttgtcgctgaatttttgttctgggccagtctgtgtatgacccaccttagtcgaatggctgaggaccttattctctactgcactaaggagttctcattcgttcaactgagcgatgcttactccactggctcttcactgatgccccaaaaaaaaaatcccgactccttggagcttatccggtcaaaggccgggcgcgtatttgggcggtgtgcaggattgttgatgacccttaagggtctgccctccacttacaacaaggacctgcaggaggacaaagaggcggtgttcgaggtgagcgacaccatgtctgctgtgctgcaagttgccactggggtaatctccactctgcagatacaccaggaaaacatgggtcaagcgctttctccagacatgctggctaccgaccttgcttactacctggttcgaaaaggcatgccatttcgccaggcacacgaggcatccggtaaagctgtgtttatggctgagacaaagggtgtggcgctgaaccagctgtctctgcaggagctgcaaacgatcagtccgctgttttccggtgacgttatctgcgtttgggactatgggcatagtgtggagcagtatggcgctctgggaggcacggcccgcagcagcgtggactggcagatccggcaggtgagagctctcttgcaggcacaacaagcc

SEQ ID NO: 6792 - DNA, 1392 bp, synthetic construct
  misc_feature 1..1392: note = source = /note="Description of Artificial Sequence: Synthetic coding sequence"
  source 1..1392: mol_type = other DNA
atggcttccgagtctggcaagctatggggaggtagattcgtgggagctgtcgatccaatcatggagaagtttaacgcgtcgatcgcatatgataggcatctgtgggaggtggacgtccagggatctaaggcatacagtcgcggcctggaaaaagccggcctgcttacaaaggctgagatggatcagatcctccacggtttggataaggtcgcagaagagtgggctcagggcacattcaagctaaattcaaatgatgaggacatccacaccgccaacgaacggaggttgaaggagctcataggggcaacagcaggcaagttacacaccgggagaagcaggaacgaccaggtcgtaaccgacctacgactgtggatgcgacagacctgctccactctttccgggctcctgtgggaactgattcgcacaatggtcgacagagccgaagctgaacgggatgtcttattccctggctatacgcatctgcaacgtgcccagcccatcaggtggagccattggattttgtcccatgcggtggccctcacaagagatagtgagagactgttggaagtgaggaagaggatcaacgtgctgccgttgggctccggagctattgccggcaacccattaggggtggatcgcgagctcttgagggctgagctgaatttcggcgctatcaccctgaattccatggacgccacctccgagcgagactttgtggccgaatttcttttctgggcaagcctctgcatgacacacttgtcccgaatggccgaggatttgatcctctattgcacaaaggaattttcattcgtgcagttatccgatgcttactccaccggctcctccctcatgcctcagaagaaaaatccagactctctcgaactgatcaggagcaaggctgggcgagtttttggccgttgtgctgggctcctgatgacactcaaagggctgcccagcacctataataaggatctccaggaggataaagaagcagtatttgaggtctccgataccatgtccgccgtattacaggtcgctactggagtcatcagtacacttcagatacatcaggagaatatgggccaggccttgtctccagatatgcttgccaccgatttggcatactacttagtgcgaaaaggcatgcccttcagacaggctcatgaggcatcggggaaggcagtgttcatggctgagaccaaaggagtagcccttaaccagctctcccttcaggagctacaaacgatcagcccactgttttcaggggatgtcatatgtgtgtgggactatggccatagcgtcgaacagtatggtgccttaggaggaacagccagatccagcgtggattggcagattagacaagtccgagcactgttgcaggcccagcaagct

SEQ ID NO: 6793 - DNA, 1392 bp, synthetic construct
  misc_feature 1..1392: note = source = /note="Description of Artificial Sequence: Synthetic coding sequence"
  source 1..1392: mol_type = other DNA
atggctagcgaaagcggtaagctgtggggtgggaggttcgtgggcgctgtagatcctattatggaaaaattcaacgcctccatcgcatacgaccgtcacctgtgggaggtggatgtgcagggctccaaggcctatagccgcgggcttgagaaggccggtcttctcactaaggctgaaatggatcagattcttcatgggttagacaaagttgccgaagagtgggcccagggcacattcaaactgaattcaaacgatgaggacatacacacagcaaacgaaagaaggctgaaggagctcattggagccacggcgggcaagctccacacaggacggagtcgcaacgatcaagtcgtaactgacctgcgtctctggatgcggcagacctgttcaaccttaagcggattgctttgggagcttatccggaccatggtagaccgggccgaggctgaacgggacgtgctattccccggctatacccatctgcagcgggctcagcccattcgctggtcccattggattttgagccacgccgtggcactaacgagggactctgaacggcttctggaggttcggaagcgcattaacgtgctaccacttggatccggcgcgatagctggcaacccactgggggtcgatcgggagctactcagggcggaactgaacttcggagctattacgctgaactccatggacgccacaagcgagagggactttgtggctgagtttctgttctgggcctcactctgtatgacccatctgtctaggatggctgaagatttgatcttgtactgcactaaggaattctccttcgtgcagctcagcgatgcatattccactgggagcagtctcatgccacagaaaaaaaaccccgatagcctcgagcttatcagatccaaggccggccgtgtgttcggtcgatgtgccggattgctaatgacgctgaagggcttgccatccacctacaataaggaccttcaggaagacaaggaagccgtgttcgaagtgagcgacactatgtctgccgtattacaggtggctacaggggtgatctccactctgcagatccatcaggaaaacatgggccaggcactgagccctgacatgctggcgactgatctggcatattacctggtgcggaaaggtatgccattccggcaggctcacgaagcctcaggcaaggctgtttttatggccgagaccaagggagtagctctcaatcaattgtccctgcaggaactccagacaataagccctttgtttagtggagatgttatctgtgtctgggattacggtcatagcgttgaacagtacggtgccctgggaggaacagcccggtcgagtgttgattggcagatccggcaggtgcgagccctcctgcaggcacagcaggcc

SEQ ID NO: 6794 - DNA, 1392 bp, synthetic construct
  misc_feature 1..1392: note = source = /note="Description of Artificial Sequence: Synthetic coding sequence"
  source 1..1392: mol_type = other DNA
atggcgtcagaatccggcaaactctggggcggtcggttcgtgggagccgttgacccaatcatggaaaagttcaacgcaagcattgcgtacgataggcacttgtgggaggtggatgtccaggggtccaaggcctattcacggggactcgagaaggcagggctccttaccaaagccgagatggaccagattttgcatggattggacaaggtcgcagaagagtgggcccaaggcacttttaagctcaactccaatgacgaggatattcacacggcgaacgaacgtagactgaaggagctgatcggagccaccgcaggtaagctgcacactggacgctcgagaaatgaccaagtggtgaccgatctcagactgtggatgagacaaacctgttccacgttgtccggattgctctgggaattgatcagaactatggtggaccgcgctgaggccgaacgcgacgtgctgtttcccggctacacccacctgcaacgggctcagcctatccgctggtcccattggatcctgtcgcacgcagtggcactcactcgggactcggaaaggttgctcgaagtcagaaaacgcatcaatgtgctcccgttggggagcggagcgatcgcaggaaacccgctcggagtcgatcgggagctgctgcgggctgaactcaatttcggcgccatcactctgaattcaatggatgccacttcggaacgggatttcgtggcagaatttctcttctgggcctcactgtgcatgacccatcttagccgcatggcggaggacttgattctctattgcactaaagaatttagcttcgtccagctctccgacgcctattctaccgggtcgtccctcatgccacagaaaaagaacccggacagcctggaactgatcaggtcaaaggcgggaagagtgttcggccggtgtgcagggctcctgatgaccctcaagggtctgccgtcaacctacaacaaggatctccaagaggacaaggaagccgtgttcgaagttagcgacactatgtccgctgtcctccaagtcgccacgggcgtgatcagcacgcttcagatccaccaggagaacatgggccaggctctttcgccggatatgttggctactgatctggcatactacttggtgcgcaagggaatgcctttccggcaagctcacgaagcatcaggaaaggcagtctttatggcggagactaagggtgtcgctctgaatcaactgtcactccaggaactgcagaccataagccctctgttctcgggcgatgttatctgcgtgtgggactacggacatagcgtggagcaatacggcgcgctggggggtactgcccgctcaagcgtggactggcagatccgccaggtgcgcgctctgctgcaagcccagcaggct

SEQ ID NO: 6795 - DNA, 1392 bp, synthetic construct
  misc_feature 1..1392: note = source = /note="Description of Artificial Sequence: Synthetic coding sequence"
  source 1..1392: mol_type = other DNA
atggcgtcggagtcgggcaagctctggggtggacgcttcgttggagcagtcgaccccattatggagaagttcaatgcaagcatcgcatacgatcgccacctctgggaggtggatgtgcaaggatcgaaggcatactcgcggggacttgagaaggcagggcttcttaccaaggccgagatggatcagattctgcatggcctcgataaggtggcagaagaatgggctcaaggcacctttaaactgaacagcaacgatgaggatattcataccgcaaacgaacgtaggctcaaggaactgattggtgcaacggcaggcaagctgcataccggaagatcccgaaacgatcaggtggtcacggacctgagactctggatgcgacagacgtgtagcacccttagcgggctgctgtgggagctcattcgcacgatggtcgatcgtgcagaagccgagcgcgatgtgctctttcctggttacactcatcttcagagggcccaaccgattagatggtcccattggattctttcacatgcagtggcgcttacgagggactccgaacgactcctggaggtccggaagagaatcaatgtcctgccactgggatccggtgcaattgccggaaaccctttgggagtggacagagagctgcttcgcgcggaactcaacttcggagcaattactctgaactccatggacgcaacctcggaaagggattttgtcgctgaatttctgttctgggcgtccctctgcatgacccacctgtcccgcatggcggaggatctgatcctttactgcaccaaggaattctcctttgtgcaattgtcggacgcctacagcaccggatcatcgctcatgccacaaaagaaaaatcctgattccctggagcttatccgcagcaaggcaggaagagtgtttggacggtgtgcagggctgctgatgaccctcaagggacttccttctacttacaacaaagatctgcaggaagataaggaagcagtgtttgaagtgtcggataccatgtccgccgtgcttcaggtcgcaaccggagtgatatcgactctgcagatacaccaggagaatatggggcaggcactctcgccagatatgctggcaaccgacctggcttactacctcgtccggaagggtatgccttttcggcaagcacatgaggcgtcaggcaaagcagtgtttatggctgagactaagggggtcgcccttaaccagctttcgttgcaagagctccagactatcagcccactgttttccggagatgtgatttgtgtgtgggactacggacattcagtcgaacaatacggagcacttggcggtacggcaagatcatcggtcgactggcagatccggcaggtgagagcccttctgcaagcccaacaagca

SEQ ID NO: 6796 - DNA, 1392 bp, synthetic construct
  misc_feature 1..1392: note = source = /note="Description of Artificial Sequence: Synthetic coding sequence"
  source 1..1392: mol_type = other DNA
atggccagcgagagtggcaaactgtggggaggtaggtttgtgggcgctgtagaccccataatggagaaattcaatgcctccatcgcctatgaccggcacttgtgggaagtggatgtgcaggggagcaaggcatactcaagaggcctggaaaaggcgggcttactgacaaaagcagagatggatcagattctgcacggattggataaagtggccgaagagtgggcacagggtacttttaagctgaattccaacgatgaggacatccatacggctaatgaacgccggcttaaggaactgatcggcgctaccgctggcaaattgcataccgggaggagtcgaaacgatcaggttgtgactgacctgaggctgtggatgaggcagacctgttctacactgtcaggtctcctctgggagctcatcaggaccatggtcgatcgggctgaggccgagcgagacgtcctcttcccaggctatacccatctgcaacgggcccaaccaataaggtggagtcattggattttgagtcatgctgtggcactgactagggactccgaaaggctgctcgaagttaggaaaagaattaacgttcttcccctgggatccggcgctatcgcagggaaccccctcggggttgacagggagctccttcgggctgaacttaacttcggcgctattaccctgaactccatggatgccacctccgaacgagacttcgttgccgagtttcttttctgggctagcctgtgcatgactcacctctcccgaatggccgaagacttaatactgtattgcaccaaggaattttcctttgtacagctctctgacgcctactcaacaggatcttcactgatgccacagaagaaaaaccctgactcactggagctaattagaagcaaggccgggagagtgttcggtaggtgcgccggactgcttatgaccctgaaagggcttccaagtacatataacaaggaccttcaggaggataaggaggccgtatttgaagtttccgatacgatgagcgccgtgttacaagtggcgacaggagtaattagcacgttgcagatccatcaggaaaacatgggtcaggccctctcacctgatatgctcgccaccgacctcgcctattacctcgtgaggaagggtatgccgttccggcaggcgcacgaagcatctggcaaggccgtgttcatggctgaaacgaagggcgttgccctaaatcagctctctctgcaggaactgcaaacaatctctcccctctttagcggcgacgtgatatgcgtatgggattatggccacagtgtggaacagtacggagcgcttggggggacagcacgtagctctgtggattggcagatccggcaggtccgcgctttgctgcaggcgcagcaggcc

SEQ ID NO: 6797 - DNA, 1392 bp, synthetic construct
  misc_feature 1..1392: note = source = /note="Description of Artificial Sequence: Synthetic coding sequence"
  source 1..1392: mol_type = other DNA
atggcgtcggaatcgggaaagttgtggggagggaggttcgtgggagctgtagacccgatcatggaaaagttcaatgcctccatcgcatacgaccgacatctctgggaagtcgacgtgcagggaagtaaagcatacagccggggtctggagaaggcgggtctgctgactaaagcggaaatggaccagatcctgcacggactggacaaggtggcagaagagtgggcgcagggcacttttaagctcaactccaatgacgaggatatccatacggccaatgagcgtcggctgaaagaactgatcggtgctactgctggtaaactgcataccggtcgctccagaaacgaccaagtggtgaccgatcttcgcctctggatgcgacaaacctgcagcactctctccgggctgctctgggaactgattcgcactatggtcgaccgagcagaagcggagcgcgacgtcctgttcccgggatacactcacctccaaagagcccaacccattagatggtcccactggattctgagccatgcagtggctttgacccgcgactcggagagactcctcgaagtccggaagaggataaacgtgcttccattgggttctggcgcgatcgcgggaaacccactgggagtcgatagggaactcctgcgcgccgaattgaacttcggcgccattacgttgaactcgatggacgcaacttccgagagagatttcgttgccgaattccttttctgggcttctctgtgcatgacccacctgagccggatggcggaggatctgattctgtactgcactaaggaattttcattcgtccagctgtccgatgcgtattcgacggggagcagcctgatgccgcagaagaagaatccagattcgctggagttgatcagatcgaaggccggacgggtgtttggacggtgcgccggtctgcttatgaccctgaaagggctcccgtccacgtacaacaaagacctgcaggaggacaaggaggctgtgttcgaagtctccgataccatgtcggctgtcttgcaggttgccaccggcgtgatatcaaccctccagatccatcaggaaaacatgggccaagccctgtcaccagacatgctcgcgactgatcttgcatactacctggtgagaaagggaatgccgttccgccaagcgcacgaggcatcaggaaaggccgtgttcatggctgaaacgaaaggagtagcactcaatcagctgtcgctgcaagaactccagactatctccccgctttttagcggagacgtgatctgtgtctgggattacgggcactcagtggaacagtacggagcactcggggggaccgcgcgctcctcagtggactggcagatccgccaggtgagagctctgttgcaagcgcaacaggcg

SEQ ID NO: 6798 - DNA, 1392 bp, synthetic construct
  misc_feature 1..1392: note = source = /note="Description of Artificial Sequence: Synthetic coding sequence"
  source 1..1392: mol_type = other DNA
atggcttctgaaagtggcaaactgtggggaggaaggttcgtgggagctgttgatcctataatggagaaatttaacgcctctatcgcttacgatagacacttgtgggaagtggacgtgcagggcagtaaagcgtattctcgcggcttagaaaaagccggcttgttgaccaaagccgagatggatcaaattttgcacggccttgacaaggtcgcagaggaatgggctcagggtacctttaaactgaactcaaatgatgaagacatccacacagcaaacgaaagaagattgaaggaacttattggagcaaccgctggaaagctgcacacaggccgctcaaggaatgatcaagtggtgactgatctgcgcctgtggatgcggcagacctgcagcacactgtctggcctgttgtgggagctcattagaacgatggtggacagggccgaagccgagcgggatgtcctgtttcccggatacacacatctccagcgggctcaacctatcaggtggtcacattggatcctgtcccatgctgttgcattgacacgcgattcagagcgactgctagaagtacgcaagcgaatcaacgtgttgccactgggcagcggagcgatcgcaggcaacccactgggtgtggatcgcgaactcctgagggcagagctcaatttcggagctataacgttaaactccatggacgccacctctgaaagggacttcgtggctgaatttctgttttgggccagcttgtgcatgacccacctaagcaggatggcggaggaccttatactttattgcaccaaggagttcagttttgtgcagctcagcgatgcatattccaccggtagcagcctgatgccccaaaaaaaaaatccagatagccttgagttgatccggagcaaggcaggtagggtcttcggcaggtgcgcaggactcctgatgaccttaaagggcttgccgagcacctacaacaaagatctacaggaagataaggaagctgtgtttgaggtttccgacactatgtctgctgtgttacaggtggcgactggcgtgattagtactctgcaaatccaccaagaaaacatgggccaagcattatcaccagacatgcttgctactgacctcgcatactatctcgttaggaaaggcatgcctttcagacaagcgcatgaggcttccggaaaggcagtcttcatggcagaaacaaaaggcgtggccctaaaccaactgtctcttcaagaacttcagacaataagccccctgttctctggagatgtgatttgtgtctgggattacggccacagcgtggagcaatacggcgctctgggcggaaccgcgagatctagtgtggattggcaaatccgtcaagtgcgcgcgttgctgcaggcgcagcaagcc

SEQ ID NO: 6799 - DNA, 1392 bp, synthetic construct
  misc_feature 1..1392: note = source = /note="Description of Artificial Sequence: Synthetic coding sequence"
  source 1..1392: mol_type = other DNA
atggcttccgaaagtggcaaattgtggggaggacgctttgttggagcagtggatcctatcatggagaaatttaatgcatcgattgcatacgataggcatttgtgggaggtcgacgttcaagggagtaaagcctattcgcgtggactagaaaaggctggcctgttgacgaaagctgagatggatcaaattctgcatggtcttgataaagtcgctgaagaatgggcccaaggtacattcaaactgaattctaatgatgaagacattcatacagctaacgaacgtagacttaaagaacttattggtgcgacggctggcaaactgcacacgggcagaagcaggaacgatcaagtcgtcacagacttgagattatggatgcgccaaacgtgtagcactttatccggcttgttgtgggaactcattcgtacaatggtagatcgtgctgaagctgaaagagatgttctttttccgggatacacacatcttcaaagggcacaacctattagatggagccattggattttatcccacgccgtcgctctaactcgcgactcagagagacttttagaagtaagaaagcgtatcaacgtactcccgttgggctcgggtgcaatcgctggcaatccgcttggcgttgatcgggaactgttaagagcggagttgaactttggggccatcactctgaattcaatggatgcgacctcagagcgggattttgttgctgagtttcttttttgggctagcttatgcatgactcatctgagccgcatggcagaggacttaatcttgtactgcacaaaagaattttcttttgttcaactcagcgacgcatatagtactggaagctcgcttatgccgcagaaaaagaatccagactccttagaattgatcaggtcaaaagctggccgcgtttttggaaggtgtgcgggtttacttatgacattaaagggtttgccaagcacgtacaacaaggaccttcaagaagataaagaagctgtttttgaggtgagcgatacaatgtccgctgtgctgcaggtggccactggtgttattagtacattacaaattcatcaagaaaacatgggacaagcgctttctccggatatgttagcgacagatttagcatattatcttgtcagaaaggggatgcctttcagacaagcgcacgaggcttctggaaaggccgtctttatggctgagactaaaggcgtagctttgaaccagctgtctctgcaggagctgcaaacgatctcacccctgttttcaggagatgtcatatgtgtgtgggattatggacattccgttgaacagtatggggctttgggcggtacagcacgcagctccgttgattggcaaatacgccaagttcgcgcattgctacaagcccagcaggca

SEQ ID NO: 6800 - DNA, 1392 bp, synthetic construct
  misc_feature 1..1392: note = source = /note="Description of Artificial Sequence: Synthetic coding sequence"
  source 1..1392: mol_type = other DNA
atggcaagcgaatctggaaagctgtggggaggacggttcgtaggggctgttgatcccataatggagaagtttaacgctagcattgcatacgataggcatctatgggaggtggacgttcaaggttctaaagcttactcaagaggcctcgagaaagctggtcttctcaccaaggccgaaatggaccagattttgcacggcctggacaaggtcgctgaagagtgggcccaaggaacattcaagctgaattctaatgacgaagatatccacacagctaatgagagaaggctcaaggaactgataggagctacggcaggcaagcttcataccggcagatcacgcaatgatcaggtggtgaccgatctcagactgtggatgcgccagacctgcagtacactttccgggctcctgtgggagcttatccgtacaatggttgatagggcagaggctgagcgcgacgtgctgttccccggatacacacacctgcaacgtgcccagcccattaggtggagccactggattcttagtcatgcagtggccctgaccagggactccgaaagattgttggaagtgaggaagcggataaacgttcttccccttggatctggagcgatcgcaggaaatccattgggcgtcgacagagagttgcttagagccgagctgaactttggggcaatcaccttgaactccatggatgccacctcagaaagagattttgtagccgagttcttgttctgggcaagcctctgcatgacacatttaagtaggatggctgaggatctgatcttgtactgcaccaaagaatttagttttgtgcaacttagtgatgcgtacagtactgggtctagtctcatgccccaaaagaagaatcctgactcactggagttgattagaagcaaggctgggagagtgttcggaaggtgcgctggcctgctgatgacgctgaagggattgccttcaacttacaataaggacttgcaggaagacaaagaggctgtgttcgaagttagcgacactatgagtgctgtattgcaggtggccaccggagtgattagcacactgcagatacaccaggagaatatgggtcaggctctcagcccggacatgctcgcgactgatttggcctactatctagttagaaagggaatgccatttcgccaggcacacgaggcctcgggtaaagctgtctttatggcagaaacaaaaggcgtggccctcaaccagctctctcttcaagaattgcagaccatcagcccacttttttccggtgacgtgatttgcgtgtgggactacggacattccgtagagcagtacggcgcgctcggaggcaccgcgcgatccagcgttgattggcaaattaggcaagtcagggctctcctccaagcccaacaggct

SEQ ID NO: 6801 - DNA, 1392 bp, synthetic construct
  misc_feature 1..1392: note = source = /note="Description of Artificial Sequence: Synthetic coding sequence"
  source 1..1392: mol_type = other DNA
atggccagtgaatctggaaagctgtggggagggaggtttgtgggtgccgtggacccgatcatggaaaagtttaacgcatccatcgcctacgaccgccacttgtgggaggtggatgtgcaaggcagcaaggcatactcgagaggcctcgaaaaagccggactgctcaccaaagcggagatggatcagattctccacggattggacaaggtggcggaggagtgggcccagggaaccttcaagctgaactctaatgatgaggacatccacaccgccaacgagagacgccttaaggagctgataggagctaccgcgggaaagctgcatactggaagatcccggaacgaccaagtggtgaccgatctgagactgtggatgcggcaaacgtgtagcactttgtcgggcctgctgtgggaattgatccggaccatggtggaccgcgcagaagcggaacgggacgtgctctttccgggatacacccacttgcagcgggcacagccgatccgctggtcccactggatcctgagccatgcggtggccttgacgcgcgactcggagagactcctcgaagttaggaaaagaatcaatgtcctccccctgggaagcggggcgatcgctggaaaccctctcggggtggacagggaactgctccgggcggaactgaattttggagccatcaccctcaattccatggacgccacctcagaacgcgacttcgtggccgagttcctgttctgggcctccctgtgcatgacccacctgtcacggatggccgaggacctgattctctactgtaccaaggaattctccttcgtccaactgtctgacgcctactcgactggctcctcactgatgccgcagaagaagaacccggattctttggagctgatccgctcgaaggcgggccgggtctttggacgctgtgctggccttctgatgaccctcaagggcctgccttcgacttataacaaggacttgcaggaggataaggaagcggtctttgaagtttccgatactatgtcggccgtgcttcaggtggccaccggagtcatcagcactctgcaaatccaccaagaaaacatgggacaggccctttcgccagacatgttggccactgatctggcttactacctggtccgcaagggaatgcccttccggcaagcccacgaagccagcggaaaggcagtattcatggcggaaaccaagggcgtcgctctgaatcaactctcgctgcaggaactgcagacgatctcaccactgttcagcggagacgtgatctgcgtgtgggactacggtcactctgtggagcagtacggagctctgggaggcacggcaagaagcagcgtggactggcaaatccgccaagtgcgagcacttctccaagctcagcaagct

SEQ ID NO: 6802 - DNA, 1392 bp, synthetic construct
  misc_feature 1..1392: note = source = /note="Description of Artificial Sequence: Synthetic coding sequence"
  source 1..1392: mol_type = other DNA
atggcctccgaatctggaaaactttggggggggagatttgttggagctgtagatccaatcatggaaaagttcaacgcctctatcgcctacgatcgccacctctgggaagtggatgttcaggggtctaaagcttattctaggggattagagaaagctggattattgacaaaagccgaaatggatcagatcctccacggattggacaaagtggcagaagaatgggcgcaggggactttcaagctgaattccaacgacgaggacattcatacagcaaatgagcgccggctcaaggaattaattggagctacagctggaaaactccatacagggaggtcacgaaacgatcaggtagtaacagatttgaggctctggatgagacagacttgttcaactctcagtgggctcctgtgggaattgatccggactatggtggatagagctgaagcagagagggatgtgctgttcccaggatatacacatctccaacgcgcccagcccattcggtggtctcattggatcctttctcacgctgttgctctcactcgggattccgaacggctgctcgaagtgcgaaagcgcatcaatgttctaccactcgggtctggagcaatcgccggaaaccctctcggagtcgatcgggaactcctacgcgctgaacttaatttcggggctattacattaaactccatggatgccacatccgagcgggactttgtcgcagagtttctcttctgggcatccctttgcatgacacatcttagtagaatggctgaagatctaattctatattgtactaaagaattctccttcgtacagctgtctgatgcctattcaacggggtcctcattaatgccacagaaaaaaaaccccgattctctcgaactcattcgatcaaaagccgggcgggtatttgggagatgtgctggactcttaatgacactgaaaggactcccctcaacttataataaagatctgcaggaagataaagaagccgtgtttgaagttagtgatacaatgtccgctgttctacaggtggctactggggtcatcagtacactccagattcatcaggaaaacatggggcaggccctgtctcctgatatgttagctactgatctagcatattaccttgtgcgaaaagggatgccattcaggcaggcgcacgaagcatccgggaaagctgtttttatggctgaaactaaaggggtggcactgaaccagctcagtcttcaggaactgcagactataagtcctctgttttcaggagatgtgatatgtgtatgggactatggacacagtgtggaacagtatggagccctgggaggaactgctcggagttctgtcgattggcagatcagacaggtaagggccttactacaggcacagcaagca

SEQ ID NO: 6803 - DNA, 1392 bp, synthetic construct
  misc_feature 1..1392: note = source = /note="Description of Artificial Sequence: Synthetic coding sequence"
  source 1..1392: mol_type = other DNA
atggccagtgagagtggtaaattgtgggggggacgatttgtcggcgcggttgaccctatcatggagaaatttaatgcctcaatcgcctacgatcgccacctgtgggaggtggacgtgcagggatcgaaggcttactctcgcggactcgagaaggcagggctgttgaccaaagccgagatggaccagatcctgcatggtctggataaggtagccgaggagtgggcccaggggacattcaaattaaattctaacgatgaggacattcatactgccaatgaacgccgtctgaaggaactcattggggccactgccggaaagttgcatactgggaggtcaagaaatgatcaggtagttacagatttgcgcctatggatgcgccagacatgctccacactttccgggctgctgtgggagctcatcaggactatggtcgatagagccgaggcagagagagatgtgctcttcccgggatacacacacctgcagcgggcccaacccatcagatggtcacactggattctttcacatgccgttgccctgacgagggattccgaacggctgctggaggtccggaagaggataaatgtcctccctctagggtccggagctatcgccggtaatccactcggagtggaccgggagcttcttcgtgccgagctcaatttcggtgctataacactgaacagtatggacgccacctcagaacgggattttgtggcagagttcttattctgggcatccctgtgcatgactcacctaagtaggatggcagaagatctgattctgtactgcacaaaggagttctcgtttgttcagctgtcagatgcgtattccaccggctccagcctgatgccacaaaaaaaaaaccccgattctctggagttgatccggtctaaggcaggccgcgtcttcgggcgctgcgccggactgctcatgactctcaagggcttgccttccacctacaataaagacctgcaagaagataaggaagctgtatttgaggtgagcgacacgatgagtgcggttcttcaggtggcgacgggcgtgatttcgacactgcagatccaccaggagaacatgggtcaggcactctcaccggatatgttggctaccgatctggcatactatttggtaagaaagggcatgccttttcggcaggcacatgaggctagcggaaaggcggtgtttatggccgagaccaagggagtagccttaaaccagctaagcctgcaggagctgcagactatttcccctctgttttcgggtgatgtaatctgtgtctgggattacggtcactcagttgagcaatatggcgctctgggcgggactgcccgttcctccgttgattggcagatcaggcaggtcagagctctcctccaggcgcaacaggcc

SEQ ID NO: 6804 - DNA, 1392 bp, synthetic construct
  misc_feature 1..1392: note = source = /note="Description of Artificial Sequence: Synthetic coding sequence"
  source 1..1392: mol_type = other DNA
atggcttctgaatcgggaaaactgtggggtggacggttcgtcggcgccgtagaccctataatggagaaattcaacgccagtatcgcttacgacaggcacctgtgggaggtcgacgtgcagggctcgaaggcgtatagccgaggtcttgaaaaagcgggcctgcttaccaaggcggagatggaccaaatcctgcacggactggacaaagtcgcagaggagtgggcgcagggaaccttcaagctgaattcgaacgacgaagatatccacaccgccaacgagcgccgcctgaaggaactcatcggggctaccgctggaaaactgcataccggacgctcgaggaacgatcaggtcgttacggacctccgactgtggatgagacaaacttgttcgacgctgagcgggctgctctgggaactgattcgtactatggttgaccgggcagaagctgaacgcgacgtgctctttcctggctacactcacctccagcgcgcgcagccgatccgctggtcccattggatcctgtcccatgctgtggcgctcaccagggatagcgagagactccttgaagtcagaaagcggatcaatgtgctcccactgggatccggggctatcgccggcaacccgctcggagtggatcgcgaactgctcagagcggaactcaatttcggagccattaccctgaacagcatggatgccacctcagagagagatttcgtggcagaatttcttttctgggcgtcattgtgcatgacccacttgagtagaatggctgaggatctcattctgtattgcacgaaagagttctctttcgtccagctctcagacgcctattccacgggatcgtcccttatgccgcagaagaagaatccggacagcttggaactgatccgttcgaaggcgggccgcgtgttcggtcgctgcgctgggcttctcatgactctcaagggattgcccagcacttacaacaaggacttgcaagaagataaggaggctgtgttcgaggtgtcggacaccatgtcggcagtgctccaggtggccacgggtgtcatcagtactctccagattcatcaagagaacatgggacaagccttgtccccagatatgttggccactgatctggcctactacctggtccgaaagggaatgccttttcggcaggctcacgaagccagcggaaaagccgtgttcatggccgaaactaagggagtggccttgaatcagctgtcactccaagagctccaaaccatctcgccactgtttagcggagacgtgatctgcgtgtgggattacggtcactcggtggagcaatacggagctctgggaggaaccgcccggtcctcggttgactggcaaatcaggcaggtgcgggccctgctgcaggcccaacaggct

SEQ ID NO: 6805 - DNA, 1392 bp, synthetic construct
  misc_feature 1..1392: note = source = /note="Description of Artificial Sequence: Synthetic coding sequence"
  source 1..1392: mol_type = other DNA
atggcctctgagtctggtaagctctgggggggccgctttgttggcgccgtagaccctatcatggagaagttcaatgcttcgatcgcatacgaccgccacctgtgggaagtggacgtgcagggctcaaaggcttactcacggggactggaaaaagccgggctgctcactaaagcggaaatggatcagatcttacacgggctcgataaagtcgctgaagaatgggcccagggaaccttcaaattaaactccaatgacgaagatatacacacagctaatgagagacgcctcaaagagctgatcggggcgactgcaggcaaactgcatactggacgcagtagaaatgatcaagtggtgactgatctgaggctctggatgaggcagacatgcagcacactgtctggactactctgggaacttatccgtaccatggtcgaccgggcagaagcagagcgcgacgtgctcttccccggctatacccatcttcagagagcccaaccaatccgttggagtcactggattttgagccatgctgtggcacttacccgggactctgagcgcctcctagaagtgcgcaaaagaataaatgtgctcccactcggatcaggggccatcgccggcaaccctcttggagtggatcgggagctgttgagagccgagctcaacttcggggcgatcacccttaacagcatggacgcgacgtctgagcgagacttcgtggctgaattcctcttctgggcctcgctgtgtatgacacacctgtctagaatggcagaggatctcattctctattgtaccaaggagttctcattcgtccagctctccgatgcctactccacaggctcttcgctaatgcctcaaaagaaaaaccccgattcactggagctgatacgaagcaaggctggaagggtctttggcagatgcgctggtctgctgatgaccctgaaggggctaccctccacgtacaataaagatctgcaggaggataaggaggccgtgtttgaggtgtctgatactatgtctgccgtgttgcaagtcgcaactggcgtcatttccacacttcagatccatcaagagaatatgggacaggcgttgtcccccgacatgctggcgacggaccttgcctactatctggtaagaaagggcatgcccttccgtcaggcacatgaggctagcggtaaggccgtctttatggcagaaacgaaaggtgttgctctgaaccaattatcactgcaggaactgcagaccatcagccccctcttttctggagacgtgatttgcgtctgggattacgggcattcggtggaacagtatggggccctgggcggaaccgctaggtcgtcggtagattggcagatcaggcaggtacgagcgctgctgcaggcccagcaggcc

SEQ ID NO: 6806 - DNA, 1392 bp, synthetic construct
  misc_feature 1..1392: note = source = /note="Description of Artificial Sequence: Synthetic coding sequence"
  source 1..1392: mol_type = other DNA
atggctagcgaatccgggaaattgtggggcggccggtttgtaggagcagtggaccccattatggagaaatttaatgcgtcgatagcatatgacagacatctgtgggaggtcgacgtgcagggtagtaaagcttactccagaggcctcgagaaggcagggctcctgaccaaagctgagatggaccagattctccatggtctcgacaaggttgctgaagagtgggcgcaaggtacctttaagctgaacagtaacgatgaggatatccatacagccaatgaaaggagattgaaagagttgattggagccacagcaggaaagttacatactgggcgcagtcgtaacgaccaggttgtcactgacctgcggttgtggatgcgccagacatgttcaacgctgtccgggcttctgtgggaactgatcaggaccatggtggatagggcggaagctgagcgggacgtcctgtttccaggttatacacatctacaacgggcacaacctatcagatggtcccactggatcctttcccatgctgtcgctctcacacgggactctgagaggctgcttgaggtgaggaagcgcattaacgttttgcccctcggctccggtgcaatcgctggcaaccctctgggtgttgatcgcgaattactgagagctgaactcaatttcggagccatcaccctgaacagtatggatgctacctcagagcgcgattttgttgccgagttcctcttctgggcatcgctctgcatgactcacctctccagaatggcggaagatctcattctttattgtacgaaagaatttagctttgtccagctttcggatgcgtacagcacagggagttcacttatgccacagaagaaaaatcccgacagcctggaactgatccgcagcaaggccggacgggtgttcggccgttgcgctgggttgcttatgacgctcaagggactgcctagcacgtacaataaagacctacaagaggacaaagaggcggtgttcgaagtatcagatacaatgtctgccgtgttacaggttgctaccggcgttatctctacactccaaatccaccaggagaacatgggacaggctcttagccctgatatgctggccaccgatctggcctactaccttgtgaggaaaggaatgccgtttaggcaagcacacgaggcctcaggcaaggctgtgttcatggcagaaacaaagggggtggcactgaaccagctttccttgcaagagctgcagacaatcagcccactcttcagcggtgacgttatctgcgtctgggactatggccacagcgtcgaacagtacggggccctgggcgggaccgctcgttccagtgtcgactggcaaattcggcaagtgagggccctcctccaagcacaacaggca

SEQ ID NO: 6807 - DNA, 1392 bp, synthetic construct
  misc_feature 1..1392: note = source = /note="Description of Artificial Sequence: Synthetic coding sequence"
  source 1..1392: mol_type = other DNA
atggcaagcgagtccggtaagctgtggggaggtagatttgtgggggcggtggaccctattatggaaaagtttaacgcaagcatcgcatacgatagacatctctgggaagtggatgtgcagggttccaaggcatacagcaggggtcttgaaaaagcaggccttctgaccaaggcggaaatggatcagattcttcatggtttggacaaggttgcagaagagtgggcacaagggacctttaaacttaacagcaatgatgaggacattcacactgcaaacgagaggagattgaaggaacttatcggtgcaactgccggcaagctgcacaccggccgttcaagaaatgatcaagtggttaccgatcttcgcctttggatgcgtcagacttgttccactctgtcgggacttctctgggaactcatccggacgatggtggatagagcagaggcggaaagagatgtgctttttccaggttacacgcaccttcaacgagcacaacctattagatggtcacattggatcctttcgcatgcggtggcacttactcgggatagcgaacgcctgctcgaagtcagaaaacgaattaacgtccttcctttgggatcgggggcaattgcgggaaatccgctgggcgtggatagagaactgctgagagccgaacttaacttcggagcaatcaccctgaacagcatggatgcaacctctgagagagactttgtcgcggaatttcttttctgggcctcactgtgcatgactcatctgtcgcggatggcggaagatctcatcctttactgcacgaaggaatttagcttcgtgcaactgagcgatgcctactcaaccggatcatcattgatgccacaaaagaaaaacccggactcccttgaactcattcggtcaaaggcgggacgggtgtttggtagatgcgccggacttcttatgactcttaaaggacttccatccacgtacaacaaagatctgcaagaggacaaggaagcagtctttgaagtcagcgacactatgtccgccgtcctgcaagtggcaactggagtcatatcgacccttcaaatccatcaagagaatatgggacaggcactttcccctgatatgttggctacggatcttgcatactacctggtccgaaagggaatgccttttcggcaagcacatgaagcatctgggaaggccgtgtttatggcggaaactaagggcgtggcactgaaccagctctccctccaagagcttcagactatttctccacttttctccggtgacgtgatttgtgtgtgggattacggtcattcggtggaacagtacggggcccttggggggaccgcaagaagctcggtcgattggcagatccggcaggtgagggcgctcctgcaggcacaacaggca

SEQ ID NO: 6808 - DNA, 1392 bp, synthetic construct
  misc_feature 1..1392: note = source = /note="Description of Artificial Sequence: Synthetic coding sequence"
  source 1..1392: mol_type = other DNA
atggcgtcggaatcggggaaactgtggggaggcagatttgtgggtgccgtggacccaatcatggagaagttcaacgcgtccatcgcatacgacagacatctctgggaggtggacgttcagggctcaaaagcctactcgcggggactggaaaaggcggggctcctgacgaaggccgagatggaccagattctgcacggcctggataaggtggccgaagaatgggctcagggtaccttcaagctgaactccaatgacgaagatatccatactgcgaacgagagacgcctcaaggaacttatcggagctaccgccgggaagctgcacactggacgcagccgcaacgaccaggtcgtgactgatttgcgcctctggatgcgccaaacttgctcgaccctctccggactgctgtgggaactcattcgcaccatggtggatagggccgaggccgagcgcgacgtcctgttcccgggatacacccatctgcagcgcgcgcagcctatcaggtggtcccattggattcttagccacgccgttgcgcttacgcgggactcggaaagactgctcgaagtcaggaagcgtatcaatgtgctgccactgggatctggagcaatcgcgggcaacccgctcggagtggaccgggagctgctgagagcagaattgaacttcggagcgattaccctcaatagcatggatgcgacttccgagcgggactttgtcgctgaattcttgttctgggcttccctgtgtatgacccacttgtcgagaatggcggaggacctgatcctgtactgcaccaaggaatttagcttcgtgcagctgagcgacgcctacagcactgggagctcgctgatgccgcaaaagaaaaaccctgactccctggaactgatccgcagcaaggcaggacgcgtgttcggccggtgcgcagggctcctgatgactctcaaggggttgccgtcgacctacaacaaagatctgcaagaggacaaggaggccgtctttgaggtgtcggacactatgtccgcagtgctgcaagtggcaacgggcgtgatcagcaccctccagatccaccaagagaatatggggcaggcactctctccggatatgctggccactgatctggcgtactacctcgtgcgcaagggaatgcccttccggcaagcccacgaggcgtcgggaaaggcggtgttcatggcggagactaaaggagtggcgctgaatcagctgtctctccaggaactgcagactatctcgcctctctttagcggggacgtgatttgcgtctgggactacgggcatagcgtggagcagtacggagcactcggaggaactgccagatcgtccgtggactggcagatccgccaggtgcgcgccctgctccaggcgcagcaggca

SEQ ID NO: 6809 - DNA, 1392 bp, synthetic construct
  misc_feature 1..1392: note = source = /note="Description of Artificial Sequence: Synthetic coding sequence"
  source 1..1392: mol_type = other DNA
atggcatcagaatcgggcaaactttggggaggccgattcgtgggggcagtcgaccccatcatggaaaagtttaacgcatccatcgcgtacgatcgacatctgtgggaagtggacgttcagggttccaaggcatactccaggggactggaaaaggcaggacttcttactaaggccgagatggatcaaattctgcacggactggacaaggtggcagaggaatgggcacaaggtacgtttaaacttaacagcaatgacgaggacattcatacggcaaatgagagacgactgaaggagctcataggagcgaccgcaggaaagctgcatactggacggagcagaaacgatcaagtggtaaccgaccttcggttgtggatgcgccaaacctgttccaccctgtcgggccttctgtgggagctgatccgcaccatggtcgatcgggccgaggcagaacgggacgtgctgtttccaggttatacccatttgcaaagagcgcaacccatcaggtggtcgcattggattctttctcacgcagtcgcattgactcgggattcggaacgtctgctggaagtgcggaagaggataaacgttctcccccttggatcaggagcgattgcggggaatccgctgggcgtcgatcgcgaactgcttcgcgccgagcttaacttcggtgcaatcacgcttaatagcatggatgcaacctcggaacgcgatttcgtggcagaattcttgttctgggcaagcctgtgtatgactcacctctcgaggatggccgaggacctcattctgtattgtactaaggaattctcatttgtgcaattgtcggatgcatactcgaccggctccagcttgatgcctcaaaagaaaaacccggacagtctggaattgatccgctccaaggccggcagggtgtttggacgctgtgccggcctccttatgacccttaaagggctgccatccacttacaacaaagaccttcaagaagataaggaagccgtgtttgaagtctcggacactatgtcggcagtgctccaggtggctactggtgtgatttccactctccagatccatcaagagaatatggggcaggcgctgtcccccgacatgcttgcaaccgatctcgcatactaccttgtgagaaagggaatgccttttagacaggcacacgaagcatcgggcaaggcagtgttcatggcggaaactaagggggtggcccttaaccaactctccctgcaggaacttcagaccatttcccctctcttttccggtgatgtgatttgtgtgtgggactacggacactccgttgaacagtacggtgcccttggtggtaccgctcgatccagcgtcgactggcagataagacaagtaagggcacttctgcaagcgcaacaggca

SEQ ID NO: 6810 - DNA, 1392 bp, synthetic construct
  misc_feature 1..1392: note = source = /note="Description of Artificial Sequence: Synthetic coding sequence"
  source 1..1392: mol_type = other DNA
atggcctcagagtccggtaagctgtggggcggcagatttgttggggcagtggacccgatcatggagaaatttaacgcctctattgcctatgatcgccacctgtgggaggtggatgtccagggaagcaaagcgtacagccgtggactggagaaggccggcctgcttaccaaggccgagatggaccagattttacacggactggacaaagtggccgaggagtgggctcagggaacgtttaagctgaactctaatgacgaagatatccatacagccaatgagcgtaggcttaaagaactgattggagctacggcagggaagctgcatactggccggtctcggaatgaccaagttgtgaccgatctccggctctggatgcgtcagacctgttcaacattgtcaggtctgctgtgggagttgatcagaactatggttgatagagcggaggccgaacgggatgtcctgttcccagggtatacccacctgcaacgtgctcaacccatcaggtggtcccactggatactttcacacgcagtggccctcacgagagattcagagcggttgctcgaggttaggaaaagaatcaatgtgctccccctcggaagcggagctatcgcaggcaacccgctcggggtggatcgggagctcctacgagctgagttgaattttggcgccattaccctcaacagcatggacgctacaagcgaacgggactttgttgccgaatttctattttgggcaagtttgtgcatgactcacctcagccgcatggcagaagacttgattctatattgtaccaaggagttctcgtttgtccagttgagcgacgcttacagtacaggatcatcccttatgcctcagaaaaaaaaccccgacagtcttgagttgattcggagtaaggccgggcgggtctttggaagatgcgctggcttgttgatgacgctaaaaggtcttccatcaacgtacaacaaggacctgcaggaggataaggaggctgtctttgaagtttctgacaccatgtcagccgttctgcaggtggcaaccggcgtgatttcaacattgcagattcatcaggaaaacatgggacaggccctgagccctgatatgctcgcgactgatctagcgtactatttggtcagaaagggcatgccctttcgacaggcgcacgaggcctccggcaaggccgttttcatggcagagaccaaaggcgtggcgctgaaccaactgtctctgcaggagcttcaaactatctcccccttattcagcggggacgttatctgcgtgtgggattatggacattctgtcgagcagtatggggccctgggtggcaccgcccggagttccgtggattggcaaattaggcaagtgcgtgcgctattacaggctcagcaggcc

SEQ ID NO: 6811 - DNA, 1392 bp, synthetic construct
  misc_feature 1..1392: note = source = /note="Description of Artificial Sequence: Synthetic coding sequence"
  source 1..1392: mol_type = other DNA
atggctagcgagagcggcaaactgtggggcggacgcttcgtaggtgcggtggacccgataatggagaagttcaacgcctccatcgcgtatgatagacatctgtgggaggtggatgtgcagggatcaaaggcctattcgagagggctcgagaaggccggcctcctgacgaaggccgaaatggaccagatattacacggccttgacaaagtggccgaggagtgggcccaggggacgttcaagctgaatagcaatgacgaagatattcacaccgcaaacgagcgtcgtttgaaggagctgataggcgcaacagccggcaaattacataccgggcggtcacggaacgatcaggtggttactgacctaagactgtggatgcggcagacttgtagtacgctgagcgggttgctgtgggagttaatccgaaccatggtggatcgggcggaagctgaacgcgatgtgctgtttccgggatacacccatctgcagcgcgcccaacctatacggtggtcccactggatcttgtctcacgcggtggccctgactcgagatagtgagcggctccttgaggttcgaaaaagaatcaacgtgctgccgttagggtctggtgccattgctggtaatccccttggggtggatagggagcttctgcgcgctgagctgaatttcggggccatcacattgaactctatggacgctacctctgaacgagatttcgtggcagagtttcttttttgggcctctctctgtatgactcacctcagtcggatggccgaggaccttatactgtactgcactaaggagttctcctttgtgcagctgtccgacgcctatagtactgggtcctcactcatgccgcagaagaagaaccctgacagcttagagttgattaggagtaaagccgggagggtatttgggagatgtgccggcctcctcatgacgctgaagggactgcctagcacttataataaggacctgcaagaggacaaggaagctgtttttgaggtcagtgatactatgagcgccgtactgcaggtggccactggcgtcatcagcactcttcagatacatcaagagaacatgggacaagccctcagtcctgacatgttggccaccgaccttgcttattatctagtgcgcaagggtatgccattccgccaagctcacgaggcttctggaaaagccgtcttcatggctgagacaaaaggggtcgctttgaaccagctgagcctgcaagagttgcagacaatcagccctcttttctccggagatgtcatatgcgtgtgggactatggtcattccgttgagcagtacggcgctttgggggggaccgcacgcagctccgttgactggcagatccgacaggtgagggccctgctacaggcccagcaggct

SEQ ID NO: 6812 - DNA, 1392 bp, synthetic construct
  misc_feature 1..1392: note = source = /note="Description of Artificial Sequence: Synthetic coding sequence"
  source 1..1392: mol_type = other DNA
atggcatcggagtcaggaaagctgtggggaggaagatttgtgggcgcggtggaccccattatggagaagttcaacgcatcgattgcatacgaccgtcatctgtgggaggtggatgtgcaagggtccaaggcatacagccggggcctggaaaaggcaggattgttgactaaggcagagatggatcagattcttcacggactcgataaagtggcagaagaatgggcacagggaacctttaagctcaattcaaatgacgaggacattcatactgccaatgaacgccgactcaaggaacttattggagcaaccgccgggaagctgcataccggtagatcaaggaacgaccaagtcgtcacggatttgaggctgtggatgagacaaacgtgttcgaccctttcggggcttctctgggaactgataagaaccatggttgatcgcgcagaggcagagagagatgtgctctttccaggttacacccacctgcaaagagcgcaacctattagatggtcgcactggattctctcccatgcagtggcactgactcgggactcggaaagacttctcgaggtgaggaaaagaataaacgtgcttcccttggggtcgggagccattgcaggaaacccgcttggagtcgaccgtgagcttcttcgggcagaactgaacttcggggcaattacccttaattctatggatgcaacttcggaacgcgacttcgtggcggaattcctgttctgggcctccctgtgtatgacgcatctctcgcgcatggctgaggatttgattctttattgcacgaaggaatttagcttcgtgcaactttccgatgcatactccaccggatcctcgctgatgccgcagaagaaaaaccctgattcacttgaacttatcagatctaaagcaggacgggtgtttggacggtgcgcaggcctcctgatgactctcaaggggttgccctcgacttacaacaaggatcttcaagaagataaggaggcagtctttgaggtcagcgacaccatgtccgcagttctgcaagtcgcaaccggggtgatatcgacccttcagatccatcaagagaacatgggacaagcgctgtcccctgatatgcttgccactgatctggcatactacctcgtgagaaagggaatgccttttagacaggcacatgaggcgtcaggaaaagcagtctttatggcagaaacgaagggagtcgcccttaaccagctttctcttcaagaattgcaaactatatcccctcttttttcaggtgacgtgatctgtgtgtgggattatgggcattccgtggaacaatacggtgcactgggtggcactgcccggagctcagtcgattggcagatcaggcaggttagagcgcttcttcaagcacagcaagca

SEQ ID NO: 6813 - DNA, 1392 bp, synthetic construct
  misc_feature 1..1392: note = source = /note="Description of Artificial Sequence: Synthetic coding sequence"
  source 1..1392: mol_type = other DNA
atggccagcgagtcaggtaaactgtggggtggtcgcttcgtgggagcagttgatcctattatggagaagttcaatgcctcaatcgcctacgatcgacatctgtgggaagtggacgttcaaggaagcaaggcctatagtcggggtctcgagaaggcaggtttgctgaccaaagcggaaatggatcagatcctgcacggacttgacaaggtggcagaggaatgggcccagggtaccttcaaactgaattccaacgacgaggatatccacactgcgaacgagcgtcgtctgaaggagctgatcggcgctacggcaggcaaattgcataccggccgcagccgtaatgatcaggtggtaaccgacctgcgactgtggatgcggcagacctgttctacgctgagcggactgctgtgggagctgatccgcacgatggtggatcgcgctgaagccgaacgggacgtcctgttccctggttatacccacctgcaaagagcacagcctatccgctggtcacactggatcctctcccacgcagtggccctgactcgcgatagcgagcgccttctggaagtgaggaaacgcatcaacgtgctacctttaggcagcggtgcgattgcagggaaccctctaggtgtggatcgtgaattgttgagagcagaactgaatttcggtgctatcacactaaactccatggatgccaccagcgagcgcgattttgttgcagaatttctgttttgggcgagcctgtgcatgactcacttgagccgcatggctgaggatctaattctgtactgcacgaaggagtttagctttgtccaactgagtgatgcctacagcacggggtctagtctgatgccacagaagaaaaatccagatagcctggagctcattcgctccaaagcagggcgcgtgtttggccggtgtgcaggactgctgatgaccctgaaaggcctcccgagcacgtataacaaggatctgcaggaagacaaagaggcagtcttcgaagtcagcgacaccatgtccgccgtgctacaggtcgctaccggtgtgatcagcactctccagatccaccaggagaatatgggtcaggccctgtcccctgatatgctggcgacggacctggcctattatctggttcgcaaaggcatgccttttcgtcaagcccacgaagccagcggcaaagcggttttcatggccgagaccaagggtgtagctctgaaccaactgtctctgcaagagctgcaaaccatcagcccactcttcagcggggatgtaatttgcgtgtgggactacggtcacagcgtggagcaatacggtgcgcttggtggcacagcacgcagctctgtggattggcaaattaggcaggtccgcgccctgctgcaggcgcagcaggct

SEQ ID NO: 6814 - DNA, 1392 bp, synthetic construct
  misc_feature 1..1392: note = source = /note="Description of Artificial Sequence: Synthetic coding sequence"
  source 1..1392: mol_type = other DNA
atggcctcagagagcggcaagttatggggtggccgttttgtgggggccgtagaccctattatggagaaatttaacgctagcatcgcctacgataggcatctgtgggaggtcgatgtgcagggaagcaaggcgtacagcagaggcctggagaaggccggcctgttgacaaaggcagagatggaccaaatcctacacggattggacaaagtggccgaggagtgggcacaggggacttttaagctgaattccaacgacgaggacatacataccgccaatgagcggcggcttaaagaattgattggcgctactgctgggaagctgcatacgggaaggtcaagaaacgaccaggtggttactgatctccggctctggatgagacagacctgcagcactctgtcaggcttactgtgggaactgattcgtaccatggttgatcgcgctgaggcagagcgcgatgtccttttcccagggtatacacatctccagagggcccagcctatacggtggtcccactggatattgtctcacgctgttgcgcttacgcgggactccgaacgcctgttagaggtgcgcaaacgcattaatgtcctccctctcgggtcgggcgctattgcagggaaccctctcggcgtggaccgagagctcctgcgagctgaacttaatttcggggctatcactctgaattcgatggacgccacaagcgaaagggactttgtggcagagttccttttttgggcttcattgtgcatgacccatctgagtcgtatggccgaagatctgatcttgtattgcacaaaggaattctccttcgtgcagttgtccgacgcatatagcactggtagcagtcttatgccacaaaagaaaaatccagattccctcgagctcatcaggagcaaagcaggtcgggtgtttggcaggtgtgcgggcctgttgatgacactgaagggcctaccctcgacatacaataaagatctgcaggaggacaaggaggccgtattcgaagtgagtgatacaatgagcgcggtgctgcaggtggccacgggggtgataagtaccctccagatccatcaggagaatatgggacaagctttatctccagatatgcttgccacggatttggcctactatctggttcggaagggcatgcctttccgccaagcgcacgaggcttctggcaaagccgtcttcatggcagaaacgaagggcgttgctctcaaccagcttagtctgcaggaactgcagaccataagcccactatttagcggggacgttatctgcgtgtgggactacggccactctgtcgagcaatatggcgccctcggggggacagccaggtcttccgttgactggcagatccgccaagtgcgagccctacttcaggcacagcaggct

SEQ ID NO: 6815 - DNA, 1392 bp, synthetic construct
  misc_feature 1..1392: note = source = /note="Description of Artificial Sequence: Synthetic coding sequence"
  source 1..1392: mol_type = other DNA
atggcatcggagtccggtaagctgtggggaggacggttcgtgggcgctgtggacccgattatggaaaagttcaatgcatcaatcgcctacgaccgccatctgtgggaagtcgacgtgcaagggagcaaagcctactcccgcggacttgaaaaggccggtctgctgaccaaggctgagatggaccaaattctgcatggacttgataaagtcgccgaagaatgggcccagggaactttcaagctcaactcgaacgacgaggacatccacactgctaatgaacggcgcctgaaggagctcatcggcgcgaccgccggaaaactccataccggccggtcacgcaatgaccaggtcgtgaccgatctgcgcctttggatgcggcaaacctgctcgaccctttccggacttctgtgggagttgatccggaccatggtcgatcgagccgaagcggaaagggatgtgcttttccctggatacacccatctgcagagagcgcagccaatccgctggtcgcattggatcttgtcccacgcggtggcacttacccgtgactcggagcgcctcctggaggtgcgcaaacgcattaacgtgctgccgctgggctccggggccattgctggcaatccgctgggagttgacagagaactcctccgggccgaattgaacttcggagccatcacgttgaatagcatggatgccaccagcgaacgcgacttcgttgcggaatttctcttttgggcctcactctgtatgacccacctcagccggatggcggaagatctgatcctctactgtaccaaggaattcagctttgtgcagctgtccgacgcctacagcactggatcttccttgatgcctcagaagaagaatcccgactccctcgaactgatccgatcaaaggccgggcgcgtgttcggtaggtgcgccgggctgctgatgacccttaagggactgccttctacctacaacaaggacctgcaggaggataaggaggcggtctttgaagtcagcgataccatgtcagcggtgctgcaggtggcaaccggagtcatctcgactctccagatccatcaggagaatatgggacaagcgctctcgccggacatgctggcgactgacctcgcgtactacctcgtccgcaagggtatgccttttcgccaggcgcacgaagcgagcggaaaagcggtgtttatggctgaaactaagggagtggcccttaatcagctgtcactccaagagctgcaaaccatctccccactgttctccggagatgtgatttgcgtgtgggattacggccactcggtggagcagtacggagcccttggaggaacggctcggagcagcgtggattggcaaattcgccaggtcagggcccttttgcaagcgcagcaagca

SEQ ID NO: 6816 - DNA, 1392 bp, synthetic construct
  misc_feature 1..1392: note = source = /note="Description of Artificial Sequence: Synthetic coding sequence"
  source 1..1392: mol_type = other DNA
atggcatcggagagtgggaagctatggggcggaagattcgttggagccgtggaccccatcatggagaagttcaacgccagcattgcttacgacagacatctgtgggaagttgacgtgcaggggtccaaggcatactccagaggactggagaaggcaggactcctaacaaaagctgaaatggaccagattctgcatggtttggacaaagtggcagaggaatgggcccaagggaccttcaaactgaactctaatgacgaggacatccataccgctaacgaacggaggctgaaggaattgattggtgctaccgccggcaagctgcataccggaaggagtcggaacgaccaggtagtgaccgatttgaggctttggatgaggcagacatgcagcacattgtctggattgttgtgggaactgatcaggacgatggtcgaccgggcggaagccgaaagagatgtactttttcctggctacacacacttacaaagagcccagcctatccgatggtcacattggatcctctcccatgccgtagccctgaccagggacagcgaacgtctcctagaggtccgaaaaagaatcaacgtgctacctctgggcagcggcgccattgcaggcaatccactcggtgtagatagagagttgttgagggctgaactgaactttggggctatcacgctgaactcaatggacgcgacctctgagcgggacttcgtggcggagtttttgttctgggcctccctgtgtatgacccatctttcgcggatggctgaggacctgatcctgtactgcacgaaggaattcagctttgtgcagctcagtgacgcttactctaccgggagctcgctaatgccccagaagaagaaccccgacagcctagagctcatcagatccaaggccgggagagtcttcggtaggtgtgccggcctccttatgaccttgaaagggctcccctcgacctacaataaagacctccaggaggataaggaggccgtctttgaggtgagcgatactatgtccgccgttctgcaagtggctactggagtcattagcaccctgcagattcaccaggagaatatgggccaggcactctcacccgatatgctggccacagatcttgcttattacctagttcgaaagggtatgcctttccgacaggcccatgaagctagcggtaaagctgtgtttatggcagagacgaagggtgtggctctcaatcagctgagtctgcaggagctgcagactatatcgccgctcttcagtggggacgtcatttgcgtgtgggattatggccactccgttgaacagtatggggccctggggggtactgccaggagctccgtggattggcagatcaggcaggttcgcgccctgctgcaggctcagcaggcc

SEQ ID NO: 6817 - DNA, 1392 bp, synthetic construct
  misc_feature 1..1392: note = source = /note="Description of Artificial Sequence: Synthetic coding sequence"
  source 1..1392: mol_type = other DNA
atggctagtgagtctggaaaactgtggggcgggcggtttgtcggtgcagtcgaccccataatggaaaagtttaacgcttcaatagcatacgacagacatttgtgggaggtcgacgtgcagggtagtaaggcgtactccagaggtctcgaaaaggcggggcttttgacgaaggcagagatggatcaaatattgcacgggcttgacaaggtagctgaggagtgggcccagggaactttcaaactaaatagcaatgacgaggacatccacacagccaacgaacgaagactgaaggaattgatcggtgccactgccgggaaactccataccgggcgatctagaaatgatcaggtggtgacagatctccgcctatggatgagacagacatgctctacgctttctggcttgctgtgggagctgattcgcactatggtggacagagccgaggcagaaagagacgttctcttcccaggttatacacacttacagcgcgcacagcccatcaggtggtcgcactggatcctgtcgcatgcagtggctcttactcgagactcggaacggctgctcgaggtccgcaaaagaatcaacgtgctgccgctgggatcaggagcaatcgcaggcaatcctctcggcgtagacagagagctcttaagagcagagctgaatttcggcgccattacactgaacagtatggacgctacgagcgaacgtgattttgtggctgaatttctcttctgggcctcactttgcatgactcacctgagcagaatggcggaggaccttattctctattgtacaaaggaattttctttcgtgcagctgtcagatgcttattccactgggtcttcacttatgccccagaagaaaaatcccgattcccttgagctgatccgtagcaaagccggccgagtctttggacgatgtgcaggcctgctgatgacactaaaagggctcccctcgacttataataaggacttgcaggaagacaaagaggctgtatttgaggtgagcgatacaatgtccgctgtgctccaggtggccacaggagtaataagcacattacagattcatcaggaaaacatggggcaggcccttagtccagacatgttggcaacagatttggcctattaccttgtcaggaaggggatgcctttccgtcaagcacatgaggcaagtggtaaagcggtattcatggccgagaccaagggagtcgccctgaatcagttgtctcttcaggagctacagacgatttctccattattttcaggggatgtcatctgcgtttgggactacggccactcagtggagcagtacggtgctctgggcggaacagcccggtccagcgtggactggcagatcaggcaggttagagccttgctgcaggcacagcaggcc

SEQ ID NO: 6818 - DNA, 1392 bp, synthetic construct
  misc_feature 1..1392: note = source = /note="Description of Artificial Sequence: Synthetic coding sequence"
  source 1..1392: mol_type = other DNA
atggcatcggagtctggtaagctctggggaggtcgtttcgtgggtgcagtggatccgattatggagaagttcaatgcaagtattgcttacgatcgccatctgtgggaagtggatgtgcagggatctaaagcatacagcagagggctcgagaaggcaggacttctgactaaagcagaaatggatcagatactgcacggcctggacaaggtcgctgaagaatgggcacaagggacttttaagctgaacagcaacgatgaagatatccatacggctaacgaacgacgcttgaaagaacttattggagcaactgcggggaagctgcacactgggcggtccagaaatgaccaagtggtcacggatctgagactgtggatgagacaaacttgctcaactctgtcaggccttctttgggagcttatccgaaccatggtcgacagagcagaagcagagcgtgatgtgctgttccccggttacacccatctccagcgcgcccaacctatccgatggtcccattggatcctttcacacgcagtcgccttgacccgggattccgaacgcttgcttgaggtgcgtaaacggataaatgtactgccactcggctcgggcgcaattgcagggaaccctctgggtgtggaccgcgaacttcttagagctgagctgaatttcggtgcaattaccctgaattcaatggacgccacctcggaacgggactttgtcgcagaatttctgttctgggcatccctgtgtatgactcatctttcaagaatggcagaagatctgattttgtattgtactaaggaattttcatttgtgcaactgtcagacgcatactcgaccggcagttcgcttatgccacagaagaagaacccggattccctggaactgatacggtcgaaggcgggccgcgtgtttggtcgctgcgcagggctcctcatgaccctcaagggtttgccatcgacctacaataaggatctgcaagaagataaagaggccgtgttcgaagtgagcgacactatgtccgccgtccttcaagtggcaaccggtgttatttccacccttcaaatacatcaggaaaacatggggcaggcattgagccctgacatgctggcaactgatctggcttactaccttgtgcgcaagggcatgccttttagacaagcgcacgaggcatcgggtaaggccgtgtttatggccgaaacgaagggtgtggcgctcaaccaactcagcctccaagagctccagaccatttcacctctttttagcggggatgtgatctgtgtctgggattacggacattccgtggaacagtacggtgctctcggaggcactgcacgttcgtctgtcgactggcagataagacaggtgagggcgcttctccaggcacaacaggcc

SEQ ID NO: 6819 - DNA, 1392 bp, synthetic construct
  misc_feature 1..1392: note = source = /note="Description of Artificial Sequence: Synthetic coding sequence"
  source 1..1392: mol_type = other DNA
atggcatctgaatctggcaaactgtggggaggtcgctttgttggagccgttgaccccataatggagaagttcaacgcttctattgcctacgatcgtcacctctgggaggtggacgtgcagggcagtaaggcttactcccgcgggctggagaaggcgggtttgttgaccaaggctgaaatggaccagattctgcacggcctcgataaggtcgctgaggagtgggctcaaggtaccttcaagcttaattcaaacgatgaggatatccacaccgcaaacgagcgtcgcttgaaggagctgattggagcgaccgctggtaagctccatacgggccgttcccgtaacgatcaggtggtgacggacttgcgcctttggatgcgccagacgtgctcgacgttgtccggcctgctgtgggagctcattcgcaccatggtcgaccgtgccgaagcggagcgtgatgtccttttccccggatacacccacctccagcgcgcccagccaatccgctggtcgcactggatcctttctcatgctgttgctctcactcgcgattccgagcgcttacttgaggttcgcaagcgcattaacgtccttcccttgggttccggcgctattgctggaaatccgcttggtgtcgacagagagctgctccgtgccgagctgaatttcggcgccatcacgctgaactcgatggatgcgacctcggaacgcgattttgtcgccgagttcctcttctgggctagtctgtgcatgactcatctctcccgtatggccgaggacttgatcctttactgtacgaaggagttcagcttcgtccaactgtccgacgcctactccaccggtagcagcttgatgcctcagaaaaagaacccagacagcctggagttgatccgaagcaaggctggccgtgtctttggccgttgcgcagggcttctcatgacccttaagggcctccccagcacctacaacaaggatttgcaagaggataaggaagcagtattcgaggtctcggacacgatgagcgccgtcctgcaagttgcgaccggtgttatttcgaccctccagattcaccaggagaacatgggacaggctctctcacctgacatgctggctaccgacttggcctattacctggttcgtaagggcatgcccttcaggcaggcccatgaggctagtggcaaggctgttttcatggctgagaccaagggtgttgctttgaaccagctgagcctgcaagagctgcaaaccatttctcccttgttctctggtgacgtgatctgcgtgtgggactatggccactccgttgagcagtatggtgccctgggcgggacggcccgttcgtcggtagattggcagatccgtcaggtgcgggcccttctgcaggcccagcaggcc

SEQ ID NO: 6820 - DNA, 1392 bp, synthetic construct
  misc_feature 1..1392: note = source = /note="Description of Artificial Sequence: Synthetic coding sequence"
  source 1..1392: mol_type = other DNA
atggcttccgagtcgggcaagctgtggggtggtcggtttgtgggagcagtcgatcccatcatggagaagttcaacgccagtatcgcatacgatcggcacctctgggaagtcgacgttcagggcagcaaagcttactcacgcgggttggagaaagccggacttctgaccaaggctgaaatggaccagatcctccatggtctggacaaggtggcagaggagtgggctcaagggactttcaagttaaattcaaatgatgaggatatccatacggccaatgaaagacggcttaaagagttaattggtgcaacggcgggtaagctacacaccggccgatcgagaaacgatcaagttgtaacagatctgcgcttgtggatgcgccaaacctgctccaccttgtcgggtcttctttgggaacttatcagaaccatggtcgatcgcgcggaagccgagcgggatgtcctattcccgggatacactcatctgcagagggctcagccaatccgatggagccactggattcttagccacgctgtggcgttaaccagagattcagagcgcttgttggaagtgcgcaaacgaatcaatgtgctccctctgggctccggagccatcgccggtaaccccttaggtgttgatagagagctgctgcgtgccgaactgaactttggagccattactttgaacagtatggatgccactagtgaacgagactttgtcgctgagtttttgttttgggcgtctctgtgcatgactcacctcagtcgtatggctgaagacctaatcctgtactgcaccaaggaattctcttttgttcagttaagcgacgcctacagcacgggcagttcgttgatgccccagaagaagaacccagattcccttgagttaatccgatctaaagctggacgcgtcttcggccgatgcgccgggctcttgatgactctcaagggtttgcctagtacctataacaaggatttacaggaggataaagaggccgttttcgaggtcagtgacaccatgagcgctgttctccaggtggctacaggtgtgatcagcacgttgcagattcatcaggagaatatggggcaagctctgtcccctgatatgctggccactgatctcgcctattatttggttcgtaagggaatgccctttcgccaagcacacgaggccagcgggaaagctgtgtttatggctgagacaaagggcgtcgcattgaaccagctatctttgcaggaactccaaacgatctcgccccttttttccggggacgtgatttgtgtgtgggattatggtcacagcgtggaacagtacggggcgctgggaggtacggcacggtcaagtgttgattggcagatccgacaagtaagggccttactacaggcacagcaggcg

SEQ ID NO: 6821 - DNA, 1392 bp, synthetic construct
  misc_feature 1..1392: note = source = /note="Description of Artificial Sequence: Synthetic coding sequence"
  source 1..1392: mol_type = other DNA
atggccagtgaaagcgggaagctctggggggggcggtttgtcggggcagtagatccaattatggagaaattcaatgcctcaatcgcatacgacagacacctgtgggaagtggatgtgcagggttccaaagcctactcacgcggactcgaaaaggctggacttctcacaaaggctgagatggaccagatcctccatgggttggataaggtggctgaggagtgggctcagggaacttttaagctcaattccaacgacgaagacattcacactgctaacgagaggcgacttaaggaactgatcggggctaccgccggcaagctgcatacagggcggagccggaatgatcaggtggttacggatctgaggctgtggatgagacagacctgttctacactgtcagggttgctgtgggaactcataagaacaatggtcgacagggctgaagcagaacgcgacgtgctgttcccgggctatacccatctgcagagagcccaacccatcaggtggagccattggatcctgtctcatgcggtagctctgacaagagattcagagcgcctcctggaggtgaggaaaagaatcaacgtattgcctttgggatccggcgctatcgcgggaaatccgctgggcgtggaccgggaacttctgcgagccgagctgaactttggcgcaattaccttgaattccatggacgccacatccgagcgcgactttgtggcagagttcctcttttgggcatccctgtgtatgacacatctctctcgaatggctgaagacctcatactgtattgcactaaggagttctctttcgtgcagctgtccgatgcatacagcaccgggtcttccctgatgcctcagaagaagaatcctgatagcctggaacttatccgatcaaaagcaggacgggttttcgggcgctgtgctggccttctcatgacattgaagggtctgccctcaacttacaataaggatctccaggaggacaaggaagccgtatttgaagtcagcgataccatgagtgccgtccttcaggttgctactggtgtcatttctacattgcagattcaccaggaaaatatgggacaggccttgagccctgacatgctcgcgacggatctggcttattatttggtccggaaaggcatgccgttcaggcaagcacacgaggcctctgggaaagcagtgttcatggcagagaccaagggggtagccctgaaccagctttctctgcaggaactgcaaaccatctcccccctgttcagcggagatgtaatatgcgtgtgggactatggccactccgtcgaacaatacggcgccttgggcgggaccgccaggtcctccgtggactggcaaatacgccaggtccgagcactgcttcaggcacagcaggca

SEQ ID NO: 6822 - DNA, 1392 bp, synthetic construct
  misc_feature 1..1392: note = source = /note="Description of Artificial Sequence: Synthetic coding sequence"
  source 1..1392: mol_type = other DNA
atggcctctgaatctggcaaactttggggaggtaggttcgtgggtgctgtggatcccatcatggaaaagttcaacgcatccatcgcctacgaccgtcatctgtgggaagttgacgtgcagggtagcaaggcctattctcggggactggaaaaggccggcctcctgacaaaagccgaaatggaccagattctgcatggtctcgataaggtggcggaggagtgggcgcagggcacatttaagctgaactccaatgacgaagatatccacaccgctaatgagcgccgactgaaggagctcatcggggctacggccggaaagctgcacactggtcgaagccgcaacgaccaggtggtgaccgatcttcggctttggatgagacaaacctgttctacactctccgggcttctgtgggaactgatcagaaccatggtggaccgcgcggaagccgagcgggacgtcctctttccaggctatacccatctccagcgtgcccagcctatccggtggagccactggattctgtcacacgccgtcgctttgaccagagatagtgaaaggctgttggaggtgaggaagagaatcaatgtgctcccccttggcagtggcgccatcgcaggtaaccctctaggcgtggatagagagttgctgagggccgagctgaactttggagcaataacgctgaacagcatggacgctaccagcgaaagagacttcgtggcagagttcctattctgggcatctctctgcatgacacacctttcacggatggccgaggatctcatcctctattgtaccaaagagtttagctttgtccaactgtccgatgcctatagcacagggtcctcccttatgcctcagaagaagaatcctgactccctagaactcatcaggtccaaagctggcagggtttttggccggtgcgctgggctcctgatgactttgaaaggactgccttcaacatacaacaaggatcttcaggaggacaaagaggctgtgttcgaggtgtctgatacaatgtctgcagtcctgcaagtggcaacaggtgtgatctctactttgcagattcaccaagagaacatggggcaggccttatcccctgatatgctcgccactgacttagcctactacttggtccggaagggtatgccgtttagacaggctcatgaagcttccgggaaggccgtcttcatggccgaaacaaagggggtcgccctgaaccaactgtctctgcaagaactccaaacaatatccccactcttctccggagatgtaatctgcgtgtgggactatggccacagcgtcgaacagtacggcgccttagggggcaccgcccggtccagtgtggactggcagatccggcaagtacgggccctcctccaagcacagcaggcc

SEQ ID NO: 6823 - DNA, 1392 bp, synthetic construct
  misc_feature 1..1392: note = source = /note="Description of Artificial Sequence: Synthetic coding sequence"
  source 1..1392: mol_type = other DNA
atggcaagtgaaagtggcaagctgtggggcggtaggttcgtgggagccgtcgatccaatcatggaaaagtttaatgccagtatcgcttacgatcgccacctgtgggaggtcgatgtccagggcagcaaggcatacagcagaggactcgaaaaagcagggctcctcacaaaagcagaaatggatcaaatcttacatggcctggataaggttgccgaagagtgggcccaaggcaccttcaaacttaactccaacgacgaagatattcacaccgcaaacgaacgccgcttgaaggagctaatcggggctactgcagggaagctgcacacgggaagatctcgaaacgaccaggtggtgacggaccttcgattatggatgcgacagacctgctctactttgagcggcctgctgtgggaattaatccgtactatggtcgaccgcgcagaagccgaacgggacgtgctgttccctggatacacccacctgcagcgggcccagccaatcaggtggagccactggatacttagccatgcggtggcactcacgcgagattccgaaaggctacttgaggtccgcaagcggataaatgtgctgccacttggaagcggagcgattgcaggtaacccactgggtgtggacagagagctactgcgcgcagaacttaacttcggggcaatcaccctgaatagcatggatgcaacctccgagagagatttcgtggctgaatttcttttctgggcgtctctgtgcatgactcacttatcacgcatggctgaggatttaatactgtattgtaccaaggagttcagtttcgtgcagctgagtgacgcttattctaccggatcctctctgatgccccagaagaaaaaccccgatagcctggagctgatcaggtcaaaggccggtagagtttttgggcgatgtgctgggctgcttatgactctgaaaggcctcccttcaacctataataaagatttgcaggaggacaaggaagccgtctttgaggtgagtgataccatgtctgcggttctccaagtggctacaggggtgatatcgacactccaaattcatcaggagaatatgggccaagccctatcacctgatatgcttgccactgacttagcatactatctggtaaggaaggggatgccatttaggcaggcccacgaggcatcggggaaggcggtgttcatggctgaaaccaagggtgtggcactgaatcagctgagcctgcaggagcttcaaaccattagccccctcttctccggcgacgtgatatgtgtttgggattacgggcatagcgttgagcagtacggagctctagggggcacagcacgcagtagtgttgactggcagattaggcaggtacgcgccttgctgcaagctcagcaggca

SEQ ID NO: 6824 - DNA, 1392 bp, synthetic construct
  misc_feature 1..1392: note = source = /note="Description of Artificial Sequence: Synthetic coding sequence"
  source 1..1392: mol_type = other DNA
atggcaagcgagtccggaaagctgtggggtggacggtttgtcggggcagtcgatccaatcatggagaagttcaatgcttcgatagcttacgacagacatctgtgggaagtggatgtccagggttcaaaggcatattccagagggctcgaaaaagcaggactgcttactaaggctgaaatggatcagattcttcacggtcttgacaaggtggcagaagaatgggcgcaaggaacttttaagctcaactcaaatgatgaagatatccatactgctaacgaaaggaggctgaaagagctgatcggagccaccgcaggaaagttgcacactggcagatctaggaacgatcaggtcgtcaccgatctgcgtctttggatgcggcaaacctgttctacgctttcgggactgttgtgggagctcatcaggactatggtggaccgagcggaagcggaacgagatgtcctgttccctggttacacccatctgcaacgagcccagccaatccgttggagccattggatactcagccatgcggtcgctcttacccgggactcagaaaggctcctcgaggtgcgaaagaggataaacgtgctgcctttgggttcgggggccatcgcaggcaatcctctcggagtcgatagggaacttctgagagcagaactgaacttcggggccatcactcttaactccatggacgcgactagcgaaagggattttgtggcagaatttctcttttgggccagcctttgtatgactcacctctcccgtatggctgaggatctgattctctactgcactaaggaattctcatttgtccaacttagcgatgcatacagcacgggatcttcactgatgcctcagaaaaagaaccctgattcactcgaattgattcgctcgaaggctggtcgcgttttcggccgctgtgcgggccttctcatgacgcttaaggggctgccttcaacctacaacaaggaccttcaggaggacaaagaagcagtgtttgaagtttccgacacgatgtctgcagtgctccaggtggcaaccggagtcatttcgaccctccagattcaccaagagaatatgggccaagcgctgtcccccgacatgctcgcaactgacctggcttactatctggtgagaaaaggtatgccctttcggcaagcacatgaagcctccggtaaagcagtctttatggccgaaaccaagggagttgcccttaaccagctcagccttcaggaactgcaaaccatctcgcccctgttttcgggcgatgttatatgcgtgtgggattacggtcattcggttgagcaatacggagcgttgggaggtactgcacggagcagtgtggactggcagatacgtcaagtgagagcacttttgcaagcacaacaagcc

SEQ ID NO: 6825 - DNA, 1392 bp, synthetic construct
  misc_feature 1..1392: note = source = /note="Description of Artificial Sequence: Synthetic coding sequence"
  source 1..1392: mol_type = other DNA
atggcttccgaatctggcaaactgtggggcgggcgattcgtcggcgcggtcgacccaatcatggaaaagtttaacgcttcaatcgcatacgatcgacatctttgggaagtcgacgtccaggggtctaaagcctacagccgtgggctcgagaaagctggtttactgactaaggcagagatggatcagattctgcatggcctagacaaggttgctgaggagtgggcacagggaacctttaaactgaacagtaatgacgaggacattcacaccgctaatgaacgccggctgaaagaacttataggtgcaactgcgggcaaactgcataccggccgttctaggaacgaccaggtcgtgactgacctgaggttatggatgagacaaacttgtagcactctcagcggtctgctgtgggagttaataagaaccatggtggatcgcgcagaggccgaaagggacgtgctcttcccagggtacacccatctacagcgggcccagccgatacggtggtcacactggatcctgtctcacgccgtggcactgacgcgcgacagcgagcggctgctggaggtgagaaaaagaattaatgtgctgcccctaggttcaggggcgatagcaggaaaccctctcggggtcgacagagagctactgcgcgcagagctaaacttcggtgccatcaccttgaattccatggatgctacatcggagcgggattttgtggctgagttcctgttctgggctagtctttgtatgacacacctctcaagaatggccgaagatctgatcttgtattgtacgaaggagtttagtttcgtgcagttgagtgatgcctactctacagggtccagcctgatgccacagaaaaagaaccctgactccctcgagctgattcgctccaaagcaggcagggtatttggacggtgtgcaggactgctcatgaccttaaaggggttgcctagcacctacaacaaagatttgcaggaggacaaagaggctgtgttcgaggtgtcagacacaatgtccgctgttctgcaggtcgccacgggggtgatctctacactccagatccaccaggaaaatatggggcaagctctctctccagatatgcttgcgactgatctggcctattatctggtgcggaagggcatgccattcagacaggcccacgaagctagtgggaaagcagtcttcatggcggaaactaaaggcgtcgcactgaaccagctctctctccaggagttgcagacgatctcacctctgttcagcggcgacgtgatctgtgtttgggactacggacattcagtggaacaatacggtgctctcggagggactgcccggtcctcagtggactggcagataagacaagtcagagccttgcttcaagcccagcaggca

SEQ ID NO: 6826 - DNA, 1392 bp, synthetic construct
  misc_feature 1..1392: note = source = /note="Description of Artificial Sequence: Synthetic coding sequence"
  source 1..1392: mol_type = other DNA
atggcatctgagagtggcaagctttggggaggccgttttgtaggcgcagtggaccctatcatggaaaagttcaatgccagtatcgcctacgacagacatctgtgggaagtagacgtccaggggtcaaaagcttattcaagggggctagagaaggcaggcctgttgacaaaggctgaaatggatcagatcctgcacggactggacaaggtggccgaggagtgggcgcaggggactttcaagctaaacagtaatgatgaagacatccacaccgctaacgaacgacggctgaaggaactgatcggcgccacagcagggaagctccacacgggtagaagccgcaacgaccaggtggtgaccgatcttcgactgtggatgcgccaaacatgctccactctgtctggattgctttgggaactgatccgaaccatggttgaccgagcagaggcagagcgagacgtgttattcccagggtacacccacctgcaaagggcacaaccaataaggtggtcacactggattctcagccatgccgttgctctgacacgggactccgaacggctgctggaggtcagaaagcgaattaatgtcttgccactgggatctggtgctattgcaggcaatccactcggtgttgaccgggagctgttaagggcagagttgaactttggagcgataaccctgaattccatggatgctacatctgagagggattttgtcgccgagttcctcttttgggccagtctatgtatgacccacctgagtcgaatggccgaagatctgatcttatactgcaccaaagagttcagcttcgtgcagctgagcgacgcctattccactgggtcatctctgatgccccagaagaaaaaccccgattcacttgagctgattcgatcaaaagcaggcagggtcttcggacgttgtgcagggttactgatgaccctgaaaggccttccatctacctacaacaaagatctccaggaggataaggaggccgttttcgaggtctcagatacaatgtcagcagtattgcaggttgccaccggcgtcatcagtaccttgcaaatccaccaagagaacatgggtcaggcactaagtcccgacatgctggcgacggacctggcatactacctagttagaaaaggaatgccctttcgacaggcgcacgaagcttccggcaaagcagtgtttatggccgagaccaagggcgtggcactgaatcagctgtctttgcaggaactgcagacaatctcacctctgttttctggggacgtcatctgcgtgtgggattacggacacagcgtggagcagtatggggccctgggcgggaccgcgcggtcttccgtcgactggcagatcagacaagtccgtgctctccttcaggcccagcaggca

SEQ ID NO: 6827 - DNA, 1392 bp, synthetic construct
  misc_feature 1..1392: note = source = /note="Description of Artificial Sequence: Synthetic coding sequence"
  source 1..1392: mol_type = other DNA
atggcctctgaaagtgggaaactttgggggggacgctttgtaggggctgtggatcctataatggaaaaatttaatgcctctatcgcctatgatcgccacttgtgggaagtggacgtgcagggaagtaaagcctatagtcgggggctcgaaaaggctgggctccttacaaaagccgagatggatcagatcctgcacggattggataaagtagcagaagaatgggcgcagggaactttcaaactcaactccaatgatgaagacatacatacagcaaatgaacggcgattgaaagagctaatcggagccactgccgggaaactgcacacagggcggtctcggaatgatcaggtggttactgatctcaggctttggatgaggcagacttgttctacactgagtgggcttttatgggaactaattagaacaatggttgatcgagccgaagccgaacgcgatgttctttttccaggatatacacatttgcagcgcgcccagcctatcagatggagtcattggattctctcacacgctgtggctctcactcgggatagtgaaaggttgctggaagtaagaaaacgcatcaacgtcttgcccctcgggtccggggcaatagcagggaaccccctgggagtggatcgggaactccttcgggcagaacttaatttcggagcaatcactctgaactctatggatgcgacatccgaacgggattttgtggctgagtttctgttctgggctagtctatgcatgactcacctgtctcgcatggccgaggatctaattctctactgcacaaaagagttttcatttgtccagctctccgacgcttacagtactggatcgagtctgatgccccagaagaagaacccagattcacttgagctgatacgaagtaaagcagggcgcgtcttcgggcgctgtgctgggctgctcatgactctgaaaggactgccttcgacatataacaaagaccttcaggaagataaagaggctgtatttgaagtaagtgatacaatgtccgccgtgttacaggtggctacaggagtgatttctactctacagatccaccaggaaaacatggggcaggccctgtctccagatatgctagctacggacctggcttactacctcgttaggaaagggatgccattcaggcaggcacacgaagccagtggaaaggctgtttttatggctgaaacaaaaggggtggcccttaaccagttatctctccaggagcttcagactatctctcccctgttttccggagatgtgatctgtgtgtgggattacgggcattccgttgaacagtatggagcactgggaggaacagcaagatctagtgtggactggcagattcgacaggtcagagccctcctgcaggcgcagcaggcc

SEQ ID NO: 6828 - DNA, 1392 bp, synthetic construct
  misc_feature 1..1392: note = source = /note="Description of Artificial Sequence: Synthetic coding sequence"
  source 1..1392: mol_type = other DNA
atggcttctgaaagcggaaaattgtggggggggcgctttgtcggagcagtggaccccatcatggaaaagttcaacgcctctatcgcttacgaccggcatctgtgggaagtggacgtgcagggtagcaaggcatatagccgcggcttggaaaaggcaggattgctaacaaaggccgaaatggaccagatactccatggattagataaagttgctgaagaatgggctcaaggcaccttcaagctcaacagcaacgacgaagacatccacaccgctaacgagaggaggttgaaagagctgatcggggctactgctggtaaacttcatacgggccgcagtagaaacgaccaggtggtgaccgacctgagattatggatgaggcaaacatgctcgacccttagcggactgctctgggaattaatcaggacaatggtggacagagcagaagctgaacgcgatgttctgttcccgggatacactcatctgcaaagagctcagcccatccgctggtcccactggattctgtctcacgctgtggcgctcacaagggatagcgagcgactgctggaggtcaggaaaaggatcaacgtgctgcccctcggaagcggtgccatcgcaggaaacccattgggggtcgacagggaactgctccgcgcggagctgaattttggagccattactctcaatagcatggacgctacaagcgaaagggacttcgtggctgaatttctcttttgggcgagcctgtgtatgacccacctgagccgaatggccgaggacctgattctgtactgcaccaaagaatttagcttcgtacagctgtctgatgcgtactcaactgggtccagcctgatgcctcaaaaaaagaaccccgatagcctggagctcatacgctccaaagctggcagggtgttcggcaggtgcgcgggactcctcatgacgctgaagggcctgccaagtacatacaacaaggatttgcaggaggacaaagaggccgtgtttgaggtgagcgatacaatgagcgcagtgctccaagtagcgaccggagttatctccactctccagatccatcaagaaaatatgggacaagcccttagtcccgatatgttggcgactgatctcgcttattacctagtcaggaaaggaatgcccttcagacaggctcacgaggcttccggaaaagctgtgtttatggctgaaaccaagggagttgctctgaaccagctgagtctgcaagaactgcagactatcagccctctgttttcaggggacgtcatctgcgtgtgggactatgggcactctgtcgaacagtacggtgcgctgggcggaaccgcccgctcttccgtcgattggcagatccgtcaagtccgtgctctcctgcaggctcaacaagca

SEQ ID NO: 6829 - DNA, 1392 bp, synthetic construct
  misc_feature 1..1392: note = source = /note="Description of Artificial Sequence: Synthetic coding sequence"
  source 1..1392: mol_type = other DNA
atggcctcagagagcggaaagctatggggaggaagatttgtgggagctgttgaccctattatggaaaagtttaacgcgtctatagcatacgaccggcatctatgggaggttgacgttcaggggagtaaagcttactcccgagggctggagaaggcggggctgctcacaaaagccgagatggatcaaatcctgcacggactggacaaggtggctgaagagtgggctcaaggaactttcaaacttaactctaatgatgaggatatccacaccgcgaatgagaggaggctgaaagaactgatcggtgccacagcaggtaaactccatactgggcgctctaggaacgaccaggtcgttaccgacctgcgtctatggatgcgccagacctgtagcacgttatcaggacttttatgggagctgatccggaccatggtggaccgcgcggaggccgaaagagacgtgctcttccccgggtacacacatctgcagcgcgcccagccaattaggtggagtcattggattctgagtcacgcagtggcactcacacgggactccgaacggctgctagaggtcaggaagaggattaacgtactaccactaggatcaggggccatcgcggggaacccgttgggggtcgaccgcgagctgctcagggccgagctcaatttcggggccatcacattaaatagcatggacgcaacatcagaacgggattttgtggccgaatttctattttgggcctccctttgtatgactcacctgtcccggatggcagaagacttaatcttatactgcaccaaagagttctctttcgtgcaattatccgacgcctactccaccggtagctccctcatgccacagaaaaagaatccggactcccttgagctgatacgaagcaaagctggtagggtgttcggtagatgtgcaggcctactgatgaccctcaagggcctgcccagcacgtacaacaaggacctacaagaagataaggaagccgtgtttgaggtatctgacacgatgtcagccgtgctccaggtagccaccggggtcattagtactctccaaattcaccaagaaaatatgggccaggcgcttagccctgatatgctcgcgacagatctggcctactaccttgtgaggaagggaatgcccttccgccaggcccacgaagcgtctgggaaggcagtgttcatggccgagacaaagggtgtggccttgaaccagctgtcgttacaggagctccagaccatctctcctctattcagtggagacgtgatctgcgtctgggactatggacactctgtggaacagtatggggctttaggaggcaccgcacggagcagtgtggactggcagatccgccaagttcgcgccttgctgcaggcccagcaggca

SEQ ID NO: 6830 - DNA, 1392 bp, synthetic construct
  misc_feature 1..1392: note = source = /note="Description of Artificial Sequence: Synthetic coding sequence"
  source 1..1392: mol_type = other DNA
atggctagtgagagcggcaagctgtggggcggccggttcgtcggcgctgtggatccgataatggagaaattcaacgcaagtattgcatacgaccggcacctatgggaggtggacgttcagggaagcaaggcgtactctcgcgggcttgaaaaggcaggacttctgactaaagccgaaatggaccagattctccacggccttgataaagtcgccgaggagtgggcacagggcacttttaagttgaacagcaacgatgaggatatccacaccgctaacgagcgccgactgaaggagctgatcggtgccaccgcaggaaaattacatactggacggagtcgcaacgaccaagtagttacagacttgcgattatggatgagacaaacatgctctaccctctcaggcctgctctgggagctcatccggactatggtcgacagagcagaggcggagcgcgatgttttgttcccgggctacactcatctccagcgcgctcaacccattcggtggtctcactggattctgtcccatgcagttgccctcacgagggatagcgaaaggcttctcgaggtgcggaagagaatcaacgtactcccattgggcagtggagccatcgcaggtaacccactaggcgtggaccgtgaactcttgcgcgctgagctcaactttggcgccatcactcttaattccatggacgctacttccgagcgggacttcgtcgctgaatttctgttttgggccagtctctgcatgacccacctctctcgcatggctgaagacttgatcctttactgcaccaaagagtttagcttcgtgcaactcagcgacgcctactccaccggcagcagcctaatgcctcagaaaaaaaatcctgacagcctcgagctaatacgaagcaaggcgggcagagtgtttggacgatgtgccggtctgctgatgaccctcaagggcctcccatctacatacaacaaggacctgcaggaggacaaagaggcagtgttcgaagtctctgacacgatgtcagcagttctccaggtggctacaggcgtgatatcaactctgcagatccaccaggagaacatggggcaggccctttctcccgatatgctggctaccgatcttgcctactatctcgtccgcaagggcatgccatttaggcaggcgcatgaagcctctggtaaagccgtatttatggctgagaccaagggcgttgctctcaaccagctgtcactgcaggaattgcaaacaatctcacctctgttcagtggcgacgttatttgcgtctgggactatggacacagcgtggagcaatacggagccctgggagggactgccagatcatctgtggattggcagatcagacaggtgcgggctttgcttcaggctcagcaagca

SEQ ID NO: 6831 - DNA, 1392 bp, synthetic construct
  misc_feature 1..1392: note = source = /note="Description of Artificial Sequence: Synthetic coding sequence"
  source 1..1392: mol_type = other DNA
atggcatcagagtctggcaagctatgggggggacgcttcgtgggggccgtggaccctatcatggaaaaattcaacgctagcattgcttacgataggcacctctgggaggttgatgtccaaggatcaaaagcctattctcgaggcctggagaaagcaggactgctaacaaaggccgagatggatcaaatcttgcatggtctggacaaggtggccgaggagtgggcacaggggacatttaaattgaactccaacgatgaggatatccatactgctaacgaacgacggcttaaggagctcataggcgccaccgccgggaaacttcatacaggaagatccaggaatgatcaggtagtgaccgacttgaggctgtggatgcgccaaacttgctcgaccctgtctggcctgctgtgggagctgatcaggacaatggtggatagggcagaggctgagagggacgttctctttccgggatatacacatttacagcgggctcagccaatccgatggagtcactggatcctctcccacgctgtggccctgacccgcgattctgagaggttactggaagtgcggaaaagaatcaatgttctgccacttgggagtggggctattgcgggaaaccctctgggggtggatcgagagctgctgagagccgaattgaacttcggagctataactctcaacagcatggatgccactagtgaaagagatttcgtggccgagtttttgttttgggcttccctttgcatgacgcacctgagtagaatggcggaggaccttatactgtactgtacgaaggaattttcattcgtgcagctttctgatgcttacagtactgggtctagcctcatgcctcaaaagaagaacccggattcgctggagctgattagaagtaaagctggtagggtcttcggacggtgcgcagggctgctgatgaccctaaaggggctaccaagtacatacaataaggacctgcaggaggataaggaagcagtatttgaagtgtccgatactatgagcgccgtcctgcaggtcgcaacaggagtaatcagcacccttcagatccaccaggagaatatgggccaggcgttgtcgcccgatatgttggctactgatctggcgtactacctagttcgaaaggggatgcctttccgccaggcccatgaggcatctggcaaggctgtgtttatggcagaaaccaagggcgtcgccctgaaccagttaagcctgcaggagctgcagactatttcgccgctgtttagtggagatgtgatttgcgtgtgggactacgggcactcagtcgagcagtacggagctcttgggggtaccgcccgcagctccgtggattggcagattcgtcaggtcagagcccttcttcaggcacagcaggcc

SEQ ID NO: 6832 - DNA, 1392 bp, synthetic construct; identical to SEQ ID NO: 6825
  misc_feature 1..1392: note = source = /note="Description of Artificial Sequence: Synthetic coding sequence"
  source 1..1392: mol_type = other DNA

SEQ ID NO: 6833 - DNA, 1392 bp, synthetic construct
  misc_feature 1..1392: note = source = /note="Description of Artificial Sequence: Synthetic coding sequence"
  source 1..1392: mol_type = other DNA
atggcttcagaatctggcaaactgtggggaggaaggttcgtaggcgctgttgaccccataatggaaaaattcaacgcttcaatcgcatacgatcgtcatctgtgggaggtagacgttcagggctccaaggcatattctagaggcttggagaaagccggtcttcttactaaagctgaaatggaccagatccttcatggtctggacaaagtggcagaggagtgggcccagggtacttttaaactgaacagtaacgatgaagacatccacacagctaacgagcgtcgtctgaaggagttgatcggagctacagccggcaagctccatactggtcgttcacgcaacgaccaggtcgttactgatctcagactgtggatgaggcagacctgttccactctctccggcctcctctgggaactgattagaaccatggtggatcgtgccgaggccgagagggacgtcctcttcccaggctacactcaccttcagcgcgcccagccaatcaggtggagtcactggattctgtctcatgctgtggcacttacaagagactctgagaggctcctggaagtaagaaagagaattaacgtgctccctctcggctccggcgccatcgccggcaaccctttgggagtggaccgcgagttgctcagggccgagctgaacttcggtgcaattaccctcaactcaatggatgctacatccgaacgtgacttcgtggctgagttcctcttttgggcttccctctgtatgacacacctgtcaaggatggctgaggacctgattctgtactgcactaaggagttttcatttgtgcagcttagcgacgcctactctactggctccagcctcatgccccagaaaaaaaacccagactcactggagcttattaggtccaaggctggaagggttttcggccgttgcgctggcttgctgatgaccctcaagggtctgcctagtacctacaataaggatctgcaggaggataaggaagccgttttcgaagtgagcgacaccatgtcagctgtgctgcaggtggctacaggagtcattagcaccctccagatccaccaagaaaacatgggacaggccctctccccagacatgctcgccacagatctggcctattacctggtgcgtaagggaatgccttttcgtcaggctcatgaggctagcggaaaggcagtgttcatggcagaaactaaaggtgttgctctgaatcagctgagcttgcaggaactgcagactattagtcctttgttctccggagacgtgatttgcgtttgggactacggtcattcagtcgagcagtacggagctttgggaggtactgctcgttcttcagtcgactggcagatccgtcaggtgagagctctgttgcaggcacaacaggcc

SEQ ID NO: 6834 - DNA, 1392 bp, synthetic construct
  misc_feature 1..1392: note = source = /note="Description of Artificial Sequence: Synthetic coding sequence"
  source 1..1392: mol_type = other DNA
atggcttcagaatctggaaaactgtgggggggacggtttgtcggggcagttgaccccattatggagaaatttaatgccagtattgcctatgacaggcatctgtgggaagtagatgttcaggggtcgaaagcctactctcgcggacttgaaaaagccggacttctgacaaaagctgagatggatcagatactacacggacttgacaaagtcgcagaagaatgggcccaaggaacattcaaactgaattccaacgacgaagatattcatactgccaatgaaaggcgcctcaaagaacttataggagctacagctggaaaactgcatacagggcgatccagaaatgatcaggtggttacagatctgagattgtggatgcggcagacttgctctactctcagtgggttactgtgggagctcatacgtactatggtagatcgggcagaagccgaacgagatgtactctttcctggatatactcacctgcagagggcccagcccataaggtggagtcattggatcctgtcccatgcagtggctctaacaagggactctgaacgcctcctggaggtgagaaaaaggataaacgtcctcccattaggatctggggccatcgccgggaatcctctcggggtagatagggaactccttcgggcggaacttaactttggggccattactctaaatagtatggatgctacatctgaaagggatttcgtggccgaattcctcttctgggcttcactgtgcatgactcacctctcgaggatggccgaagatctcattctgtattgcactaaagaattttcatttgtacagctctctgatgcttattccactgggtcttctctaatgccacagaaaaaaaaccccgattcactggaactaataaggagtaaggccggacgcgtcttcggaaggtgcgccgggctactcatgactctgaaagggttaccatctacatataacaaagatctccaggaagataaagaagccgtctttgaggtgtcagatactatgtccgctgtgttgcaggtcgctacaggagtgatctcaactctccaaattcatcaggaaaatatgggacaggctctgtcacctgatatgctagccacagacctagcatattatctagtccgaaaaggaatgcctttcagacaggcccatgaagcttccgggaaggctgtattcatggccgaaactaaaggagtcgctctgaaccagctctcacttcaggaacttcagactatctccccactgttctccggggatgtaatctgtgtctgggattatgggcattccgtggaacagtacggagcccttgggggaacagctcgatcttccgtggattggcagatcaggcaggtgagggctctccttcaggcacagcaggcc

SEQ ID NO: 6835 - DNA, 1392 bp, synthetic construct
  misc_feature 1..1392: note = source = /note="Description of Artificial Sequence: Synthetic coding sequence"
  source 1..1392: mol_type = other DNA
atggccagcgaatcaggaaaactgtggggcggacggtttgtcggcgctgtggatccaattatggaaaagtttaacgcgagcattgcgtatgatagacacctgtgggaagtggatgtgcaaggatctaaagcatatagccgaggtcttgagaaagccggcttgctaaccaaggcagaaatggatcagatcttgcatggattagataaagtggccgaggaatgggctcaggggacttttaaactgaactccaacgacgaagatatccacactgcaaacgagcggcggctcaaggagctcatcggagctactgctggcaaactccacacagggcgatcacgtaatgaccaggtcgtaaccgatctacgcctgtggatgcgccagacatgtagtactttgtctggcctgctgtgggagttgattcggacgatggtggacagagcagaggctgaaagggatgtcctctttcccgggtacactcatttgcagagagcacagcctatcagatggagccactggatactgtcccacgccgtggctctaactagggattcagaacgtctgttggaagtcaggaagcgcatcaatgtgctgcccttaggctcgggggccatcgccgggaaccctctgggcgtcgatagggagctactccgagcggagctgaactttggtgcaattaccctgaatagcatggatgccactagtgagcgagattttgtagcggagtttcttttttgggcgagcttgtgcatgacccacctgagcaggatggctgaggaccttattctgtactgcaccaaagaatttagtttcgtacagttgtccgatgcctacagcaccggcagtagcctgatgcctcaaaagaagaaccccgacagcctggagcttataaggtctaaggccggacgcgtctttggacggtgcgccggactgctaatgacgctcaaagggctgcccagcacctataataaggacctgcaggaagacaaagaggcggtttttgaggtctctgacacaatgtcggccgtgttgcaagttgccaccggagtgatttccacattacaaatccatcaagagaacatgggccaggccttaagccctgatatgctggcaacggatttggcttattatctagtgaggaaaggaatgccattccggcaggcccacgaggcaagcggtaaagcagtgtttatggccgaaaccaagggggtagccctcaatcagctctcactgcaggagctccagactatttcaccgctatttagcggcgacgttatctgcgtgtgggactacggtcactccgttgagcagtacggcgccctgggggggaccgcccgttcatctgtggactggcagattcggcaggtgagggcactgctgcaggctcagcaagcc

SEQ ID NO: 6836 - DNA, 1392 bp, synthetic construct
  misc_feature 1..1392: note = source = /note="Description of Artificial Sequence: Synthetic coding sequence"
  source 1..1392: mol_type = other DNA
atggcatcagaatccgggaagctatggggcggcagatttgtaggcgcagtggatcccatcatggaaaaatttaatgcctccatcgcctacgatcggcacctttgggaggttgatgtgcagggttcaaaggcgtacagcaggggcctcgagaaagcgggtctcttgactaaagccgagatggatcagatcttgcacgggcttgataaagtggccgaggaatgggctcagggcaccttcaaactcaacagtaatgatgaagacatccatacggccaacgaacgaaggctcaaagaactcattggtgcaactgccggaaagctccacacagggcgctctcggaatgaccaggtggtgacagatctaaggctctggatgcgacagacctgctccaccctgagcggactcctgtgggagcttatccggaccatggtggaccgcgctgaggcggagagagacgtcttgttccctgggtacacccatttgcagagggcccagcccatccggtggagccactggatcctatcccatgctgtagctctgacacgcgactctgagagactactcgaggtgcgcaaacgaatcaacgtgttgccactgggatccggcgccattgccggcaaccccctaggcgtagatagggaattgcttagggctgaattgaattttggtgctatcacactcaactcgatggatgccacatccgaaagagacttcgtggccgagtttctcttctgggctagcctgtgcatgacccacttgagtagaatggctgaggatctcattctgtactgtacgaaagagttttcatttgtacagctgtccgacgcctacagtaccggctcaagtctcatgccacagaagaaaaacccagatagcctggagctgatcaggtcaaaggccggtagggtattcggtaggtgtgcggggctgctgatgactttaaaaggccttcctagcacctacaacaaggacctgcaggaggacaaggaagcagtattcgaggtcagcgacacaatgagcgcagtcttgcaggtggccacaggtgtgatttctacactgcagattcatcaggaaaatatggggcaggcactgtcacctgatatgctcgcgaccgacctcgcctattatttggtccggaagggaatgccattcagacaagcccacgaggcctcagggaaagccgtcttcatggccgagaccaagggagtggcactgaaccagctttctcttcaggagttacaaacaattagtcccttgtttagtggcgatgtgatctgtgtgtgggattatggacacagtgtggagcagtatggcgctcttgggggaacagctcgctcctccgtggattggcagatcaggcaggtgagggctctgctgcaggcacagcaagcc

SEQ ID NO: 6837 - DNA, 1392 bp, synthetic construct
  misc_feature 1..1392: note = source = /note="Description of Artificial Sequence: Synthetic coding sequence"
  source 1..1392: mol_type = other DNA
atggctagtgaatctggcaagctgtggggcggacgcttcgtgggtgccgtcgacccaattatggagaaattcaacgcatctatcgcttacgacaggcacctatgggaggtcgatgtccagggttccaaggcatatagccgaggactcgagaaggcaggtctgctgactaaggcggagatggaccagatactccacggtctggataaggtcgctgaagagtgggcccaaggaactttcaaactgaactccaatgatgaggacattcacactgctaatgagcgccgcctcaaggagctgatcggcgctaccgctggtaagcttcataccggccgcagccggaacgatcaggtcgtcactgacctgagactttggatgcgccagacctgttccactctcagcggtcttttgtgggagttgatccgtaccatggtcgaccgtgctgaggccgagcgtgatgtcctgttcccgggctacactcacctgcagcgtgcccagccaatccggtggtcccactggatcttgtcccatgccgttgctcttactcgtgactccgagcgtctcctggaagtgaggaagcgcatcaacgttctaccgctgggctccggcgctatcgccggaaaccccctgggtgttgaccgcgagttgctgcgcgctgaattgaatttcggcgccatcaccctcaactccatggatgcaactagcgagcgcgacttcgtcgccgagttcctgttttgggcctccctttgcatgacccatctcagcagaatggcggaagacttgatcctctattgcaccaaggagttctccttcgtccaactctccgacgcctactcgacaggaagctccctgatgccacagaaaaagaaccctgatagtttggagctaatccgctcgaaggccggtcgggtgttcggccgctgcgctggacttttgatgaccttaaagggtttgccctccacctacaacaaggaccttcaggaagataaggaggcggttttcgaggtatcggacaccatgtcggctgtcttgcaggttgctaccggcgtgatttcaacactgcaaatacaccaggagaacatggggcaagctctctccccagacatgcttgctaccgatcttgcctactatcttgtccgcaagggaatgccttttcgccaagcgcacgaggccagcggcaaggctgtcttcatggcagagaccaagggcgtcgcgttgaatcaactgtcgctccaggaactccagaccatctcgcccctgttctccggcgacgtgatctgcgtgtgggattacgggcacagtgtcgagcaatacggcgcactgggcggcactgcccgttcttccgtggactggcagatccgccaggtccgtgctttgctccaggcgcagcaagcc

SEQ ID NO: 6838 - DNA, 1392 bp, synthetic construct
  misc_feature 1..1392: note = source = /note="Description of Artificial Sequence: Synthetic coding sequence"
  source 1..1392: mol_type = other DNA
atggcgagcgagtcaggcaaactgtggggcggccgctttgtaggcgccgtggaccctataatggaaaaatttaatgcatccatcgcgtatgaccgacatctgtgggaagtggatgtacaaggctcgaaagcgtattcaaggggactcgaaaaagccggcttactgaccaaagccgaaatggatcaaatcttgcatggtctggacaaagtggcagaggagtgggcgcaaggaacattcaaactcaactctaacgatgaggatatccatacagccaacgaaaggagattaaaagagcttattggagctacagctggcaaactgcacactggtcgctcgagaaatgaccaggtagtgacagacttgcgtctctggatgcgacagacatgctccacactgagcggtcttttatgggagttgatccggaccatggtagatcgcgccgaagcggaaagagatgtgttatttcccggatatacccatttacaacgcgcgcagcctattcgctggtcgcattggatactgtcccatgcagtggctctgacaagagacagcgaaaggctgttggaggtgcgaaaaagaatcaatgtgttgccgcttggatctggcgccattgcgggtaatcctcttggggtcgatagagaactgctcagggctgagctgaattttggggccattacattgaactcaatggatgctacaagcgagcgcgattttgtggctgaatttcttttttgggcgtcgctgtgcatgacgcacctcagccgaatggcagaggacttgattctttattgtacgaaagaattctcttttgtgcaacttagtgatgcgtatagcacgggttcaagcttaatgccgcaaaaaaaaaatccagattcccttgagctcatccgctctaaagctggacgagtatttggcagatgcgcaggattgctgatgacattaaaagggcttccctcaacgtataataaagatctgcaagaagataaggaagcagtttttgaagtttcagatacgatgtctgcggtactgcaggtagcaacaggagtcatttcaacattgcagatacatcaggaaaacatggggcaggccctgtcacccgatatgctggctacagatcttgcctattaccttgttagaaaagggatgccctttagacaagcgcatgaagcgagtggtaaagccgtgtttatggctgaaactaaaggcgtagccttaaatcaactgtctttgcaggagctgcaaacaatttcaccgctctttagtggagacgtgatctgcgtttgggattatggccactctgtcgaacaatatggcgcgcttggcggaacagcccgatcttcggtggattggcagatcagacaggttcgcgcgctgctgcaagcccaacaagcc

SEQ ID NO: 6839 - DNA, 1392 bp, synthetic construct
  misc_feature 1..1392: note = source = /note="Description of Artificial Sequence: Synthetic coding sequence"
  source 1..1392: mol_type = other DNA
atggcgtccgagagcggcaagctttgggggggacgttttgtgggggctgtcgaccccatcatggaaaagttcaatgcttccatagcctatgaccgtcacctgtgggaagttgatgtccagggaagtaaggcctacagccgtggtctggaaaaggccggactcctgacaaaggctgaaatggaccagatcctgcacggactcgacaaagtcgcagaggagtgggcacaggggacttttaaactgaattccaatgacgaggatatacacaccgctaatgaacgtcgactgaaggaacttattggtgccactgccgggaagctccatacaggtaggtcccgcaacgatcaggtcgtcaccgatttgaggctgtggatgcgacagacctgcagcacattatccggcctgctttgggagctgattagaaccatggtcgatcgtgcagaagcagagcgagatgtgctgttccccggctatacccacctgcaacgagcccagccaattcggtggtctcattggattctgtcacatgccgttgccctcacgcgtgacagtgagagactgctggaggttaggaaacgaatcaacgtattgcccctgggcagcggagccatagccggaaaccccttgggtgtggatagagagctcctccgcgcggagctgaacttcggcgccattaccttaaatagtatggatgcgacttcggagcgggatttcgtagccgagtttctgttctgggcctcactctgtatgacgcatctttcccggatggcagaggacctcattctgtactgtactaaggagttcagttttgttcagctctccgacgcctacagtaccggatcgtccctgatgccacagaagaaaaatccagactccctggagctcattaggtccaaggccggacgtgttttcggccgctgtgccggcctgttaatgacgttgaagggtctcccttcgacgtacaacaaggatctgcaggaagacaaggaggctgtctttgaagtgtccgacacaatgagcgcagtgttgcaggtggcaacaggagtcatttccacgctacagatccaccaggaaaacatgggccaagccctgagcccagacatgctcgccaccgatctggcatactatttggtgcggaagggtatgccgtttagacaggcgcacgaggcctcggggaaagctgtcttcatggcggaaaccaaaggagtggcccttaaccagctgagcttgcaggagctccagacgatctccccactgttctctggggacgtaatatgcgtctgggactacggtcactcggtggagcagtacggggctttggggggcaccgcaagaagctccgtggattggcagatcagacaggtgcgcgcactgctgcaagcccagcaggct

SEQ ID NO: 6840 - DNA, 1392 bp, synthetic construct
  misc_feature 1..1392: note = source = /note="Description of Artificial Sequence: Synthetic coding sequence"
  source 1..1392: mol_type = other DNA
atggcttccgagagcggtaagctatggggaggacggttcgtgggtgctgtagaccctatcatggagaagtttaacgccagcatcgcctacgatcgccacctgtgggaggtggacgtacaaggttcaaaagcctacagtcgcgggctggaaaaggccggactgctcactaaagcagagatggaccaaatcttgcacggccttgacaaagtggctgaagagtgggcacaaggcacttttaagctcaattcaaacgacgaggatatacacacagcaaacgaaagacgtttgaaggagcttattggcgctacagccggtaaactgcataccggaagatcacggaatgaccaggtggttaccgacctgaggctgtggatgagacagacctgtagcacactgagtggattattgtgggaactgatccggactatggtggacagagcggaagctgagagagatgtgctgttccccgggtatacgcacctccaacgagcccagcctatccgttggagccactggattttgtcccacgctgtggctctgacaagggactcagaacgtctgctcgaggtgcgaaagcgaatcaacgtcctgcccctgggctccggcgccatcgccggaaatcctctcggtgtagaccgggaactgctgagggccgagctgaacttcggggccattaccctgaactccatggacgccacttccgaacgtgactttgtcgccgagttcttgttttgggccagtttgtgcatgacccacttgagccggatggctgaggatctgatcctatactgtaccaaggagttcagtttcgtgcaactcagcgacgcttacagtactggctccagtcttatgccacagaaaaagaacccggatagcctagaactcattcgtagtaaagcagggcgcgtgtttggaaggtgtgcaggcctgctcatgacccttaagggactaccctctacatacaataaagacctccaggaggataaggaagctgtatttgaagtgtccgacactatgtccgcagtccttcaggtggcaaccggggttatcagcactctgcaaatacaccaggagaatatggggcaggcgctgtccccagacatgctggcgacagacctcgcctactatcttgtgagaaagggaatgcctttcaggcaggcacacgaggcttctgggaaggccgtgtttatggcagaaactaaaggggtggccttaaatcagcttagcctgcaggaattgcagaccataagcccactatttagcggggatgttatttgcgtttgggactacggacattcagtggaacagtatggggcactgggcggcactgcacgttcaagtgttgattggcagatcagacaggtgagggccctgctgcaggcacagcaagcc

SEQ ID NO: 6841 - DNA, 1392 bp, synthetic construct
  misc_feature 1..1392: note = source = /note="Description of Artificial Sequence: Synthetic coding sequence"
  source 1..1392: mol_type = other DNA
atggcttctgaatcaggaaaattatggggagggagatttgttggggctgttgatcctataatggaaaaatttaatgcttcaatcgcatatgatagacatctttgggaagttgatgttcaaggatctaaagcatattctagaggattagaaaaggctggattattaactaaagccgaaatggatcaaattttacatggattagataaagttgctgaggaatgggctcaagggacttttaaattaaatagtaatgatgaagatattcatacagctaacgaaagaagattaaaagaattaattggggcaacagctggaaaattacatacaggaagaagtagaaatgaccaagttgttacagaccttagactttggatgcgtcaaacatgttctacacttagtggattgttatgggaattaattagaacaatggttgatagagctgaagctgaaagagatgttttatttcctggatatactcatcttcaaagagctcaaccaatacgttggtctcattggattttatctcatgctgtggctctaacaagagattcagaaagattgttagaagtaagaaaacgtattaatgtattaccattaggaagtggtgcaatagcaggaaacccattgggagtagatagagaattattaagagctgaacttaattttggagctattactttgaatagtatggatgctacaagtgaaagagatttcgtagctgaatttttattttgggcatcattatgtatgacacatttatctcgaatggctgaagacttaattctttattgtacaaaagaattctcatttgtacaactttcagatgcctattcaacaggaagttcattaatgcctcaaaaaaagaatccagatagtttagaacttattagatcaaaagccgggagagtttttggaagatgtgccggattattaatgacattaaaaggattaccttcaacttataataaagatttacaagaagataaagaagctgtttttgaagtttctgatactatgagtgctgttttacaagttgctactggtgttatatctactttacaaattcaccaggaaaatatgggacaagctcttagtcctgatatgttagctactgatttagcttattatttagttagaaaaggtatgccatttagacaagcacatgaagcttctggaaaagctgtatttatggctgagacaaaaggagtggctttaaatcaattatcattacaagagttgcaaaccatttcaccattattctcaggagatgttatatgtgtatgggattatggacattcagtagaacaatatggtgcattaggaggaactgctagatcaagtgtagattggcaaattagacaagtcagagcattattacaagcacaacaagca

SEQ ID NO: 6842 - DNA, 1392 bp, synthetic construct
  misc_feature 1..1392: note = source = /note="Description of Artificial Sequence: Synthetic coding sequence"
  source 1..1392: mol_type = other DNA
atggcctcggagagcggaaagctctggggagggagattcgtgggggccgtggatccgatcatggagaagttcaatgcctcaattgcttacgacagacacctctgggaggtggacgtgcaggggtcaaaggcctactcccggggactcgaaaaggctggactgctcactaaagcagaaatggatcagattttgcacggactcgacaaagtggcggaagagtgggcccagggaaccttcaagctgaattccaacgacgaagatatccatacggctaacgaacggcgcctcaaggaactgatcggcgccactgctggcaaactgcacaccggacggagccgtaacgaccaggtggtgactgacctgcggctgtggatgcgccaaacctgctccactctgagcggactgctctgggagctcattcgcacgatggtggacagggccgaggcagaaagagacgttctgtttccgggctatacccacctccagcgcgcacagccaatccggtggtcacattggatcttgtcacatgcggtcgcccttaccagggactccgagcgccttctggaagtccgcaaacggatcaatgtgctgccgctgggttcgggagcaatcgccggcaaccccttgggtgtggatagagagctgctgcgcgcggagttgaacttcggagccatcacgctgaattcgatggatgcgacctcagagcgggatttcgtggcagagttcctgttctgggcatccctctgcatgacccacctgtccaggatggctgaagatctcatcctgtactgcactaaagaattttccttcgtccagctctcggatgcctactcgactggcagctcgctgatgcctcagaagaagaacccagattccctggagctcatccgctctaaggcgggccgcgttttcggaaggtgtgcgggtttgctgatgaccctgaaggggcttcctagcacctacaacaaggacttgcaagaggacaaagaagctgtctttgaggtgagcgacaccatgtcggccgtcctgcaggtcgccactggagtgatctcaaccctgcaaatccaccaagaaaatatggggcaagccctgtcaccggatatgcttgcaactgacctcgcatactacctcgtgcgcaagggtatgccgttccgacaggcgcacgaagcctcggggaaggcagtgttcatggcggaaaccaagggagtcgctctgaaccagctgtcccttcaggaactgcagactatctctccactcttttcgggcgacgtgatctgcgtctgggactacggacatagcgtcgaacagtacggagcccttggaggcactgcgagatcgtccgtggactggcagattagacaagtgcgggccctgcttcaagctcaacaagcg

SEQ ID NO: 6843 - DNA, 1392 bp, synthetic construct
  misc_feature 1..1392: note = source = /note="Description of Artificial Sequence: Synthetic coding sequence"
  source 1..1392: mol_type = other DNA
atggcatcagaaagcggcaaactctggggggggcgattcgtgggagctgtggacccaattatggagaagttcaacgcaagcattgcctacgatagacacctctgggaagtagatgtgcaaggctccaaagcttatagccgtgggctcgagaaagcgggtttactcactaaggccgagatggaccagattctccatggccttgacaaggtggctgaagaatgggcacagggtaccttcaagctgaacagcaatgatgaggatatccacactgcaaacgaacgcagattgaaggaattgattggagccacggcagggaagttgcataccggccggagcagaaacgatcaggttgtcacagatttgagactatggatgcgtcaaacttgtagtacgctctctgggttactgtgggagctgatccggacgatggttgatcgcgctgaggccgagagagatgtcctgttccccggctacacacacttacaacgagctcagcccattagatggtcgcactggatcctgagtcatgctgtggcgctcactagagatagtgaacgacttctggaagttcgaaaaaggataaacgtcctgcccctgggatcgggcgccatcgcaggaaatcctttgggcgtggacagggagcttctacgcgccgagctgaactttggggccattacattgaactctatggatgccacctctgagcgcgattttgtagccgagttcctcttctgggccagcctatgtatgactcacctttctcgtatggccgaggacttgatcttgtattgtacgaaggaattttctttcgtgcagctgagcgatgcttactctaccggttcttctctaatgcctcaaaaaaagaaccccgacagccttgaattaattaggagtaaagcgggcagagttttcggacgttgcgctggactgctgatgaccctaaaggggcttccgagtacttacaataaagaccttcaggaggacaaagaagctgtgttcgaagtgtctgacactatgtccgcagtgctgcaggtggcaaccggtgtgatttctacacttcaaatacaccaagaaaacatgggccaagctctctctcccgacatgctggctacagatttagcatattatctcgtccggaaaggaatgccctttcggcaagcacacgaggcctcaggaaaagcagtttttatggcagagaccaaaggagtggccctgaaccagttgtccctacaagaattgcaaacaatctccccactgttcagcggagacgtaatctgcgtctgggattacggtcactccgttgaacagtacggtgctctcggcggcactgccaggagctccgtggactggcagatacgacaagtccgggctctcctgcaagcacagcaggcc

SEQ ID NO: 6844 - DNA, 1392 bp, synthetic construct
  misc_feature 1..1392: note = source = /note="Description of Artificial Sequence: Synthetic coding sequence"
  source 1..1392: mol_type = other DNA
atggcttccgaatccggtaagctgtggggtggtcggtttgtgggcgctgtggacccaataatggagaagtttaacgcatctatagcgtatgaccggcatctgtgggaagttgatgtgcagggatctaaagcctacagccgcggcctggagaaggctgggttgcttactaaagctgagatggatcagattctgcacggattagataaggtcgctgaggagtgggcacaaggaactttcaagctcaatagcaatgatgaagatatccacacagccaatgagagacgcctgaaagagctcatcggtgcgaccgcaggtaagctgcacacaggtcggtccagaaacgaccaggttgtcacggatttaagattatggatgcgacagacgtgctcaactctgagtggactcttatgggagctgataaggactatggttgatagagccgaagctgagcgggacgtcttattccccggttacacccatctgcagagggctcagcctattcgttggtcacactggattctgtctcatgcagtagccctgacaagggattctgaaaggctactggaggtcaggaagcgcatcaatgtgctaccactgggcagcggtgctatagcaggcaaccccctcggcgttgatcgagagttgctccgcgctgagctgaacttcggtgccattacgctaaacagcatggacgccacatctgaaagggacttcgtcgctgaatttctcttttgggcttccctctgcatgacccatctctcgcgtatggctgaggacctcatcctctattgcaccaaagaattctcttttgtccagctgtccgacgcatacagcaccggttcttctttgatgccacaaaaaaagaacccagactcattggagttgatccgatccaaggcaggccgcgtgtttggcagatgcgccgggctgttaatgacactgaaagggctcccgtctacctacaacaaagacctgcaggaagacaaagaggccgtgtttgaagttagcgacacaatgagcgctgtcctacaggtggcgactggagtgatatccaccctgcaaatccaccaggaaaatatgggacaagctctgagtcccgacatgcttgcaacagaccttgcatactatctggtgcggaaaggcatgccctttaggcaagcccacgaagcttctggcaaggccgttttcatggctgagacgaaaggggtggcactaaatcagttgtccctgcaggaacttcagacaatctcccccttgttttcgggagatgttatctgcgtctgggattacgggcactcagtggaacagtacggagcactgggcggaactgctcgaagctcagttgactggcagattcgccaggtgcgcgctctgttgcaggctcagcaggct

SEQ ID NO: 6845 - DNA, 1392 bp, synthetic construct
  misc_feature 1..1392: note = source = /note="Description of Artificial Sequence: Synthetic coding sequence"
  source 1..1392: mol_type = other DNA
atggccagcgagagtgggaagttgtggggcggaagattcgtgggagctgtggatccgattatggaaaaattcaatgcttcaatcgcttacgataggcacttgtgggaggtcgatgtgcagggttccaaggcctactcccggggtctcgaaaaagccggcctcctgaccaaggctgagatggatcagatacttcatgggctagacaaagtggctgaagaatgggcccagggaacttttaaactcaactccaatgacgaggatattcatactgcaaacgagcgcaggctaaaggaacttattggagccaccgcgggtaagctgcataccgggagaagccggaatgatcaggtggtcacggatctgcgtttatggatgcgccagacttgttccaccttgtccggactgttgtgggaattgatcaggaccatggtggaccgtgcagaagcggagcgggacgtgctctttccaggctacacccatctccaaagggcccaacccattcggtggagccattggatcttgtcccatgccgtggcgctcaccagggacagtgagcggttgctagaagtgcgcaaaagaatcaacgtgctaccactggggtccggtgcgattgcaggcaacccactaggcgtggaccgcgaattgcttcgggcagagctgaatttcggggcaattaccctgaatagtatggatgccacttccgagcgcgatttcgtggctgagtttttgttctgggcctctttgtgtatgactcatctgagcagaatggctgaagaccttattctgtactgcacgaaggaatttagttttgtgcagctgagtgatgcctacagcaccggttcaagcttgatgccccaaaagaagaacccagacagcttggagctgatacgaagcaaagccggccgcgtctttgggcgttgcgccgggctgcttatgactctgaaaggcctgccctccacatacaataaggatctgcaagaggacaaggaagccgtgtttgaggtgtcagataccatgagcgccgtgctgcaggtggcaaccggcgtgatctccacattgcagatccaccaggaaaatatggggcaggctttaagccccgatatgctggcaacagatctggcgtactatttagtgagaaaaggaatgccttttcggcaggcccacgaggccagcggcaaggccgtattcatggcggagaccaagggagtggctctcaatcagctgtcactgcaggaactgcagacaatctctcctctgttttccggagacgtcatttgtgtgtgggattacggccactctgttgaacaatacggcgccctcggtggtacagcaaggtccagcgtggactggcagatcagacaggtgagagcccttttacaggcccaacaagcc

SEQ ID NO: 6846 - DNA, 1392 bp, synthetic construct
  misc_feature 1..1392: note = source = /note="Description of Artificial Sequence: Synthetic coding sequence"
  source 1..1392: mol_type = other DNA
atggccagtgagtccggcaaattatggggcggccgatttgtgggcgctgtcgaccccatcatggagaagtttaacgcatccatcgcttacgatagacatttgtgggaggtggatgtgcaaggttcaaaagcctattcaagaggccttgagaaggccgggctgcttaccaaggccgaaatggaccaaatccttcatggattggataaagtcgcggaggaatgggcgcaaggaactttcaagctgaactcaaacgatgaggatatccatacagcaaacgagcggcgactaaaggagctgatcggagctactgcggggaagcttcacactggacgatcccgcaacgatcaggtggtcaccgatctgagactgtggatgagacagacttgctcgacgctgtccggcttgctgtgggagctcataagaactatggtagatcgtgccgaggcagaaagggatgttttatttcctggatatacacaccttcagagggctcaacccatcaggtggtcccactggatattgtcacatgccgtggccctaaccagggactcagagagattgctcgaggttaggaagaggattaacgtgctacccctgggatcaggagcaatcgccggtaatcccttaggggtggatcgggagcttcttcgggcagaacttaatttcggcgccatcactctcaacagcatggatgccacatcagagcgcgacttcgtcgctgagtttctgttttgggcatcactttgcatgactcacctgagtagaatggccgaggatctcatcttgtattgtaccaaggaattcagcttcgtccagctttcagatgcatacagcactgggtcctccctgatgccccagaagaaaaatcctgactcgctggagttgatcaggtctaaggccggaagagtgttcggaagatgcgccgggctgctgatgacgttgaaaggacttccatctacgtataacaaagatcttcaggaggacaaagaggcagtgtttgaggtatcagatactatgtcagcggtactccaggtggctaccggagtgatatctactctgcagatccaccaggaaaacatggggcaggccctgtcccctgacatgctggctacagacctcgcatattacctggtgcgtaaagggatgccatttagacaagcacacgaggcttcagggaaggcggttttcatggcagagaccaaaggtgtggccctaaaccagctgtccctgcaggagctgcagacgatctcaccgctatttagtggagacgtgatatgtgtttgggattacggccattctgtcgagcaatatggcgcgctgggcggaaccgccaggagcagtgtggactggcagatacggcaggttcgcgctctcctgcaggcacaacaggca

SEQ ID NO: 6847 - DNA, 1392 bp, synthetic construct
  misc_feature 1..1392: note = source = /note="Description of Artificial Sequence: Synthetic coding sequence"
  source 1..1392: mol_type = other DNA
atggctagcgagtccgggaaactttggggaggacgattcgttggagccgttgatccgattatggagaaatttaatgcgtctatcgcatacgatcgccatctctgggaggttgatgttcagggttcaaaggcgtactctcgtgggcttgagaaagcgggcctactgacgaaggcggagatggatcagatcctgcatggattggacaaggttgcagaggaatgggctcaaggcacttttaagctaaatagtaatgatgaggacattcataccgccaacgaacgaagactgaaagaactgattggagcaacggccggaaagttgcatacaggtcgttctaggaatgaccaagtcgtgaccgatctcaggctctggatgagacaaacttgtagtacactgtctggattgctttgggagcttatccgcaccatggttgaccgggctgaggctgagagagatgtgctatttccagggtacacccatctgcagagagctcaacccattcgttggagccattggatcctctcgcacgcagttgcattaacccgcgatagcgaacgtctgctcgaggtacgcaagcggattaatgtactcccactcggttctggcgctatcgcgggcaaccctttgggtgtggatagagaactcctgcgagctgaactcaatttcggggccattacgttaaactccatggacgcaacatctgagcgagatttcgtggccgaattcctgttctgggcctcgctttgcatgacacacctctctcgcatggccgaggatctaatcttgtactgtacaaaggagttctctttcgttcagctctccgacgcgtactcaaccggctcctccctgatgcctcagaagaagaatccagattctctagaactaatacgctctaaggctggtcgtgtttttgggcgttgcgcaggcctacttatgacactcaagggtttaccatcaacttataacaaggacctccaggaagacaaggaggcagtttttgaagtcagcgacacgatgtctgctgtcctccaggttgcaactggcgttatatctaccctgcagattcaccaagagaacatgggccaggcgctaagtccagacatgttagcaaccgacctcgcgtattacctggtcagaaaaggcatgccctttcgccaagctcatgaggcctctggtaaggccgtttttatggctgagacaaaaggtgttgcattgaatcaacttagcctgcaagagcttcaaacaatctctcctctctttagtggtgacgtaatttgcgtttgggattacggtcacagcgttgagcaatatggggcgctgggcggaacggcccggagttcagttgactggcaaattcggcaggttcgagcattgcttcaagcgcagcaagcc

SEQ ID NO: 6848 - DNA, 1392 bp, synthetic construct
  misc_feature 1..1392: note = source = /note="Description of Artificial Sequence: Synthetic coding sequence"
  source 1..1392: mol_type = other DNA
atggcctcggagtctggtaagctatggggaggacgattcgtcggcgccgttgatcctattatggagaaattcaatgcctccattgcctacgaccgacatctgtgggaagtggacgtgcagggctcgaaagcctacagtaggggactcgaaaaagcaggattgttgacaaaggctgaaatggatcagattctgcacggactggataaggtcgcagaagagtgggcgcaggggacattcaagttaaatagcaatgatgaggacatccatactgccaatgagcgacgcttgaaagagttgatcggagctactgccggaaagttgcataccggtcggtcaaggaacgatcaggtggtgacagatcttcggctgtggatgcgacagacatgtagcacactaagcgggctcctgtgggagctcattcgcacaatggtggatagagccgaagctgaacgtgatgttctttttcccggctacacccacctccagcgagcgcaaccaattcgatggtctcattggattctttcccacgcagtggctctgactagggatagcgagaggcttttggaggtccggaagcggattaacgttcttccccttggctcaggagcaattgctggcaaccctttaggcgtggacagagaacttctcagagcggaattaaattttggtgccatcacactgaactccatggacgctacttccgaaagggactttgtagctgaatttttgttttgggcctctctatgcatgacacacctgtcacggatggctgaagatctgattctttactgtacgaaggaatttagctttgtgcagctgagcgacgcgtattctactgggagttcactgatgccccagaaaaagaaccctgactccttagagctgataagatcaaaagcaggtcgggtgttcggacgctgtgcaggtctgctgatgacactcaagggtctgccatctacttacaataaagatctgcaagaagataaagaggccgttttcgaggtatcagacacgatgagcgccgttctccaggtggctaccggggtcatctcgacgttgcagattcaccaagaaaatatgggccaggctctgtcaccggatatgctggcaacggatctcgcctactacttagtcaggaaaggcatgccgtttaggcaggctcacgaggcgtcgggcaaggccgtgttcatggccgagactaagggggttgccctcaatcagctttcacttcaggagctccagaccatctcacccctgttttccggcgatgttatctgcgtgtgggactacggacactccgttgagcagtatggtgcgctgggcggaacagcaaggtcgtccgtagattggcaaatcagacaggtgcgggcactgcttcaggcacaacaggct

SEQ ID NO: 6849 - DNA, 1392 bp, synthetic construct
  misc_feature 1..1392: note = source = /note="Description of Artificial Sequence: Synthetic coding sequence"
  source 1..1392: mol_type = other DNA
atggcatcagaatcaggcaaactttggggtggtcgattcgtgggggccgttgacccaattatggaaaagtttaatgctagcatcgcttatgatcgtcatctatgggaagttgatgtgcagggcagcaaggcctattcacggggactggaaaaagcagggctgctcacaaaggctgaaatggatcagatcctacacggattagataaggtggcggaagagtgggcacagggtacttttaaactgaattcgaatgatgaagacattcacactgcaaacgagaggcgccttaaggagttaataggagctaccgccggcaaattgcacactggaaggagcagaaatgaccaggtggttaccgatttgcgcctgtggatgcgacaaacttgttcgaccttatcgggccttttgtgggaattgattaggaccatggtcgaccgcgccgaggccgagcgggatgttttattccctgggtacacccacctgcagcgcgcacagcctataagatggagccattggatcctctcccatgccgttgccctgacgagagactccgagaggttgctggaggtgcgcaaacggatcaatgtgttgccattgggaagtggtgctattgccggcaatcccctgggcgtcgaccgtgaacttctgcgggctgaactgaatttcggtgcgataacattgaacagcatggacgctacttcggagcgcgacttcgtggccgaatttctgttttgggcctccctgtgtatgactcacctaagtagaatggctgaggacttgatcctgtactgtacaaaagagttcagttttgtgcagttatccgacgcatattccacgggatcgtccctcatgccacagaagaagaatccagattctctggaactcataagaagcaaggccgggcgcgtgtttggtaggtgtgccggtcttcttatgaccctcaaggggcttccctccacctacaataaagatctccaagaggataaggaagccgtttttgaggtgtcggatacaatgtcagcagtcctgcaggtggcgacaggagtgataagcacgctgcagatccaccaggagaatatgggccaggccctttcgcccgacatgcttgcgactgacctcgcatactacctggttaggaagggaatgcccttccgccaggcacatgaggcatcaggaaaggccgtttttatggccgagaccaagggagtagccctgaaccagctgtccctgcaagagttgcagaccatctctcccctgttttctggcgacgtaatatgtgtgtgggactatggccatagcgtagagcagtacggagcccttgggggaacggccagatcttctgtggactggcagatcagacaagtgcgcgcgctgctacaggcccaacaggca

SEQ ID NO: 6850 - DNA, 1392 bp, synthetic construct
  misc_feature 1..1392: note = source = /note="Description of Artificial Sequence: Synthetic coding sequence"
  source 1..1392: mol_type = other DNA
atggctagtgaatccggtaagttgtgggggggaagatttgttggcgccgttgaccctattatggagaagttcaacgcttctatcgcatatgatagacatctgtgggaggtagatgtccaaggatctaaggcatattcgcgtggtctcgaaaaggcaggattactgaccaaagcagagatggatcaaatcttgcatggtcttgacaaagttgcggaggagtgggcacaaggaaccttcaaattgaactctaatgatgaggatattcatacagccaatgagcggagattgaaagaactcatcggtgcaactgccggtaagttgcacactggcaggagtagaaatgaccaggtcgtgaccgatttgcgattatggatgagacaaacctgttctaccttgtctggtttgctttgggaattaattcgtaccatggttgatagggctgaggcagagagagacgtgttgttcccagggtatactcatctccaaagagcacaaccgatacgttggtctcactggatcttgtcgcacgctgtggccctgactagggactcagagcggctattggaagttagaaagagaattaatgtattgcctttgggttcaggtgctatcgcaggtaatcctcttggagtcgatcgagagttgttaagggcagaacttaatttcggagccataaccttaaacagcatggacgccacgagcgaacgtgatttcgtggccgagttcttgttttgggcttctctctgcatgacacatctgtccaggatggccgaagatctcatactttactgcacgaaggagttcagctttgtgcaattgtctgatgcttactctaccggttcctctcttatgcctcagaagaaaaaccctgacagtcttgagctcatcaggtctaaagcaggtagagttttcgggcgctgtgctggcttactcatgactttgaagggacttccaagtacctacaacaaggacctccaagaggacaaagaggctgtgttcgaggttagcgacacaatgtctgctgtccttcaagtggctactggcgttatttcaacccttcagatccatcaagagaatatgggtcaagctttgtctccagatatgttagcaacagatctggcatattatttagttagaaaggggatgccatttaggcaagctcatgaggcttccggaaaagctgtttttatggcagagaccaagggtgttgctttgaaccagctgtctctccaagaacttcaaacaatctcaccactcttcagtggagatgttatttgtgtatgggattatggtcactctgtggagcaatatggagcactcggaggaacggcaaggtcctccgtagattggcagatccgacaggtcagagctcttttacaggctcagcaagcc

SEQ ID NO: 6851 - DNA, 1392 bp, synthetic construct
  misc_feature 1..1392: note = source = /note="Description of Artificial Sequence: Synthetic coding sequence"
  source 1..1392: mol_type = other DNA
atggcctcggaatctggaaagctatgggggggacggtttgtgggagcagtcgatccaatcatggagaagttcaacgcatcgatcgcgtacgatagacacctctgggaagttgatgtgcaaggatcgaaggcatacagccggggattggagaaagcaggacttcttacaaaggcagagatggaccaaatattacatggattggacaaagtcgccgaagagtgggctcagggaacattcaaattgaatagcaatgatgaagatatccacacagctaatgaacgacgcttgaaggaactcattggagctactgctggtaaactccataccggaagatcgcgaaacgatcaagtcgtaacagatctgaggttatggatgcgacaaacctgttcgactttgtccgggctgctctgggaacttatcagaaccatggtcgaccgagcagaagccgaaagggatgttctcttcccagggtacactcatctccaaagagcgcaacctattcgatggtcgcattggattttgtcgcacgcagttgctctcacaagagattccgagagactacttgaagtgaggaagcgtattaatgttcttccacttggaagtggagctatcgccggaaatcctttgggagtggatcgggaattgcttagagcagagcttaattttggagctatcacactaaattctatggatgctacgagtgaaagagacttcgtcgctgagtttctcttctgggcatctttatgcatgacccacttaagtagaatggcggaagacctcattttgtactgtactaaagagttttccttcgtccaactctccgatgcttattcaaccggatcatcactgatgccacagaaaaagaatccagattcacttgaattaattcgttccaaagctgggcgcgtttttggacgatgcgcgggtctactgatgacactgaagggactgccgtcaacttacaacaaagatctacaagaagacaaggaagcagtctttgaagtatcagatactatgagtgcagttctgcaagttgctactggagtgatttcaaccctccaaattcatcaggaaaatatgggacaagctctttccccagacatgctcgccacagacttagcatattacttggttagaaaaggaatgccgtttagacaggcacacgaagcttcgggcaaagctgtttttatggctgagactaaaggtgtagcattgaatcaactctccttacaagagttgcaaacgattagcccattattttcgggagacgttatctgtgtttgggattacggacactccgtggagcagtatggagccctgggaggaacggctcgaagttcagttgattggcaaatacgccaggtcagagctttgcttcaggcacaacaggcc

SEQ ID NO: 6852 - DNA, 1392 bp, synthetic construct
  misc_feature 1..1392: note = source = /note="Description of Artificial Sequence: Synthetic coding sequence"
  source 1..1392: mol_type = other DNA
atggccagtgagtctggcaaactgtggggagggcgcttcgtgggcgccgtcgatccaattatggagaaatttaacgcctccatcgcctacgatcgtcatctgtgggaagtcgatgtccaaggtagtaaagcttacagtcgaggtttagaaaaggccgggctgctcaccaaggccgagatggatcaaatcctgcacggcctcgataaggtagctgaggagtgggcccagggtacctttaagctgaatagcaatgatgaggatatccataccgctaacgagaggagactcaaggaactgattggagccaccgcagggaaactgcacactgggcggagccgaaacgaccaagtcgtgactgacctgaggctgtggatgcggcagacatgttccaccctctccggcctgctgtgggagctgattagaaccatggtggaccgggccgaggccgaaagggatgttctgttcccagggtacactcatttacagagggctcaaccaatccggtggagccactggatactgtcacatgcagtggccctcacccgggattccgagagacttctggaagttagaaagaggatcaatgtcctgcctctgggctccggggccattgccgggaatccactgggtgtggatagagagctattgagagccgagctaaatttcggcgccattacactaaattcgatggacgccaccagtgagcgagactttgtggccgagtttttattttgggcatctctttgtatgacccacttgtcacggatggccgaagatctcatcctttattgtacaaaggaattttctttcgtgcaacttagtgacgcttactcgacaggcagtagcctgatgcctcagaaaaaaaatcctgacagtctcgagttgatccgctctaaggccgggagggtttttggacgctgtgctggcttgttgatgaccctgaagggcctgccatcaacttacaataaggacctccaggaagataaggaggcggtgtttgaggtatcggacacgatgtccgcagtgctgcaggtcgccacgggagtgatttccacccttcaaatccaccaagaaaacatgggccaggctttgtcaccagatatgctggcaaccgacctggcatattatctggtgcgtaagggtatgccttttagacaggcccatgaagcaagcgggaaagctgtgtttatggctgaaaccaaaggcgtggcactgaatcagttatcgttacaagagctccaaaccatttcacccttgttctctggcgatgtaatttgtgtgtgggactacggccactcagttgaacagtacggagcccttggcggcacagcacggtcatccgtggactggcagatacgccaggtgcgagcccttctgcaggcacagcaggcc

SEQ ID NO: 6853 - DNA, 1392 bp, synthetic construct
  misc_feature 1..1392: note = source = /note="Description of Artificial Sequence: Synthetic coding sequence"
  source 1..1392: mol_type = other DNA
atggcttctgagagcggcaagctgtggggagggcgctttgtaggcgcggtggatccgatcatggagaagtttaacgcatcaattgcatatgatagacacctctgggaagtggacgtccaagggtctaaggcctatagcaggggacttgagaaagccgggctcctgacgaaggctgaaatggatcagattctgcacgggctggacaaggtagctgaggagtgggctcaagggacttttaagttgaattctaacgacgaggacatccacacagccaacgaacgacgactgaaagaactgatcggagcaactgcaggaaaactgcatacaggacgctcaagaaacgaccaggtggtcaccgaccttagactttggatgaggcagacatgtagcactctctctggcctcctgtgggaactgattagaaccatggtcgatagggcagaggccgaacgcgacgtgcttttccctgggtatacacacctccagagagcccaacctatccgctggagtcattggatcctgtcccacgccgtggccctgaccagagattcagagcgactcctggaagtgaggaaaagaatcaacgtgctgccccttgggtccggcgccatcgccggtaaccctctgggtgtggatcgagagctgctccgcgcagagctcaacttcggcgccattacattgaacagcatggacgccacaagtgagcgggactttgtggccgaattcctgttttgggcttccctgtgcatgacacacctgtccaggatggcagaggacctgattttgtactgtaccaaagaattcagttttgttcagctcagtgatgcctatagcaccgggagctctcttatgccgcagaaaaagaatccagatagcttggaactgattcgctctaaggccggtagagtctttgggcgctgcgcgggcctgctgatgacactcaagggcctgccgtccacttacaataaagatctccaggaagataaggaagccgtctttgaggtcagcgacaccatgtccgctgtgctgcaggtggcaaccggtgtgatttccactttgcaaatacaccaggagaatatgggacaggccttgtcccccgatatgctcgctacagacctggcatattacctggtgcgcaaaggtatgccttttcggcaggcccatgaagcgtctgggaaggcggtttttatggccgaaactaaaggcgttgctcttaatcagctgagtcttcaggagctccagactattagcccactgttctcaggagatgtgatttgtgtttgggactacggacattccgtggagcagtacggtgctttggggggaactgcacgctccagtgtggactggcaaataaggcaggttcgagctctgcttcaggcccaacaagcc

SEQ ID NO: 6854 - DNA, 1392 bp, synthetic construct
  misc_feature 1..1392: note = source = /note="Description of Artificial Sequence: Synthetic coding sequence"
  source 1..1392: mol_type = other DNA
atggcaagcgaaagcggcaagctctgggggggtcgattcgtcggggccgtggaccccatcatggagaagtttaatgcctccattgcgtacgatcggcacctctgggaggtagacgtgcaggggagcaaagcgtattcacgtggactggaaaaagcggggcttctcactaaagcagagatggaccagattcttcacggtctggataaagtcgctgaagagtgggcacagggcacgttcaagctgaactctaacgatgaagatatccacactgcaaatgagcgcaggctgaaggagttgataggcgctacagccgggaagctccacacgggcagatcacgaaacgaccaggtggtgacagatttacggttatggatgcgtcaaacgtgttccactttatcagggctcttgtgggaattgattcgcactatggtcgatagggccgaagcggaaagagatgtgctgttcccgggctacactcacttgcaacgggcacagccaatccgctggtctcactggatcctcagccatgccgtagccttgacgagagattcagagaggctcctcgaggtgcgcaaacggattaatgtactgcccctgggcagtggcgccattgctgggaatcccttaggtgttgacagggagctgctccgagctgagcttaatttcggtgctatcactcttaattcaatggacgctactagcgagcgcgatttcgttgctgagtttctattctgggcctctctttgtatgacccatctttctagaatggcagaggatttaatcctctattgtacaaaagagttttcatttgtccaactgtcagatgcctactcaaccggctcttcgctgatgccacagaaaaagaaccccgactctcttgagctgattagaagcaaggcggggagggtgtttggtcgatgtgcaggtctgctgatgacattgaagggcttgccgagtacttacaataaagacctccaggaggataaagaggctgtatttgaagtgtctgatacgatgtccgccgtgttacaagtggctactggggtcatctctaccttgcagatacaccaagagaatatggggcaggcactgagtcccgatatgttggctaccgatttagcctactatctggttcgaaaaggtatgcctttccggcaggcccacgaggcctccggaaaggctgtcttcatggccgaaaccaagggtgtcgctctaaaccagttgtcgctgcaggagctccagactatctccccactatttagtggcgacgtgatctgcgtgtgggattacggccactcagtggaacagtatggagctctgggcggcactgcccgctccagcgttgactggcaaatcaggcaagtccgagcgttgctgcaagctcaacaagcc

SEQ ID NO: 6855 - DNA, 1392 bp, synthetic construct
  misc_feature 1..1392: note = source = /note="Description of Artificial Sequence: Synthetic coding sequence"
  source 1..1392: mol_type = other DNA
atggcttccgagtccggaaagttatggggaggacgtttcgtaggcgcggtggaccccatcatggaaaaatttaatgcctctatcgcatacgacagacatctctgggaggtggatgtccagggctccaaagcttactcaaggggcctggaaaaggccggccttcttacaaaggctgagatggaccagatcctgcatggcctcgacaaggtggcagaagagtgggcccaggggacattcaagttgaacagtaatgacgaggacattcacaccgccaatgagcgtcggttgaaggagctgattggcgcaacagcaggcaagcttcatactgggagatctcgtaacgatcaggtggtgacagacctgcgcctgtggatgcggcaaacatgttccacacttagcggattactgtgggaactgatcagaaccatggtggatagagctgaggcagaaagagatgtgctcttcccaggctatactcacctgcagcgcgctcagccaatccgatggagtcactggattttgtcacatgcagtggctttaaccagagattccgaacggctgcttgaggtgagaaagagaatcaatgtcctgcccctgggttccggggccattgcaggcaatcctctgggggtggatcgggagctgctcagagccgagctgaatttcggggctatcactctgaattctatggacgcaacaagcgaacgggacttcgtggccgaatttttgttttgggctagtttgtgtatgacccatctgagtaggatggcggaagacctaattctgtactgcaccaaagaattctcttttgttcagctgtctgacgcatactctacagggtcaagcctgatgccccagaagaagaaccctgattccttggagctaatccggtccaaagcaggccgggtttttggtagatgtgctggactgctcatgaccttgaagggcttgccaagcacctataacaaggacctgcaggaggacaaagaggctgtctttgaggtgtccgacactatgtctgcagtcctgcaggtcgctactggtgtaatctccacattgcagatccaccaggagaacatggggcaggcattgtcccctgatatgctggcaactgatttggcttactaccttgtgcgtaaaggaatgccctttcggcaggctcacgaggcttcggggaaagctgttttcatggccgaaacgaaaggcgtggctctgaaccaactgtctctacaggagctccagacgatcagcccattattcagcggtgacgtaatctgcgtgtgggactacgggcattcggtagagcagtacggagctctggggggcacggccaggagttccgttgactggcagattcgacaggtgcgcgccctgctgcaggcccagcaagcc

SEQ ID NO: 6856 - DNA, 1392 bp, synthetic construct
  misc_feature 1..1392: note = source = /note="Description of Artificial Sequence: Synthetic coding sequence"
  source 1..1392: mol_type = other DNA
atggcgtcggaatcgggtaaattatggggtggtcgttttgtaggtgcggttgatccgataatggaaaaatttaatgcgtcgatagcgtatgatcgacatttatgggaagtagatgttcaaggttcgaaagcgtattcgcgtggtttagaaaaagcgggtctattaacgaaagcggaaatggatcaaatactacatggtttagataaagtagcggaagaatgggcgcaaggtacgtttaaactaaattcgaatgatgaagatatacatacggcgaatgaacgtcgattaaaagaattaataggtgcgacggcgggtaaattacatacgggtcgttcgcgaaatgatcaagttgttacggatctacgtctatggatgcgtcaaacgtgttcgacgctatcgggtctactatgggaattaatacgaacgatggttgatcgtgcggaagcggaacgtgatgtattatttccgggttatacgcatttacaacgtgcgcaaccgatacgatggtcgcattggatattatcgcatgcggttgcgttaacgcgtgattcggaacgtctactagaagttcgtaaacgtataaatgtattaccgctaggttcgggtgcgatagcgggtaatccgttaggtgtagatcgagaattactacgagcggaactaaattttggtgcgataacgttaaattcgatggatgcgacgtcggaacgagattttgttgcggaatttttattttgggcgtcgctatgtatgacgcatttatcgcgtatggcggaagatctaatattatattgtacgaaagaattttcgtttgtacaattatcggatgcgtattcgacgggttcgtcgttaatgccgcaaaaaaaaaatccggattcgctagaattaatacgttcgaaagcgggtcgagtatttggtcgttgtgcgggtctattaatgacgttaaaaggtttaccgtcgacgtataataaagatttacaagaagataaagaagcggtttttgaagtttcggatacgatgtcggcggtactacaagttgcgacgggtgtaatatcgacgttacaaatacatcaagaaaatatgggtcaagcgctatcgccggatatgctagcgacggatttagcgtattatttagttcgtaaaggtatgccgtttcgtcaagcgcatgaagcgtcgggtaaagcggtatttatggcggaaacgaaaggtgtagcgttaaatcaattatcgctacaagaattacaaacgatatcgccgctattttcgggtgatgtaatatgtgtttgggattatggtcattcggttgaacaatatggtgcgttaggtggtacggcgcgttcgtcggttgattggcaaatacgtcaagtacgtgcgttattacaagcgcaacaagcg

SEQ ID NO: 6857 - DNA, 1392 bp, synthetic construct
  misc_feature 1..1392: note = source = /note="Description of Artificial Sequence: Synthetic coding sequence"
  source 1..1392: mol_type = other DNA
atggccagtgagtctggtaagctgtggggggggcggttcgtgggagccgttgaccccattatggagaaatttaatgctagtatcgcttacgacagacatctgtgggaagtggatgtgcagggctccaaggcttacagccgggggctggagaaggccgggctgcttaccaaggccgaaatggaccaaattcttcatggcttagataaagtggctgaggagtgggcccaaggaacctttaagctaaattccaacgacgaagacatacatacagcgaacgagagaaggctaaaggaattgatcggagccacagccggaaagctccataccgggcgaagtagaaatgatcaggtggtgaccgacctgagactatggatgagacagacctgcagcaccctgtctgggcttttatgggagttgatccgtacaatggtagacagagccgaagctgagcgggacgtgctcttccccggttacacgcacctccaacgcgcacagcccattagatggtcacactggattttatctcacgcggttgcactgactcgtgattcagaacgactgcttgaagtccgtaaacgcattaacgtgctacccctcggtagcggggccatcgcaggcaatcctttgggggtggatagggagctgctacgggcagagctcaatttcggagccatcaccctgaatagcatggatgcaactagtgaaagagacttcgtcgcagagttcctgttctgggcctcactgtgtatgactcatctttcccggatggctgaggacctcatattgtactgtactaaagaattcagcttcgtccagctgagcgatgcctacagcactgggagcagcctgatgccacaaaaaaagaatccggacagcctggaactgatacgctccaaagctgggcgggtcttcggacggtgcgccggactgctgatgaccctaaaaggcctacctagtacctacaataaagacttgcaggaggacaaagaggctgtattcgaggtcagtgatacaatgtccgcggttttacaggtggccacaggcgtgatctcgacattgcagattcatcaggaaaacatggggcaggctctttcccctgacatgttggctactgatctggcttattatcttgttcgcaagggaatgccttttcgacaggctcacgaggccagcggcaaagccgtgttcatggccgagacgaaaggtgtcgccctgaaccagttaagcctccaggagctacagacaatttcccccttattcagtggagacgtgatatgtgtctgggactacgggcattctgtggaacaatacggcgcactcgggggaacagcccgtagcagtgtagactggcagatcaggcaggtgcgggcactcctgcaggcacagcaggct

SEQ ID NO: 6858 - DNA, 1392 bp, synthetic construct
  misc_feature 1..1392: note = source = /note="Description of Artificial Sequence: Synthetic coding sequence"
  source 1..1392: mol_type = other DNA
atggcctccgagtcggggaagctgtggggtggacgattcgtgggagcagttgacccaattatggagaagttcaacgcatccatcgcatatgaccgccatctctgggaggttgatgtacaagggtctaaggcatattctaggggtttggagaaggcaggcctgctaaccaaagcagagatggaccagattcttcacggtctggataaagtggccgaggagtgggctcaagggacattcaagctgaacagcaacgacgaagatatccataccgcaaatgagcgtcggcttaaagagttgatcggagctaccgcaggaaagctgcacactggtaggagccgaaacgatcaggtggtgacggacctccgtctatggatgcgacagacgtgtagcaccctgtccggcctgctctgggaactgatccggacgatggtggacagggcagaggccgagcgtgatgtgctttttcccggttacactcatctgcaaagagctcaaccaatacggtggagccactggatcctgtcccatgcggttgcgcttactagagacagtgaaaggctgttggaggttaggaagaggatcaacgttctgcctctcggatcaggggcaattgccggaaaccccctcggcgttgatcgggaactgctcagggctgagctgaattttggggcaattactctgaactctatggacgccacatcagaacgggatttcgtggctgagtttttgttctgggcttccttgtgtatgacccatctgtctcgcatggctgaggacttgattctctattgtactaaggagtttagcttcgtgcagcttagtgatgcttactccaccggatccagcctaatgcctcaaaagaaaaaccccgattcactcgagctgattcgcagtaaagccgggagagtctttggcagatgcgcaggcctcctgatgacactcaaggggctacccagcacttataacaaggatcttcaagaagataaagaagcagtcttcgaagtttccgatactatgagcgcagtcttgcaagtggcaaccggagtcatttcaactctgcagatccaccaggagaatatgggccaggccctatctccagacatgctcgctacagacttagcctattatttggtgcgcaagggcatgccttttaggcaggcgcacgaagccagcggcaaggccgtttttatggctgaaacaaaaggcgtggctctcaaccagctctcactacaggagctgcagacaatatctccactgttttcaggggatgtcatatgcgtctgggactacgggcactcagtggagcagtatggtgccctgggcggaactgcgcgatctagcgtggactggcagattcggcaagttagagcacttttgcaggcccagcaagca

SEQ ID NO: 6859 - DNA, 1392 bp, synthetic construct
  misc_feature 1..1392: note = source = /note="Description of Artificial Sequence: Synthetic coding sequence"
  source 1..1392: mol_type = other DNA
atggcgtccgagtccggcaagttgtggggcggccggtttgtcggagctgtggaccccatcatggaaaaattcaacgcttcaattgcctacgaccggcatctctgggaggtagacgtgcagggtagtaaggcgtattcccggggtctggaaaaagccgggctgcttacgaaggcagagatggaccagattctgcatggcctcgacaaagtagccgaagaatgggctcagggaaccttcaaacttaacagtaatgatgaggacatacatactgccaatgaaagaaggctgaaggaactaataggtgctacggcggggaagcttcatactggaaggtcgcggaatgaccaagtcgttaccgatctgaggttgtggatgcggcagacttgctccacactgagcggacttctgtgggaattgatcagaaccatggttgatcgcgccgaagccgagcgtgacgtgttattccccggatacactcaccttcagcgcgcacagccaattcgctggtcccactggattctgtcacacgctgtcgcactgacaagggattcagagcgactgctggaggtaaggaagagaatcaacgtactacccctgggctccggcgccatcgctggaaatccgcttggggttgaccgcgagctcctgcgagccgagttaaacttcggggctataactctgaattctatggacgctacgtccgagcgtgacttcgtcgcagagtttttgttttgggcatctctgtgcatgacacatctaagccgcatggccgaagatttgatcctctattgcactaaagagttctcttttgtccagttgagtgacgcatatagtaccgggagctccctgatgcctcagaagaagaatccagactctctggaacttattcggagcaaagctggaagagtattcggccgatgtgcagggctgctgatgactctgaaaggcctgccatccacttacaacaaagatcttcaagaggacaaagaagctgtgttcgaggtgtctgatacgatgtcagctgtactacaggtggctaccggagtgatttctacactccagattcaccaagagaatatggggcaagctctcagtccggacatgctcgccaccgacctcgcctactatctggtgcgtaaggggatgcctttcagacaggcccatgaggcaagcggcaaagccgtgtttatggcagaaactaagggtgtggctctcaaccagctcagcctgcaagaacttcaaaccatcagtccgctattttctggagacgtgatatgcgtctgggattatggacactccgtggaacagtacggcgctctcggaggcacagctcggagcagcgtggactggcagatacggcaggtgagagccctcttgcaggcccagcaagca

SEQ ID NO: 6860 - DNA, 1392 bp, synthetic construct
  misc_feature 1..1392: note = source = /note="Description of Artificial Sequence: Synthetic coding sequence"
  source 1..1392: mol_type = other DNA
atggcatctgagtccggaaaactgtggggcggcaggttcgtaggggccgtagacccaatcatggaaaagtttaacgcgtcaattgcatatgacagacacttgtgggaggtggatgtgcaggggagcaaagcatatagtagagggctggagaaggccggcctactgacaaaagcagagatggaccagatactacatggactggacaaggttgctgaggagtgggcccagggcaccttcaaactaaactcaaacgatgaggacatacatacggcgaacgaacgcagactgaaggaactaattggtgcaactgctggtaaattgcatacggggcgaagcaggaacgaccaggtcgtaacagacctgcgtctgtggatgcgacaaacatgctccacgttgtcagggctgctatgggaacttatccgaacgatggtggatcgcgccgaggcggagcgagatgtcctcttccctggatatactcaccttcagagagctcagcctattcgctggagtcactggatcctctctcatgccgtggctttgactagggatagtgagagactgctggaggtcagaaaaagaatcaacgtgcttcccctgggtagtggcgcaattgccggtaatccacttggggtagaccgagaattacttagggcagaactcaactttggcgcgatcaccctcaatagcatggacgctaccagcgaacgagactttgtggctgagttcctgttctgggcatctctatgtatgacgcacctgagtagaatggccgaggatctaattctgtattgcaccaaggagttctcattcgtgcaactgtccgatgcctactccacaggctcatcgctgatgccccaaaagaagaacccggacagtctggaactgattagaagtaaggcaggaagagtgttcggccgttgtgcaggactcctgatgaccctgaagggactcccgtccacttataacaaagacctgcaggaggacaaggaggccgttttcgaggttagtgacactatgtctgccgttctccaggtcgcaacgggtgtgatctcaactttgcagattcaccaggagaacatgggacaggcactttccccagacatgttggccacagatctggcctactatcttgtgcgtaagggcatgcctttccgacaggctcacgaagcaagcgggaaggccgtgtttatggccgaaactaagggagtagcattgaatcagttgtcgctgcaggagctgcaaaccatctctccgctattttcgggagacgtgatctgcgtctgggactatggtcacagtgtcgaacagtatggagcgttgggtggcaccgcaagatcatcggtggactggcaaatccgacaagtcagagccctgctgcaagcccaacaggct

SEQ ID NO: 6861 - DNA, 1392 bp, synthetic construct
  misc_feature 1..1392: note = source = /note="Description of Artificial Sequence: Synthetic coding sequence"
  source 1..1392: mol_type = other DNA
atggcttctgagagcggaaagctgtggggcggcaggttcgtgggagccgttgaccccataatggagaagttcaacgcgtcgatagcatatgatcggcacctgtgggaggtggacgtccagggctccaaggcctactcacgaggacttgagaaagcaggactcctaacaaaggctgaaatggaccagattttacatgggctcgataaggttgccgaagagtgggcccagggtaccttcaagctgaactctaatgatgaagatatccataccgcgaacgaaagaaggttgaaggagttaatcggggcgactgctggcaaactccacacgggcagaagccggaacgaccaagtggtcacagatctgaggctttggatgcggcagacatgttctactctcagcggtttgctttgggagctgataaggactatggtggaccgcgcagaggctgaacgagatgtgctgtttcccggctatacacacctacagcgggcccagccaatccgctggtcacactggattttatctcatgcggtagctctgactcgcgacagcgagaggctgttagaggtgaggaaacggattaatgtgctgcctctcggctcgggggctatagctggcaatcccttgggcgtggatagagagctgctgcgcgccgaacttaatttcggtgccatcaccttgaactcaatggacgccacaagcgagagagacttcgtggctgaattcttgttctgggctagtttgtgcatgacacatctgtcccgtatggcagaggaccttattctgtattgcaccaaggaattcagtttcgtgcagctctccgacgcttattctactggaagtagcctgatgccgcagaagaagaaccctgatagcctggaattgatcaggtctaaggctggacgcgtgttcggtagatgtgcaggactattgatgacgctgaagggcttgccctctacgtacaataaggacctgcaggaagataaagaagccgtgtttgaagtgagcgatacaatgtctgccgtcctccaggtggcaactggggtgatctctacgctgcaaatccatcaagagaacatgggccaagccctgtctcctgacatgctggctacagacctcgcgtattaccttgtgaggaaggggatgcccttcagacaagcccacgaagcgtctggtaaggctgtattcatggccgaaacgaagggagttgctctcaatcagttaagcttgcaggagttgcagacaatcagtcctctgttttctggagacgtaatatgtgtttgggattacggacattccgtagagcagtatggtgcgcttggcgggactgcccggtctagtgttgactggcagatcagacaggtccgagccttgttacaggctcagcaggct

SEQ ID NO: 6862 - DNA, 1392 bp, synthetic construct
  misc_feature 1..1392: note = source = /note="Description of Artificial Sequence: Synthetic coding sequence"
  source 1..1392: mol_type = other DNA
atggccagcgaatcagggaagctgtggggcgggcgattcgttggtgccgtggatcctatcatggagaagttcaacgcctctattgcctacgaccgccatctgtgggaagtcgatgtacaaggctctaaagcatacagcagaggcctggagaaggccggtctgttaaccaaggcagagatggatcagattctacatggcttagataaggtcgccgaagagtgggcccaaggaacattcaaactcaacagcaacgacgaggatatccatactgcaaacgagcgccggcttaaagaattaataggggctacggcgggtaagttgcataccggccggagccgcaacgaccaagtcgtgacggatctgcgcttgtggatgcgccagacttgtagtactcttagcggactgctttgggaacttataagaactatggttgaccgtgctgaggcagagagagacgtgctattcccaggttatacacatctacaaagagcacagcccattcggtggagtcattggatattgtctcacgctgtggctctgacaagggactcagagagactgttagaggtgagaaaacgcatcaatgtgcttccgttgggctccggtgccatagcaggcaacccactgggcgtggatcgggaactactgagggcggaactaaattttggagctataacacttaactctatggatgcaaccagcgaaagggattttgtggcggagttcctattttgggctagcctatgcatgacacatcttagcagaatggcagaagatctgattctttactgcactaaagagttctcatttgtccagttgagcgacgcttattcaacaggatccagtttaatgcctcaaaaaaagaaccccgacagtctggaactgattagatctaaggctggccgcgtctttggcaggtgtgctgggctattgatgacattgaagggcctgcccagcacttataataaggacttacaggaggataaagaggctgtttttgaagtgagtgatactatgagtgcagtgcttcaggtcgccacaggggttatttcaacattgcagatccaccaggaaaatatgggacaagctctgtctccggatatgctggccaccgaccttgcttattaccttgttcgtaaagggatgccatttaggcaggcccacgaggccagtggcaaggcagtattcatggcagagaccaaaggggtcgccctgaaccagttgtccctgcaagaactccagacaatctccccactgttcagtggcgacgtgatatgcgtgtgggattatggccatagcgtggagcagtacggggctctgggaggcacggctcggtcaagtgtggactggcaaattagacaggtgagggcactactacaagctcagcaagcc

SEQ ID NO: 6863 - DNA, 1392 bp, synthetic construct
  misc_feature 1..1392: note = source = /note="Description of Artificial Sequence: Synthetic coding sequence"
  source 1..1392: mol_type = other DNA
atggctagcgagagcgggaagctgtgggggggaaggttcgtgggtgctgtagatcctataatggaaaaatttaacgcatctatcgcttacgatagacatctgtgggaagtggacgttcagggatctaaggcctactctagggggctggagaaggctggcttgctgactaaggctgagatggaccagattcttcacgggttggacaaggtagccgaagagtgggcacagggcacctttaaactaaacagcaatgatgaggacatccataccgccaatgagaggaggctaaaagagctgataggagccacagcagggaagctgcataccggcagatcccgaaacgaccaggtcgtgacagatctgaggctttggatgcggcagacttgtagcacattgtctggactgctgtgggagctgattcgcacaatggtcgatagggctgaggctgaacgggacgtgctattccctggttacacgcatttacaacgagctcaacctatccgttggagccattggattttaagccacgccgtggctcttactagagattccgagcgattattggaggtcaggaagcgtatcaatgtcctgcctcttggcagtggcgccattgctggcaatcccctgggcgtggacagagagttgcttagggctgagttgaattttggcgctatcaccctgaactcgatggatgcaactagtgagagagacttcgtggcagaattcttgttctgggcctcactttgtatgacccacttgagccggatggcggaagacctgatattgtactgcaccaaggaattctccttcgtccagttgagtgacgcttattcgaccggttcaagtctgatgccccaaaagaaaaacccagacagcctggaactcattagatcaaaagcagggcgcgtcttcggccggtgtgccgggctactgatgaccctcaaaggtttaccaagcacttataacaaggatctgcaagaagacaaggaagcggttttcgaggtgtccgacacaatgtctgctgtgctgcaagtggccacaggcgttatctctacccttcaaatccatcaggagaacatgggccaggctctcagcccagatatgctcgccaccgaccttgcttactacctggtcagaaagggcatgccctttcggcaagcacatgaggcttcgggaaaagccgtgttcatggccgagactaagggcgtggcattgaatcagttgagtctgcaggagctccagactataagccccctctttagcggcgacgtgatttgtgtctgggattacggacactccgtggagcaatatggggccctcggaggcactgcaaggtctagcgtcgactggcagatcagacaggttcgggcgctgctgcaggctcagcaggct

SEQ ID NO: 6864 - DNA, 1392 bp, synthetic construct
  misc_feature 1..1392: note = source = /note="Description of Artificial Sequence: Synthetic coding sequence"
  source 1..1392: mol_type = other DNA
atggcttctgaatccgggaaactgtggggcggtagatttgtgggtgccgttgatccaattatggagaaatttaacgcatctatcgcctatgatagacacctatgggaggtggacgtccagggatcaaaggcgtatagtagggggctcgagaaggctggactgcttactaaagcggagatggatcagattttgcacggcctggacaaggtcgcagaggaatgggcacagggcactttcaagctcaatagtaatgacgaagatattcatacagcaaacgagcggagacttaaggaattgatcggagccaccgcaggcaagctccatactggtcggtcccggaacgatcaggtcgtcactgatctaaggctgtggatgcgtcagacatgcagcacactgagcggcctgttgtgggaacttatccggaccatggttgaccgagccgaagctgagagggacgttctttttcccggctacacccatctccaacgcgcccagcctattaggtggagtcactggatactgagccatgccgtggccctgacaagggattcggagcgcttgctggaggtgcgcaaacgaataaatgtcctacccctgggctcgggcgcaatagcaggcaaccctctgggggtagacagagagctgttgcgggcagagctgaacttcggcgcaatcactctgaactcgatggatgccacgtccgagagggacttcgtggcagaatttcttttctgggcatcgctctgcatgacccatttgagccggatggctgaagacttgatcctgtactgtactaaagagttctctttcgttcagctctcagacgcctattccaccggatcttctctgatgccgcagaagaagaatccagattcactggagctcatccggtctaaggcaggcagagtgtttggaaggtgtgccggcctgttaatgaccctcaaaggcctccctagcacatacaacaaggaccttcaagaagacaaagaagcagtgttcgaagttagcgacacaatgagtgccgttctccaggtggctacaggagtaataagcactttgcagatccaccaggaaaatatgggccaggcgctctcccccgatatgctcgcgactgacctggcatattatctggtacgtaagggtatgccttttaggcaagctcacgaggcctctggtaaagcagtttttatggctgagaccaaaggagtcgctctcaatcagctgagtctccaggagctgcaaactattagcccactgttcagcggagatgtaatctgcgtctgggattatgggcattccgtagaacagtacggcgcgctaggggggaccgcaaggtcctccgtggattggcagatccgtcaggtgcgcgccctcctccaagcccaacaggca

SEQ ID NO: 6865 - DNA, 1392 bp, synthetic construct
  misc_feature 1..1392: note = source = /note="Description of Artificial Sequence: Synthetic coding sequence"
  source 1..1392: mol_type = other DNA
atggcctccgaaagtggcaagctttgggggggaagatttgtgggagccgtggacccaattatggaaaagttcaatgcctcaatcgcgtacgaccggcatctctgggaggttgacgttcagggaagcaaggcctattcccgcggcctggagaaggccgggctcctgaccaaggcagagatggaccagattctgcatgggctggacaaggtggccgaagaatgggcccaaggaacttttaagttgaatagtaatgacgaggacattcacacggccaatgagcgccggttgaaagaactcatcggagctacagcaggaaagctccacaccggccggtcaagaaacgatcaggttgtgacagacttgcggctgtggatgagacagacctgctcaactttgtctgggcttctgtgggagctgatccgcaccatggtcgaccgcgctgaagcggagcgcgatgtcctgttccccggctatactcatctgcagagagcgcagccgatccgatggtcccattggatactgagtcatgcagtcgctctcactcgagacagtgagcggctgctggaggttaggaaacgaatcaacgtgctccctttgggttccggagccattgccggaaatcccctgggagtggatcgcgaactccttcgggccgaactgaatttcggagcgatcacgctgaactctatggacgcaacttctgagcgggactttgtggctgagttcctgttttgggcctccctgtgcatgacacatctgagccggatggctgaggatctcattttgtattgtacgaaggagttttccttcgttcagctttcagatgcttatagcacgggatccagcttgatgccccagaaaaagaaccctgactctttggaactgattcggagcaaagccggtcgagtgtttggcaggtgtgccggcctgctcatgacactcaaaggcttgccatccacatataacaaggatttgcaggaagacaaggaagcagtgtttgaggtgagcgacactatgtccgcggtgctgcaagtggccactggggtaatcagcaccctgcagattcaccaagagaacatgggtcaggctctgtcacccgatatgctggctacagatctggcttattatctcgtgagaaaagggatgccctttagacaggcccacgaggctagcggcaaggccgtgttcatggcagagacgaagggagtcgccctcaatcagttgtccttgcaggaactgcagaccatttctcctcttttctccggtgacgtaatctgtgtctgggactatgggcatagtgtggaacagtacggggcactcggcggaactgccagatcatccgtcgactggcagattcggcaggtgagggcgctcctgcaggcccaacaagcc

SEQ ID NO: 6866 - DNA, 1392 bp, synthetic construct
  misc_feature 1..1392: note = source = /note="Description of Artificial Sequence: Synthetic coding sequence"
  source 1..1392: mol_type = other DNA
atggccagcgaaagcgggaagttatgggggggaaggttcgtaggagcagtagatcctattatggaaaagtttaacgcatccatagcatatgacagacacctgtgggaagtagatgtgcagggaagtaaagcttactcaaggggtttggaaaaggcaggacttttgactaaagctgagatggaccagattcttcatggactcgacaaggtggccgaagaatgggctcagggcacattcaaactcaattcgaacgatgaggatatccataccgcaaacgagcggaggctaaaggaactaatcggtgcaacagcaggtaagctccacaccggaaggtcacgaaacgaccaggtggtaacagacctccgcttatggatgcgacagacgtgtagcacgctaagcggcctgctgtgggagctgatccgcactatggtggacagggcggaagccgaacgtgatgttctcttccccggctacacgcacctgcagagggctcagcccatcaggtggagtcactggatcctttcccacgccgtggccttgaccagggacagcgaaaggctgctggaagtgaggaagcgtattaatgtgctcccactgggatcaggagccatcgcaggcaatcccctgggcgtagacagagagcttttgagggcggagctaaatttcggtgcgattacacttaattcgatggacgccaccagtgagcgtgacttcgtcgcggaattcctgttttgggcttcgttgtgcatgacccatctgagtagaatggcagaagacctgattctgtactgcactaaagaattcagctttgtgcagctctcagacgcttattcaacaggctcgagtttgatgccacaaaagaagaacccagattctctcgaacttatccgctcaaaagctggcagagtgtttggcaggtgcgctggcttactgatgaccttgaaaggcctgccctctacatacaataaagatctgcaggaagataaagaggccgtatttgaagtgtccgatacgatgtctgccgtactgcaagtggctacaggcgtcatctccactttgcagatccatcaagaaaatatgggccaagcacttagtcccgacatgctcgctacagatctggcctattacctggtaagaaagggcatgccgtttcgccaagcccacgaagcctcaggcaaagctgtttttatggctgaaacgaaaggagtggcacttaaccagctctcccttcaggagttgcagacgattagccccctgttctcaggcgacgtcatctgcgtgtgggattatggacactcagtggaacagtacggcgctctgggcggaacagcaaggagcagcgtagattggcagatccgccaggtccgcgcactattgcaagcccaacaagct

SEQ ID NO: 6867 - DNA, 1392 bp, synthetic construct
  misc_feature 1..1392: note = source = /note="Description of Artificial Sequence: Synthetic coding sequence"
  source 1..1392: mol_type = other DNA
atggcgagcgagagcgggaagctgtgggggggccggttcgtgggggctgtggacccgatcatggaaaagtttaacgcatccattgcctacgataggcacttgtgggaagtggatgttcaaggctcaaaggcttactcccgcggcctggaaaaagccggcctgctgacaaaagcggagatggaccagattttgcacgggcttgataaagttgcagaggaatgggctcagggaacattcaagctgaactccaacgatgaagacatacacactgccaatgaaagacgactgaaggagctcatcggggccactgcaggtaaactgcataccggcaggtcccggaatgaccaggtggtcactgatctgcggctgtggatgcgccagacctgcagcacactgtcagggcttttatgggaactgatcaggaccatggtcgatagagctgaggcagagcgcgatgtgctttttccagggtatactcacctgcaacgcgcccagccaattagatggagtcactggattcttagtcacgctgtcgccttaacccgcgattctgaacgcctcctggaggtcaggaagagaatcaacgttctgcctctgggttccggtgccatcgccggcaatcccctgggggtggatcgagagctcctcagggccgaattgaattttggagcaatcacccttaactcaatggatgcaacatctgaacgtgattttgtggccgagtttctcttctgggcttctctgtgcatgactcacttatccaggatggccgaggacctgatactgtactgcacaaaggaattctcatttgttcaactgtcagacgcctactcaactggatcatctttaatgcctcagaagaaaaacccggacagtctcgaactcatccgcagcaaggcagggcgggtttttggacgatgcgctggcctgctgatgacgctgaagggcctgccttctacgtataataaggatctgcaggaagacaaggaggcagtattcgaagtctccgacacaatgtccgccgtccttcaggtcgctacgggagtgattagtaccttacagatccaccaggagaacatggggcaggctctttcccccgacatgctagcgactgatttggcgtattatctcgtgaggaaaggcatgccttttcggcaggcccacgaggcctctgggaaggccgtgtttatggccgagacaaagggagtcgccctgaaccagctttccctccaggagctgcagactatcagcccactgttttcaggggatgtaatttgtgtttgggattatgggcactcagtcgagcagtatggtgccctaggtggcacagctaggtctagtgtagattggcagatccgccaggtccgcgctctgctgcaagcccagcaggcc

SEQ ID NO: 6868 - DNA, 1392 bp, synthetic construct
  misc_feature 1..1392: note = source = /note="Description of Artificial Sequence: Synthetic coding sequence"
  source 1..1392: mol_type = other DNA
atggcctccgaatctggaaaactgtggggcggacgcttcgtgggagccgtggaccccattatggaaaagttcaacgcctctatagcttatgatcgacacctgtgggaggtggatgtccaggggtcaaaggcctattctcggggactggagaaggcaggcctactgactaaggccgagatggaccagatcctccacgggctggataaagttgctgaggagtgggcacaaggcacattcaaactgaattcaaacgacgaggacatacacactgccaacgagcgtcgactcaaggagctgataggcgctactgccgggaagttgcatacagggaggtccaggaacgaccaggtcgttactgacctgcgcctgtggatgcgccagacttgttcaactctgagcggtttactctgggagctgattcgcactatggtggaccgcgctgaggctgaaagggacgtgttattcccagggtatacccacctccagagagcccagcccataaggtggagtcactggattctgtctcacgctgttgctctgaccagagactctgagcgactgctggaagttcggaagcggataaacgtattaccactgggctccggcgcaatcgctggcaaccctttgggggttgaccgggagcttctgagggctgagctgaatttcggggccattactctaaattccatggacgctacctccgagcgggacttcgttgccgaattcttgttctgggccagtctttgcatgactcacctgtctcgcatggccgaggatctaattctgtactgcacaaaggaattcagcttcgtgcagctgagcgacgcttactctaccggatcttccctaatgccccaaaaaaaaaatcccgattctttagagctgatacgcagtaaggccggtagagttttcgggaggtgtgctggcctgctgatgactctgaagggcctgccttcaacttataacaaggacctgcaggaagataaggaagcagtgttcgaggtgtccgacaccatgtccgccgttctccaggttgccactggcgtcatctccactttgcagatacaccaggagaatatggggcaggccctgtcccctgacatgttggctactgacctagcctattatcttgtacgcaaaggcatgcctttccgccaggcacacgaggccagtggcaaggccgtgttcatggcagagactaagggcgtcgccctcaatcagctgtccctgcaggagttacagactatctcaccactatttagcggggatgtcatctgcgtttgggactacggacattcagttgaacagtacggcgccctgggtggcaccgccagatcaagcgtcgattggcagattcgtcaggttagagctctgctccaggctcagcaagca

SEQ ID NO: 6869 - DNA, 1392 bp, synthetic construct
  misc_feature 1..1392: note = source = /note="Description of Artificial Sequence: Synthetic coding sequence"
  source 1..1392: mol_type = other DNA
atggctagtgagtctgggaagctctggggagggcgcttcgtgggtgcagtggatccgattatggagaaatttaatgcatccatagcttacgatcgtcacctgtgggaggtggatgtccaaggtagcaaggcttactcacgcggcctcgaaaaggctgggctgctcaccaaagcagagatggatcagattctacacggacttgataaagtcgccgaagagtgggctcagggtaccttcaagcttaatagtaatgatgaagacattcacacagcgaatgagcgccgactgaaagagctgattggggccacagccggaaagctccacacaggaagatccagaaatgaccaggtagtgacggatctcagactgtggatgaggcaaacatgctccactctcagcggcctgctgtgggaactaatacgcacgatggttgatagggccgaggcggaacgcgatgtactgttccccggctacacccatttgcaaagagctcagcccatcaggtggtcgcactggattctgtcgcacgcagtggcattgactagggactccgaacggttgctcgaggtccgaaagcgcataaacgtgcttccactgggctccggcgctatcgccggtaaccccctcggagtggaccgcgaattactgcgcgctgaattaaacttcggagctattaccctaaattctatggatgccacttcagaaagagattttgttgccgaattcttgttttgggcaagcttgtgtatgactcacctgtcacgaatggccgaggatctgatcttgtattgtactaaagagttttctttcgtacagctgtctgacgcttattctaccggcagctcactcatgcctcagaagaagaatcccgattccctcgagttaatccgctccaaagctgggagggtttttggacggtgcgccggattgctcatgacactgaaaggccttccgagtacctataataaagacctccaagaggacaaggaagcagtttttgaggtgtcagacacgatgagcgccgtactgcaggtggcgactggagtcatcagtacacttcagatccatcaagagaatatgggtcaggccctctcaccagacatgctggctactgacctggcatactatcttgtgaggaaagggatgccctttcgccaggcgcatgaggcctcgggaaaggccgtgtttatggccgagactaagggtgtggctctgaaccagctttctctgcaggagctccaaactatctcacctttattctctggagatgtaatctgcgtttgggactatgggcactctgtcgagcagtatggggcgctcggcggcacagctcgttcgagcgtggactggcagatcagacaagtgcgggctctactgcaggcccagcaggcg

SEQ ID NO: 6870 - DNA, 1392 bp, synthetic construct
  misc_feature 1..1392: note = source = /note="Description of Artificial Sequence: Synthetic coding sequence"
  source 1..1392: mol_type = other DNA
atggcttctgagagcggcaagctgtggggcggtcgatttgtaggcgccgttgatccaatcatggaaaaattcaatgccagtatcgcctatgacaggcatttgtgggaggttgatgtgcaggggtcaaaggcatatagccgcggactcgagaaagccggtctgctgacaaaggcagagatggaccaaatcttgcacggactggacaaggtcgccgaggagtgggcccaggggacctttaaactgaattcaaatgatgaggatatccatactgccaacgagcgccgcttgaaggaactcattggggcgacggccggcaagctgcacaccggtaggagccggaatgaccaggtggtgaccgatctccgcctgtggatgcggcagacttgcagcactctgagcgggctgctgtgggaactgataagaacgatggttgatagggcggaggctgaaagagacgtgctgtttcctggatacacccatctgcagcgggcccagccaattagatggagccattggattctctctcacgctgtggcacttacccgggactccgagaggttgctggaggtgaggaaaagaattaatgtcctcccattgggctcaggcgcgattgccggcaaccccttgggggtggatcgagagctccttagagcagagctgaactttggagccataacattgaattcaatggacgctacaagcgaacgcgacttcgtcgcagagtttctcttttgggcctctctttgtatgacccaccttagtcgcatggccgaagatctcatcctgtactgcactaaggaattttccttcgtgcagttgtccgatgcatactccaccggctcaagcctgatgccccagaagaagaacccagattccctggagttgataagatcaaaggcgggtagagtatttggtagatgtgccgggctgcttatgacgctcaaaggactgccgagcacgtacaataaggacctgcaggaggataaggaggccgtttttgaggtgtccgacacgatgtccgccgtgctgcaggttgccaccggggtgatcagtacactccaaatccaccaagagaacatggggcaagctctctctccagatatgctggccactgatctggcgtattatctggtgagaaaaggcatgccctttcggcaggctcacgaggcctccggcaaagcggtcttcatggccgaaacaaaaggtgtggcgttgaaccagctcagtttgcaggagctgcagacgatctcacctctgttttctggggatgttatctgcgtatgggattacgggcattcagtggagcaatacggtgccctcggggggacggccagaagctccgtggattggcagatcaggcaggtcagagcattgctgcaagcacagcaggcc

SEQ ID NO: 6871 - DNA, 1392 bp, synthetic construct
  misc_feature 1..1392: note = source = /note="Description of Artificial Sequence: Synthetic coding sequence"
  source 1..1392: mol_type = other DNA
atggcttcagagagtggcaagctttggggcggcaggtttgttggagcggttgaccctattatggagaaatttaatgcaagtatcgcctacgacagacatctttgggaagtggacgtgcagggtagtaaggcctacagcagggggcttgagaaggctggactgctcacgaaggcagagatggaccagatcctgcacgggcttgacaaagtcgccgaggagtgggcccagggaaccttcaaactgaactcgaatgacgaggacatccatacagcaaacgagcgaagactgaaggagctcatcggggcgacagctggtaaattgcacacaggtcgcagtcgtaacgaccaggttgtcacagatcttagattgtggatgaggcagacatgctccactctctcgggcctgctctgggaactcataagaacaatggttgatcgggcggaagccgaacgggatgtgctgtttcccggctacactcacctgcagagggctcagccaatccgatggtctcactggatattaagtcacgccgtcgctctgacacgcgactcagagcgactgcttgaagtcaggaaacggattaacgtgcttcctctcggatccggcgccatagcagggaatcctctgggggtggatcgagaattgctacgggcagaactgaatttcggagccatcacactcaactccatggacgcaacctcagagagggactttgtggctgagttccttttttgggcttcgctgtgcatgacccatctctcgaggatggccgaggacttgatcctctactgtaccaaagagttctctttcgtgcaactttctgatgcctattccacagggtcgagtttaatgccacagaagaagaacccagacagcctagagctgattcgcagcaaggccgggcgggtgtttggacggtgcgcagggctgcttatgaccctcaaggggcttccgagcacatataataaggacttgcaggaagataaggaggccgtctttgaagtgagcgatactatgtccgcagttctccaggtggccacaggcgtgattagcaccctgcagatccatcaggagaacatgggacaggccctcagtccagacatgctggctaccgacctagcctattaccttgtgagaaaggggatgccatttcggcaggcgcacgaggcctcagggaaggcagtgttcatggccgaaaccaagggtgttgctctgaatcagttgtccctgcaggaactccagaccatatcaccacttttctccggggatgtaatatgtgtgtgggactatggacactccgtggaacaatatggcgccttaggaggaacagcccgcagcagcgtggattggcagattcgccaagtgagggcactcctccaagcccagcaagcc

SEQ ID NO: 6872 - DNA, 1392 bp, synthetic construct
  misc_feature 1..1392: note = source = /note="Description of Artificial Sequence: Synthetic coding sequence"
  source 1..1392: mol_type = other DNA
atggcaagcgagtccggcaaactgtggggtggccggttcgttggggccgttgatccgatcatggaaaaatttaatgcgtccattgcctacgaccgtcacctgtgggaggttgatgttcagggcagcaaggcctactcacgcggtttggagaaagctggcctcctgaccaaagcagagatggaccaaatccttcacggactggataaagtcgccgaagagtgggcgcaaggtacctttaagctcaactccaacgacgaagatatccacacggcgaacgagaggcggctgaaagaactgatcggagccaccgccggtaagcttcacacaggcagatcacgtaatgaccaagttgtcacggatctgcgactctggatgcgccagacttgcagcaccctaagcggcctactttgggagctgattagaaccatggtagatcgcgcggaagcggagcgtgacgtgttgtttcctggttatactcatctgcagcgcgcacagccgattaggtggtctcactggattttgtcgcatgccgttgctttgacccgcgatagcgaacgccttctggaggtccggaaaagaattaatgtgctgccgctgggcagcggtgccattgcgggcaacccactgggggtcgatcgcgagctgctgcgcgctgagctcaactttggagctattactttgaattccatggatgcaacctctgaacgggactttgtggctgagttcctattctgggcctcactgtgtatgacgcacttgtctcgtatggcggaagatctgattctctactgtaccaaagagttttcgttcgtgcaactgtctgacgcctattcaactggtagcagcctgatgccgcagaaaaaaaaccccgactcactggagttgatccgtagcaaagctggtcgcgtgttcggcaggtgtgccggattactgatgacgttgaaaggcctgccaagcacgtacaacaaggatttgcaggaagataaggaagctgtctttgaggtatccgatactatgagtgctgtgttgcaagtcgcaactggggtgatcagtactcttcagatccaccaggagaacatgggtcaagcactgagcccagatatgctagctaccgacttagcgtactaccttgtgcgcaaaggaatgcctttccgccaggctcatgaagcgtctggtaaagcggtgtttatggcagaaacaaagggcgtggcccttaaccagctgtccttgcaggagttgcagactattagtccgctctttagcggtgacgttatttgcgtttgggattacggccattcagtggagcagtatggggcgctaggtggcaccgctcggagcagcgtggattggcagatccggcaagtgagagcactcctgcaagcccaacaggca

SEQ ID NO: 6873 - DNA, 1392 bp, synthetic construct
  misc_feature 1..1392: note = source = /note="Description of Artificial Sequence: Synthetic coding sequence"
  source 1..1392: mol_type = other DNA
atggcatccgagtcaggaaagttgtggggcggcagattcgtcggagcagtggatccgattatggagaagtttaacgcaagcattgcttacgacaggcatttgtgggaggtagacgtccagggctctaaggcatattccagaggactggagaaggcgggccttctgactaaggccgagatggatcagatcttgcacggattggataaagtcgcagaggagtgggcgcagggcaccttcaagctgaacagcaacgacgaagatatccatacagctaatgagcgcagattgaaggaacttattggcgccacggctggcaagttgcacaccggtaggagcagaaacgatcaggtcgtcactgacctgagactttggatgagacagacgtgctccaccctgagcggcttgctctgggaactgattcgcacaatggtagacagggccgaggcagagagggacgttttgtttccaggatatacccacctgcagagggctcaacctatcaggtggtctcattggatcttgtcccacgccgtggcgcttactagggactccgagcgcttgcttgaagtccgcaagaggatcaatgtgctgccattgggatctggcgcaattgccggcaatcctctgggagtcgacagggagctcctgagggctgagcttaactttggagctataacattgaattctatggacgccacaagcgagagagatttcgtagcagaattcttgttctgggcttccctttgcatgacccaccttagtagaatggctgaagacctgatcctgtactgtaccaaggaattttctttcgtccaactctccgacgcttacagtactggctcctcactcatgccacagaagaaaaaccccgactccctggagctgatccgcagcaaggccggtagagtcttcggacgctgcgccggccttctgatgacgttgaagggattgccctcaacatataataaggaccttcaagaagacaaagaggcagtgtttgaggtctccgacacaatgtcagcagtgctgcaagtggctactggcgtcatctctacactgcagattcaccaggaaaacatgggacaggcactgtctcccgatatgctggctacagatctggcgtattacctcgtacgcaagggcatgccatttcgccaggctcacgaggcctctggcaaggcagtctttatggccgagacgaagggagttgcgcttaatcaattgtccctccaggagctgcagactatctcccctctcttctccggagacgtcatatgcgtgtgggattacggacacagcgttgagcaatatggtgctcttggtggaacagcacgctcttctgtcgactggcagatcaggcaggtgagagccctgctccaagcacagcaggcc

SEQ ID NO: 6874 - DNA, 1392 bp, synthetic construct
  misc_feature 1..1392: note = source = /note="Description of Artificial Sequence: Synthetic coding sequence"
  source 1..1392: mol_type = other DNA
atggcgtccgaaagtgggaaactctgggggggcagattcgtaggagccgttgaccccattatggagaaattcaacgcctctatcgcctacgacagacatttatgggaagtagatgttcagggctctaaggcttacagccgtggcctggaaaaagccgggctgctcaccaaggcagagatggaccagatactccatgggctggataaagttgctgaggagtgggctcagggcaccttcaagctgaattccaatgacgaagatattcacaccgcaaacgagcggagattaaaggaattaatcggtgccacagccggtaaactccacaccggaagatcaagaaatgaccaggttgtgacggacctgagattgtggatgcggcagacctgttctacgctgtccggacttctgtgggagctgattcgcacaatggttgatcgggccgaagcagaacgggatgtgctgttccctggatatacccacttgcagagagcgcaaccaatccgatggagccactggattcttagtcatgctgtagcactgactcgggacagcgagcggctgcttgaggtccggaagagaatcaatgtattacccctcggcagtggcgcaatcgcaggaaaccccctgggggtcgaccgtgagttgctgcgggcagagctgaattttggcgcgatcacactgaattctatggacgcaaccagcgagcgtgattttgtggccgagtttcttttctgggcctctctctgtatgacccatctgagtaggatggcagaggatttaattttatattgcaccaaagagttttctttcgtccagctgtcagacgcttactcaaccggatcaagcctgatgccccagaaaaaaaaccccgactcactcgaactgatcagaagcaaggctgggcgagtcttcgggaggtgtgctggcctgttgatgacgctcaaagggctcccttctacttacaacaaagatctgcaggaggataaagaggccgtatttgaagtgagcgacacaatgtctgcggttctgcaggtggcaaccggggtcataagcaccctgcagattcaccaagagaacatgggccaggccctcagtccagatatgctggccacagacctggcatattacctcgtgcggaagggtatgccctttaggcaagctcacgaagcctccggcaaagctgtgtttatggcggagaccaagggggtcgcgctgaatcagcttagcttacaggagttacagaccatttctccattattcagcggcgacgtgatctgcgtgtgggactacgggcacagcgttgaacagtatggcgctctcggaggcactgcacgttcctcagtcgactggcagatccgccaggtgcgcgccctgttgcaggcgcaacaagcg

SEQ ID NO: 6875 - DNA, 1392 bp, synthetic construct
  misc_feature 1..1392: note = source = /note="Description of Artificial Sequence: Synthetic coding sequence"
  source 1..1392: mol_type = other DNA
atggcttcggaatctggtaagctgtggggaggtcgcttcgttggagcagtggacccaattatggagaaattcaacgccagcattgcgtatgatcgccacctgtgggaagttgacgtgcaaggctcgaaggcatacagtaggggcttggagaaggcgggcctcttgacaaaggcggaaatggatcaaatattgcacggcctggacaaagttgcagaggagtgggctcaaggtactttcaagctgaactcgaatgatgaggatatccataccgcgaatgagaggagactgaaggaactgataggcgcgacggctggcaagctgcacaccggccggagtcgcaacgatcaggttgtgaccgacttgcggctgtggatgaggcagacttgctccacgttgtcgggtctgctttgggaattgatacgcaccatggtggatcgcgccgaagccgaacgggatgtactgtttcccggctatactcatctgcagagagcgcaacctattcgttggagtcattggatcctgtcgcatgcggtagccctgacgagagattctgagcgcttgctagaggtgcgaaaacgaattaatgtacttccactaggaagtggtgccatcgccggtaacccactgggagtcgatagagagctcttgcgagcggaactgaattttggagcgataacactgaactccatggatgcaacctcagagcgcgacttcgtggccgaatttctgttttgggcaagcctctgcatgacccacctgtctcgcatggctgaagacctgatcctctactgcaccaaggaattctcgtttgttcagctcagcgacgcgtactcgaccggatcgtctttgatgccgcaaaaaaagaatccggatagtctcgagcttatccgttcgaaggcgggccgcgtctttggaaggtgtgctgggctcctgatgactctgaaaggcctgccttccacttacaacaaggatcttcaagaggataaggaggccgttttcgaggtgagcgacactatgagtgcagtcctgcaggtcgccacgggcgtgatcagtacactgcagattcatcaggaaaacatgggccaggcattgtcccccgacatgctggcaacggatctggcctactatctggtacgcaagggtatgcccttcaggcaggcacacgaagcgagcggaaaagcggtgttcatggcggagaccaaaggagttgccttaaaccagctgagcctacaggaactccagacgatcagtcccctatttagtggagatgtgatctgtgtttgggattatgggcatagcgtggagcagtacggagccttaggaggaactgctcgttcctcagtggattggcagatacggcaggtacgagccctgctgcaggcccaacaggcg

SEQ ID NO: 6876 - DNA, 1392 bp, synthetic construct
  misc_feature 1..1392: note = source = /note="Description of Artificial Sequence: Synthetic coding sequence"
  source 1..1392: mol_type = other DNA
atggcttctgagagcggaaagctgtggggagggcggttcgtcggtgcggtggaccccatcatggaaaagtttaatgcctcaatcgcgtatgataggcacctatgggaggttgacgtacagggtagcaaggcttacagtagaggcctagaaaaagcaggcctgctgaccaaagcagagatggatcagattctgcacggcctggataaagtggctgaagaatgggcacaggggaccttcaaactgaactcaaatgacgaagatattcatactgccaacgaaaggcgcttgaaagagttgatcggcgcaacagcgggtaagcttcacaccggacggtccagaaacgatcaggtggtgacagacctgcgtttgtggatgagacagacgtgctccaccctgtctgggttgttgtgggagctgatacgaaccatggttgaccgagccgaggccgagcgcgatgttctgtttccaggttacacacatctgcagagggcacagccaataaggtggagccactggattttaagccacgcagtggctctgacacgggactctgagcgcttgctggaagtgcgaaagcgtatcaacgtccttcctttgggctctggcgcaattgcaggaaaccctcttggtgttgatagagagctcctgagagccgagctgaattttggggctatcaccttgaatagcatggatgccacaagcgagcgcgatttcgttgccgagttcttattctgggcatcactctgtatgacacacctttctcgcatggctgaggatttgatactttactgcactaaggaattttcatttgtgcaactgagcgacgcctatagcactgggagcagcctgatgccacagaaaaagaaccccgactcattagaacttattcggtccaaagccggacgggttttcggaagatgtgcaggactcctgatgaccctcaagggccttccatcaacgtataataaggacctgcaggaagacaaggaggccgtcttcgaagtatctgatacaatgagcgcagtgctgcaagtggccacaggagtcatatccacactgcaaattcatcaggaaaatatgggacaagctctttcaccagacatgctggctacagacctggcttactaccttgttcggaaaggaatgccgttccggcaagcccacgaagcgtccgggaaggctgtcttcatggctgagacaaagggcgtagctttgaaccaactgtccctgcaggagctccagaccatatcccctttattctccggagatgttatttgcgtttgggattatggccatagcgtggaacagtatggagcattggggggtacagctagatctagcgtcgactggcagatccggcaagtgcgggccttgctgcaggcacagcaggcc

SEQ ID NO: 6877 - DNA, 1236 bp, synthetic construct
  misc_feature 1..1236: note = source = /note="Description of Artificial Sequence: Synthetic coding sequence"
  source 1..1236: mol_type = other DNA
atgtcctccaagggatccgtcgtcctagcctactcgggagggttggatactagctgtattctggtgtggctcaaggagcagggctatgacgtcattgcttatttggcaaatatcgggcagaaggaggatttcgaagaggcccgtaaaaaagccctaaaacttggggctaagaaagtcttcatcgaagacgtatcacgagaattcgtggaagaattcatatggcccgccattcaatccagtgcgctttatgaggaccgatatctgctagggacgagccttgcccggccttgcatcgcacgcaaacaggtggaaatagcacagagggagggggcaaagtatgtttctcatggcgctacaggtaagggaaacgatcaggtcagatttgaactcagctgctattccctggccccacagattaaggtcatcgccccctggcgcatgcccgagttctataacaggttcaagggacggaatgatctgatggagtacgccaagcagcacggcatacccatccccgtcacacccaaaaatccttggtccatggatgagaatcttatgcatatctcctatgaggccggcattctcgaaaacccaaaaaatcaagcacctcctggactctatacgaagactcaagatcccgctaaggcccccaatacaccggacatacttgagattgagtttaagaaaggagttccagtgaaagtcacgaatgtcaaggacgggaccacccatcagacctccttggagcttttcatgtacctaaacgaggtggcgggtaagcatggagtgggccgcattgacattgtggaaaaccgttttataggaatgaagtccaggggcatttacgaaaccccggctggtacgatcctgtaccatgcccatcttgacattgaggcatttaccatggaccgggaggtgcgaaagatcaaacaagggctgggacttaaatttgcggagctagtttacacgggcttctggcactccccagaatgcgagtttgttcggcattgcatcgcaaagagccaggaaagggttgagggtaaggttcaggtgtctgtgctgaagggacaagtctacatattaggacgtgaaagtcctctgtcactgtacaacgaggaactggtgagtatgaatgtacagggtgactatgagccgactgatgcgaccggattcatcaatatcaacagcctgaggctcaaagaatatcacaggctgcagtcaaaggtgactgccaaa

SEQ ID NO: 6878 - DNA, 1236 bp, synthetic construct
  misc_feature 1..1236: note = source = /note="Description of Artificial Sequence: Synthetic coding sequence"
  source 1..1236: mol_type = other DNA
atgagtagtaaaggcagcgtggtgcttgcatattccggcggacttgatacctcttgcattctcgtgtggcttaaagagcaaggctacgacgtgatcgcatacctggctaatattgggcagaaggaagactttgaagaggccaggaagaaggctctcaaattgggcgcaaagaaggtcttcatcgaagacgtcagtcgtgagttcgtagaggaatttatctggcccgcaattcagtccagtgctctttacgaggaccgctatttacttggaactagtctggctagaccctgcatcgctagaaaacaagtcgagatagctcagagagaaggggcaaagtacgtctcacacggtgcaaccggaaaggggaatgaccaggtccgtttcgaactcagctgctattccctcgctccccaaatcaaagtgattgcaccgtggcgcatgcccgagttttataacaggttcaaaggaaggaatgaccttatggaatatgccaagcaacatggaatccctatccccgttacacccaaaaatccatggagcatggatgagaacctgatgcatatttcatatgaagccggtatcctggaaaaccctaaaaaccaagccccgcccggcctgtacacaaagactcaggaccctgctaaagcccctaatacccccgacattttggagatcgaatttaagaaaggggtgccagtcaaggtgaccaacgttaaggacgggacaacccaccaaactagtctcgaacttttcatgtacctcaacgaggtggcaggaaaacatggcgtgggaagaatcgatatcgttgaaaacagatttatcggtatgaaaagcagggggatctatgagacaccggcaggcactatcctctatcacgctcacctggatattgaggcctttaccatggacagagaagtgcgtaaaattaagcagggcttgggcctgaaatttgccgagctcgtgtataccggcttttggcattcacctgaatgcgagttcgtgaggcattgtatcgctaagagtcaggagagagtggagggtaaggtacaggtttccgttttgaagggccaagtgtatattctgggaagagaatcgccactctcgctctacaacgaggaactcgttagcatgaacgtgcaaggagattacgaacctaccgacgctaccggtttcatcaacatcaacagcttgagactgaaggaataccacagacttcaatccaaagtcaccgctaag

SEQ ID NO: 6879 - DNA, 1236 bp, synthetic construct
  misc_feature 1..1236: note = source = /note="Description of Artificial Sequence: Synthetic coding sequence"
  source 1..1236: mol_type = other DNA
atgtcatctaaggggtcagtggtattggcctatagtggagggctggacaccagctgtattctcgtttggctgaaagagcaaggttatgatgtgatcgcttaccttgcgaacataggccagaaggaggattttgaggaggcaaggaagaaagccttgaagctgggcgctaagaaagtttttatagaggatgtaagccgcgaatttgtcgaggagttcatttggccagcaatccagagttcggccctttacgaagatagatatttattgggcacctccctggctcggccctgcattgctcggaagcaagtggagattgcccaacgcgaaggagccaagtatgtgagtcatggagcgaccgggaagggcaatgaccaggttcgttttgaactctcctgttattcgctggcacctcaaataaaggtcatcgcgccgtggcggatgcccgagttctacaatagattcaagggcaggaacgatttgatggagtatgccaagcagcacgggatccccattcctgtcacccccaaaaacccctggtcgatggacgagaatctgatgcatatctcctatgaggctggaattctggagaatcctaagaaccaggctccgcctggcctgtatactaagacccaggatcccgctaaggcgcccaacacacccgacattctcgaaattgaatttaagaaaggggttcctgtcaaggttactaacgttaaagatggcactactcatcagacctccctcgagctttttatgtaccttaatgaggttgctggtaaacacggcgttggccgcattgatattgtggagaaccgcttcatcgggatgaagtcacgaggaatttacgagactccagctggtaccatactctaccacgcccacttagacattgaggcatttaccatggatagggaggtgcggaagattaagcagggcctcggcctgaagttcgcagagttagtgtatacgggcttttggcacagtccagagtgcgaattcgtgcgtcactgcatcgccaagagccaagaaagagtggaggggaaggtccaagttagtgtgctgaagggccaggtgtacatcttaggccgagagtcccctttgtccttgtacaacgaggagctggtgagcatgaatgtccagggcgactatgaaccaacagacgccactggctttatcaacattaactcgcttagactcaaagagtatcatcggctccagtctaaagtcaccgcaaag

SEQ ID NO: 6880 - DNA, 1236 bp, synthetic construct
  misc_feature 1..1236: note = source = /note="Description of Artificial Sequence: Synthetic coding sequence"
  source 1..1236: mol_type = other DNA
atgagtagcaagggctccgttgtgttggcatacagcggaggcctggacacctcatgtattctcgtgtggctcaaggagcaaggctacgatgtgatagcctacctggccaacattgggcagaaagaagactttgaagaagcaaggaaaaaggctctgaagctgggagccaagaaggtgtttattgaggatgtctccagggaatttgtcgaggagtttatctggccagccattcagtcttccgcgctttacgaagatcgctatttactggggacctcgttagcccggccttgtattgcccgcaaacaggtagaaatcgcccaaagagagggcgccaagtacgtgtcccacggcgccaccggaaagggaaatgaccaggtgagattcgagctcagttgttactccctggcacctcagatcaaggtgatcgctccatggcgtatgcctgagttctataaccgctttaagggacgtaacgatctgatggagtatgccaagcagcatgggatccccatccccgtaacccccaagaatccttggagtatggatgaaaatcttatgcacatttcgtatgaggcggggatactggagaatcctaaaaaccaggcaccacctggcctgtatacaaaaacacaagaccctgccaaagcccctaacacacccgatattctggaaattgagttcaaaaaaggcgtgccagtgaaagtcacaaatgtaaaagacggcaccacacatcagacgtcactggaattgttcatgtatctcaatgaagtggcagggaaacatggggttggtaggatcgatatagtggagaatcgcttcatcggaatgaaatccagaggaatctatgaaacaccagccggtacaatactttatcatgcccacctcgacattgaagcattcaccatggacagggaagttcgcaagattaagcaaggtcttgggttgaaatttgctgaactggtatatacgggattttggcactcacctgaatgcgagttcgttaggcattgtatagcaaagtcccaggaacgcgtggagggcaaagtccaggtctccgtgctgaaaggacaggtttatattttggggagagagtcccctttgagcctttataatgaggagctggttagcatgaacgtgcagggcgattacgaacctacggatgccaccggttttatcaacattaactccctccgcctaaaggagtatcaccgattgcagagcaaagtgactgccaag

SEQ ID NO: 6881 - DNA, 1236 bp, synthetic construct
  misc_feature 1..1236: note = source = /note="Description of Artificial Sequence: Synthetic coding sequence"
  source 1..1236: mol_type = other DNA
atgtcgtctaaggggagcgtcgttctcgcctatagcggtgggttggataccagttgcattcttgtctggctgaaggagcagggctacgatgttattgcttacctggccaatatcggtcagaaggaggattttgaggaggcacgaaaaaaggcactgaaactgggggccaagaaggttttcattgaagacgtgtcacgcgagttcgtggaggaattcatatggccggccattcagtcgagcgccctctacgaagaccggtatctcctaggtacctcactcgccaggccctgtatcgcccgaaagcaggtggagatagcccaaagggagggagcgaagtacgtgagccacggagccaccgggaaggggaacgatcaagtgcggttcgaattaagctgttacagtctggccccccagattaaagtcatagcgccctggcggatgccagaattctacaatcggtttaaagggaggaatgacctaatggagtacgcgaaacaacacggtattccaattcccgtgactccgaagaacccgtggtctatggatgagaaccttatgcatataagctacgaagcgggtattctggagaatccgaagaatcaggccccaccaggactgtacacaaaaactcaggatccggccaaggcccccaatacaccagacatcctggaaatagagttcaaaaaaggcgtgcccgttaaggtgacaaatgtgaaggatggaacgacccatcagactagcttagaattgtttatgtacctgaatgaagtcgccgggaagcatggggtcggtagaatagacattgttgagaatcgtttcatcgggatgaaaagccgtgggatatatgagacacccgctggtaccattctgtatcacgcccacctcgacatcgaggccttcaccatggaccgcgaggttcgaaaaatcaaacaggggcttggactgaagttcgctgaactggtgtacaccgggttttggcacagccccgagtgcgaattcgtgaggcattgtattgcaaagagccaggaacgggtggaggggaaggtgcaggtaagcgtactcaagggacaggtttatattttgggacgcgagtccccgctatctttgtacaatgaggagctcgtctcaatgaacgttcagggagactacgagcccactgacgcaacgggctttattaatattaattcgctgagactgaaagaataccaccgcctacaatcaaaggtgacggctaag

SEQ ID NO: 6882 - DNA, 1236 bp, synthetic construct
  misc_feature 1..1236: note = source = /note="Description of Artificial Sequence: Synthetic coding sequence"
  source 1..1236: mol_type = other DNA
atgtcctcgaaggggtcagtggtgttggcatactccggcggcctcgacacctcctgtatcctggtgtggttgaaggagcagggatacgacgtgatcgcctacctcgctaacattgggcaaaaggaagatttcgaagaggcccgcaagaaagccctgaaactgggggcgaaaaaggttttcatcgaggatgtgtcgcgcgaattcgtcgaggaattcatttggccggccatccaatcctcggccctgtacgaagatcggtacctgctgggcacgtctctggcgaggccgtgcatcgcccggaagcaggtggaaatcgcccagcgcgagggagctaagtacgtgtcgcacggtgcgaccggaaaagggaacgaccaggtgcggttcgagctctcctgctactctctggctccgcaaatcaaggtcatagcgccgtggagaatgccagagttctataatcgctttaaaggaaggaacgacctcatggaatacgcaaagcaacatggaatcccaatcccggtaacgccgaaaaatccgtggtccatggatgaaaacctcatgcatatctcctacgaggcgggaattctggagaaccctaagaatcaggcaccgccgggactgtacaccaagactcaggatccagcaaaggcacctaacacccccgacattcttgaaatcgagtttaagaaaggagtgccagtgaaggtgactaatgtgaaggatggaaccactcatcagaccagcctcgaactgttcatgtatctgaacgaagtagcgggtaagcacggtgtcggccgaatcgacatagtggagaatagattcataggcatgaaaagcagaggcatctacgagacgcctgcgggaactatcctctaccatgcacatttggacatcgaggcttttactatggatcgggaagtgcggaagatcaaacaaggacttgggctgaaatttgccgaacttgtctacactgggttctggcactcgcccgaatgcgaattcgtgcgccactgcatcgctaaatcgcaggaacgggtcgaaggtaaggtgcaagtgtccgtgctgaagggccaggtctacatcttgggtcgcgagagcccactgtcgctgtacaatgaggaacttgtctcgatgaacgtccagggtgactatgagccaactgacgccaccggttttatcaacatcaacagtctgagactcaaggaataccaccgtctgcaatcgaaggttactgccaaa

SEQ ID NO: 6883 - DNA, 1236 bp, synthetic construct
  misc_feature 1..1236: note = source = /note="Description of Artificial Sequence: Synthetic coding sequence"
  source 1..1236: mol_type = other DNA
atgtcgtccaaggggagtgtcgtgttggcctatagtgggggactcgatacttcctgtatccttgtatggctgaaagaacaagggtatgatgttatcgcttatctcgcaaacattggacaaaaagaggatttcgaggaggcacggaaaaaagcactaaaactcggagcgaaaaaagtgtttatagaagatgtgtcccgagaattcgtagaagagtttatctggcctgctatacagtcatcagctttgtatgaggatcggtatttactgggaacatctctagcaagaccttgtatcgctcgaaaacaggtggaaatagcacaaagggagggggccaaatacgtgtcacacggagcgacaggaaaaggaaatgaccaggtccggttcgaattgtcctgttattcgctggcccctcagataaaagtaatcgctccctggaggatgcctgaattctacaatcgcttcaaggggcgcaatgatcttatggaatatgctaaacagcacggaattcctatccctgtgactcccaaaaatccatggtctatggacgagaatcttatgcacatcagttatgaagcagggatcctagagaacccaaaaaatcaggcacctcccgggctttatactaaaacacaggatcccgctaaggcacccaatacaccagatatcctcgaaatcgaatttaaaaaaggagtacccgtcaaagtcactaacgtgaaagatgggacaactcaccagacatctttggagcttttcatgtatctgaacgaagtcgcagggaaacatggagtaggaagaatagacatcgtggagaatcggtttattggaatgaaatcacgggggatatacgaaacacccgctggaactatcttgtatcatgcccatctcgatatagaagcttttacaatggatcgggaagtgcggaaaattaaacagggattagggctaaaattcgctgagctggtttatacaggattctggcattcccctgagtgcgaatttgtacgccactgtatagccaaatctcaggaacgggtagagggaaaagtccaagtcagtgtgctgaaagggcaggtgtatatactcggacgtgaatcacccttatctctgtataacgaagaactcgtcagtatgaatgtacagggggattatgaacctacagatgcaactgggtttataaatattaattctctgcggctgaaggaataccacaggctgcagagtaaagtgacagctaaa

SEQ ID NO: 6884 - DNA, 1236 bp, synthetic construct
  misc_feature 1..1236: note = source = /note="Description of Artificial Sequence: Synthetic coding sequence"
  source 1..1236: mol_type = other DNA
atgtcgtcgaaggggtcggtggtgctggcatactcaggtgggctcgatacttcctgcatcctggtgtggcttaaagagcagggttacgatgtgatagcgtacctggcaaatatcggtcaaaaggaagattttgaggaggctagaaagaaagccctgaaactgggtgcgaagaaagtgtttattgaggacgtgtcgagagaatttgtggaagaattcatttggcctgccatacagtcatccgctctttacgaggacagatacctgcttgggacgagccttgccagaccttgtatagccaggaaacaagtcgaaattgcccagagagaaggcgcaaaatacgtgtcccatggtgcaactgggaagggaaacgatcaggtccgctttgaactctcctgctactccctcgcaccccagatcaaggtgatcgccccttggagaatgccagagttttacaatagattcaaggggaggaacgacctgatggagtacgcaaagcaacacggaattcccatcccagtgactccaaagaacccgtggtcgatggacgagaacctgatgcatataagctacgaggcgggaattctcgaaaacccaaagaaccaggctccacctggattgtacaccaagactcaagatccggcgaaggcacctaacactcccgatattctcgaaattgagttcaaaaagggagtgcctgtgaaggtcactaacgtcaaggatgggactacccaccaaaccagtctcgaactgttcatgtatctgaatgaagtcgcgggaaagcatggggtcgggagaatagacatagtggaaaaccggtttattggtatgaaaagccgaggcatttacgagactcccgccggaaccattctttaccatgcgcacttggatatcgaagcatttactatggatcgagaagttcgcaagattaagcaaggacttggcctgaagttcgcggaacttgtctacaccggattttggcattcccctgaatgtgagtttgtgaggcactgtattgcaaagtcccaggaaagggtcgaaggtaaagtacaagtgtcggtacttaaggggcaggtgtatattcttggacgggaatcgcccctttctctgtacaatgaagagctcgtgagcatgaatgtccaaggagattacgaacccaccgacgcgactgggtttatcaacataaacagcctgcgtctcaaagaatatcatcgccttcaatctaaagtgaccgccaag

SEQ ID NO: 6885 - DNA, 1236 bp, synthetic construct
  misc_feature 1..1236: note = source = /note="Description of Artificial Sequence: Synthetic coding sequence"
  source 1..1236: mol_type = other DNA
atgtcttctaaggggtccgtcgtactggcctattcagggggtcttgacacttcttgtatcctggtctggctcaaggaacagggatacgatgtgatcgcctacctcgccaacatcgggcagaaagaagacttcgaagaagcccggaagaaggctctcaagctaggcgccaagaaggtattcattgaggatgtctctagggagttcgtcgaagagttcatttggccagccattcagagctctgcgctgtacgaagatcgctacctccttggcacttctttggcccgcccatgcatcgcacggaagcaagtcgagatcgcacaaagggaaggcgccaaatatgtgtctcacggcgccaccggaaaggggaacgatcaagttcgtttcgagctttcttgctattcactggccccgcagatcaaggttatcgctccttggcgcatgccagaattttataaccgctttaagggaagaaacgatctcatggagtatgccaaacagcacggaattcccatccccgtgacgccaaagaacccatggagcatggacgagaaccttatgcacatttcttatgaggccgggatcctggagaatcccaagaaccaggcaccgcccggtctgtatacaaaaacccaggacccggccaaggcccctaacacaccagacatcttggaaatcgaatttaagaaaggtgttcctgtgaaagttactaatgtaaaggatggcaccacacatcagacatccttggagctcttcatgtacttaaacgaagtcgcgggcaagcatggtgtgggacgcatcgacatagtggagaataggttcattgggatgaagagcagggggatttacgagactccagctggcacgattttataccacgcgcacctcgatattgaggcgtttacaatggacagagaggtccgcaaaatcaaacaagggctcggcctgaaatttgcagaactggtttataccgggttttggcactcacccgagtgcgagtttgtgcggcattgcattgctaaatcccaggagcgcgtggaagggaaggtgcaggtgagcgtgctgaagggtcaggtttacattttaggaagggaaagcccgctcagcttatacaatgaggaacttgtgagtatgaacgtgcagggcgactacgagcctactgacgcaaccggctttatcaacatcaacagccttaggctgaaggaataccatcggttgcagtccaaagtcactgcaaag

SEQ ID NO: 6886 - DNA, 1236 bp, synthetic construct
  misc_feature 1..1236: note = source = /note="Description of Artificial Sequence: Synthetic coding sequence"
  source 1..1236: mol_type = other DNA
atgtctagcaaaggctccgtcgtgctggcctactcaggaggacttgacacttcgtgcatcttggtgtggctcaaggaacagggctacgatgtcatagcatacctggcaaacatcggacagaaagaggattttgaagaagcccgcaagaaagccctgaaactcggagccaagaaagtctttatcgaagatgttagccgggagttcgtggaagaattcatttggccggcgatccagtcgagcgcgctctacgaggaccgatacctgctgggtacttcactggcgcggccatgtatcgcgagaaagcaagtggaaatcgcacagcgcgaaggcgcaaaatacgtgagccatggagcgaccggaaagggaaacgaccaggtgaggttcgagctgagctgttactccctggcacctcagatcaaggtgatcgccccgtggaggatgccggagttctacaatagattcaagggacggaatgatttgatggagtacgcaaaacagcacggaatcccgatccctgtgaccccaaagaacccctggtccatggacgaaaacctcatgcatatttcgtacgaggctggtatcctggaaaacccaaagaaccaggccccgccagggctgtacactaagacccaagatccggcgaaggcgccgaatacgccggatattctcgagatcgaattcaagaaaggagtccctgtgaaggtcaccaatgtgaaggacggaacgacccatcagacctcattggagctctttatgtacctgaatgaggtcgctgggaagcacggtgtgggacgcatcgatatcgtggagaatcggtttatcggtatgaagagccgggggatctacgaaaccccagccggtaccatcctgtaccatgcccaccttgatattgaagccttcactatggaccgggaagtgcgaaagatcaagcagggactgggactgaagtttgctgaactggtctacactgggttctggcactccccggaatgcgaattcgtgcgccactgcatcgcgaagtcgcaagaacgggtcgagggaaaagtgcaggtgagcgtgctgaagggacaggtgtacatcctcggaagagaatcgccactgagcctgtacaacgaagagttggtgtctatgaacgtgcaaggagactacgaacccactgatgcaactggattcatcaatatcaattcgctgaggctgaaagagtaccaccgcctgcaatcgaaagtcacggccaag

SEQ ID NO: 6887 - DNA, 1236 bp, synthetic construct
  misc_feature 1..1236: note = source = /note="Description of Artificial Sequence: Synthetic coding sequence"
  source 1..1236: mol_type = other DNA
atgtcgagcaagggttccgtggtgttggcctacagcggcggtcttgacacctcctgcatcctggtctggctgaaggaacaggggtacgacgtgatcgcatacctggctaacatcggacagaaggaggacttcgaagaagcacgcaagaaggccctgaaactgggcgccaagaaggtgttcattgaagatgtgtccagggaattcgtggaagaattcatctggccggccatccaatcgtcggcactctacgaagatcgctacctgctcggaactagcctggcacgaccttgtatcgctcgcaagcaagtggaaatcgcgcagcgggagggcgctaagtatgtgtcccacggtgcgactgggaaaggcaatgatcaagtgagatttgaactctcgtgctactcactggcaccacaaatcaaggtgatcgcgccttggagaatgcctgaattctacaaccggttcaagggccgaaacgatctgatggaatacgccaagcagcacggcatcccgatccctgtcaccccgaagaacccgtggagcatggatgaaaatctgatgcatatctcctacgaagccggtatcctggagaatcccaaaaaccaggcgccgccgggactgtacactaagacccaagacccggctaaggccccaaatacccctgacatccttgagatcgaattcaagaagggagtgccagtcaaagtcactaacgtcaaagacgggaccacccaccagacttcactggaactcttcatgtaccttaatgaggtggcaggaaagcatggcgtggggcggattgacattgtggaaaaccgattcatcggaatgaagtcgcggggaatctacgagactccagctgggaccatcctctaccacgcgcacctggatatcgaagccttcaccatggaccgcgaagtgaggaaaatcaagcagggactcggactgaaatttgctgaactcgtgtacactggattctggcattcgccggagtgcgaatttgtgcggcactgtatcgccaagtcacaagaacgcgttgaaggtaaagtgcaggtgtcggtgctgaagggacaggtgtacatcctgggccgcgaaagcccactgtcgctgtataacgaggagcttgtgtccatgaacgtccagggcgattacgagccgactgatgctaccggtttcatcaacatcaactccttgagactcaaggaatatcatcgactccaaagcaaggtgaccgccaag

SEQ ID NO: 6888 - DNA, 1236 bp, synthetic construct
  misc_feature 1..1236: note = source = /note="Description of Artificial Sequence: Synthetic coding sequence"
  source 1..1236: mol_type = other DNA
atgagtagcaaaggctcagtggtcctcgcttattccggtgggctggacactagttgcatcttggtgtggctaaaagaacaggggtatgacgtaatagcttacctcgccaacatcggtcaaaaggaagattttgaagaggccaggaaaaaggctctgaaactaggggcaaaaaaggtgttcatcgaggatgttagccgagaatttgtggaggagttcatctggccagccattcagagcagtgcgctctatgaggatcggtacctgctgggcacaagcttggcgcgtccctgtatcgctcgcaagcaggttgagattgcccagcgcgagggcgctaagtatgttagccacggggctactggcaaggggaacgatcaagtgcggtttgagttgtcgtgttatagcctggctccccagatcaaagtgatcgctccttggcgtatgcctgaattctacaaccgtttcaagggccgcaatgacctcatggagtacgctaagcagcacggcattcctatccctgtgaccccgaaaaatccttggagcatggatgaaaacctgatgcacatttcttacgaggccgggattctcgagaatcccaagaaccaggcacctccaggactctacacaaagacacaggatccagccaaggccccaaacacacctgacatactcgagatcgagtttaaaaaaggggtccccgtgaaggtgacaaatgtgaaggacgggacaacacaccagacctctctcgagctgtttatgtacttgaatgaagtcgccgggaagcacggtgtcggcagaatagatatcgttgagaatcgcttcatcggcatgaaatcacgaggaatttatgaaactcccgccggcactatcttgtatcacgcccacttggacatcgaagctttcactatggacagggaggtgcgcaagatcaaacaggggctcggtctgaaatttgcagagctcgtctacactggcttctggcatagccccgagtgcgaattcgtccgacactgtatcgcaaagagccaggaaagggttgagggcaaagtgcaggtcagtgtacttaagggtcaagtctatatcctcgggcgcgaatccccattgagtttgtataacgaggagctggtgtctatgaacgtgcagggcgactatgagccgactgatgccacaggatttattaacatcaactcgttgcgactgaaggaataccaccggttgcagtccaaggtgacagctaag

SEQ ID NO: 6889 - DNA, 1236 bp, synthetic construct
  misc_feature 1..1236: note = source = /note="Description of Artificial Sequence: Synthetic coding sequence"
  source 1..1236: mol_type = other DNA
atgagcagcaagggctcggtcgtactggcatatagcggagggctcgatacaagctgtatcttggtctggctgaaggaacaaggatacgatgtgatcgcctatcttgctaatatcggccagaaggaggacttcgaggaggcccggaaaaaggcactcaagcttggagccaagaaggttttcatagaggacgtatcccgcgagtttgtggaggagtttatttggccggccatacagagttctgcactctatgaggaccgttacttgctggggacctctttagctaggccttgtatcgcgcgaaaacaggtggagatagctcaacgggagggcgctaaatacgtcagccacggcgccacaggcaagggcaatgatcaagtccggttcgagctgtcatgctattcgctcgcgccacagataaaagttatagccccatggcgcatgcctgaattttataaccgcttcaagggcagaaatgatcttatggaatatgcaaagcagcatggaattccaattcccgtaaccccaaaaaatccctggtctatggatgaaaatctgatgcacatctcatacgaggcaggcattcttgaaaatcccaagaaccaggcaccccccggcttgtacacgaaaacacaagatccagccaaggcaccgaacacccccgacattttggagatcgaatttaagaagggagtgccggtgaaggtcacaaatgtaaaggatggcaccacccatcagacctctcttgagctctttatgtatttgaacgaggtggctggcaagcatggagtgggacggatcgacatcgtggagaatcgcttcattggaatgaaatctcggggcatctatgaaacccccgccggcacgatcctctaccatgctcaccttgatatcgaagccttcacgatggaccgggaagtgcgaaagattaaacaaggattggggctcaaatttgccgagctggtgtatactgggttctggcatagcccagagtgtgagtttgtgcgccactgcatcgccaagtcccaggagcgggtggaagggaaggtccaggtcagtgttctcaagggtcaggtttacatcctaggccgcgagagcccgctgagcctgtacaacgaggaactggtgtctatgaatgtgcagggggattacgagccgactgacgcaaccggcttcatcaatattaacagcctgcgactaaaagagtaccaccgcctccagtccaaggtaaccgcaaag

SEQ ID NO: 6890 - DNA, 1236 bp, synthetic construct
  misc_feature 1..1236: note = source = /note="Description of Artificial Sequence: Synthetic coding sequence"
  source 1..1236: mol_type = other DNA
atgtcatcaaaggggtccgtagtcctggcctattcaggcgggctcgatacttcttgcatcctcgtctggttgaaggagcaaggttatgatgtcatcgcttacctggccaatattgggcagaaagaggattttgaggaagcccgcaagaaagctcttaaacttggagctaagaaggtattcatagaagacgtttcacgagaattcgtcgaagagttcatctggcccgccatccagagttcagccctctatgaggaccggtacttgctcggcacatcacttgcccgcccatgcattgcacggaagcaggtggagatcgctcagagagagggggctaaatacgtgtcacacggggccacaggcaagggaaacgatcaagtacgatttgagctgagctgctattctcttgcccctcagattaaggtcatcgctccatggaggatgcctgagttttacaatcgatttaagggacgaaacgacctgatggaatacgcgaagcagcatggtattcctatccccgtaacccccaaaaatccttggagcatggacgagaacctgatgcacatctcatatgaagcaggcatacttgaaaaccctaaaaatcaggcgcctcctggtctctatacaaaaacacaagatcccgctaaagctcccaatacccccgatattctggaaatcgaattcaaaaaaggcgtccctgtgaaagtgaccaatgtgaaggatggtacaacccatcaaacaagcttggagctgttcatgtacctgaacgaagtggccgggaagcacggcgtgggacgcatcgatatcgtggagaatcgatttatcggcatgaagtctagaggaatctacgaaacaccggcaggaactattctctatcacgctcacctggacattgaagcttttaccatggaccgggaggtccggaaaattaaacaaggactgggcctcaaatttgcagagctggtgtatactggcttctggcattcccccgagtgcgagttcgtaagacactgtatagcgaaatctcaggagagggtcgaaggcaaggtgcaggtgagcgtgctgaaaggacaggtttatatcctcgggagggagagccctctctctttgtacaatgaggagcttgtgagcatgaacgtccagggagattatgagccaacggatgccaccggatttataaatatcaacagcctccgattgaaggagtaccaccgattgcagagtaaagtgacagccaag

SEQ ID NO: 6891 - DNA, 1236 bp, synthetic construct
  misc_feature 1..1236: note = source = /note="Description of Artificial Sequence: Synthetic coding sequence"
  source 1..1236: mol_type = other DNA
atgtcctcgaagggttcggtggtgctcgcatattcaggcggccttgacacctcttgcattctggtctggctcaaagaacaaggatacgacgtgatcgcgtacctcgccaacatcgggcaaaaggaagatttcgaggaggctcgcaaaaaggccttgaaactcggcgcgaagaaagtgtttatcgaggacgtctccagagagttcgtcgaagaattcatttggccagctatccaatcttccgcgctctacgaggataggtatctgctcggcacgagcttggcccggccgtgtatcgcccggaagcaggtcgaaattgcgcagcgcgagggagcaaagtacgtgtcacacggagctaccgggaaggggaacgaccaggtgcggttcgagcttagctgttactcgctcgccccgcagataaaagttatcgctccttggcggatgcctgagttctacaatcgattcaagggacgaaacgacctgatggagtatgctaagcaacacggaatcccgattccggtcacccctaagaatccttggtcaatggacgaaaatctgatgcatatttcctacgaagccggaatcctggagaatccaaagaaccaggctccgcctggattgtacaccaagacgcaagacccagccaaggcgcccaacacgcccgatattctggagatcgaattcaaaaagggagtgcctgtgaaggtcaccaacgtgaaggatggtaccactcaccagactagcctggagctgtttatgtacctgaacgaggtggctggcaaacacggggtgggacggatagacatcgtggaaaatcggtttatcggcatgaaatcgcgaggaatctacgaaaccccagctggcactatcctgtaccatgcacatctggacatcgaagcatttaccatggatcgcgaagtgcgcaaaatcaaacagggactggggctcaagttcgccgaactggtctacactggtttctggcattcccccgaatgcgaatttgttcggcactgcattgcaaagagtcaggaaagggtggagggaaaggtgcaggtgtcggtcctgaagggtcaggtgtacatccttggacgcgaatcgccactgtcgttgtacaatgaggaactcgttagcatgaacgtgcaaggagactacgaaccaactgatgcaactggcttcataaacatcaacagtttgaggctgaaggagtatcacagactgcaatccaaggtgactgcaaag

SEQ ID NO: 6892 - DNA, 1236 bp, synthetic construct
  misc_feature 1..1236: note = source = /note="Description of Artificial Sequence: Synthetic coding sequence"
  source 1..1236: mol_type = other DNA
atgagttccaaaggatcagttgtcttagcttactctggaggtcttgatacaagttgtattttagtttggcttaaagaacaaggatatgatgttattgcttatctagcaaatattggtcaaaaggaagattttgaagaagctagaaaaaaagctctaaaattaggagctaaaaaagttttcattgaagatgtaagtagggaatttgttgaggaatttatttggccagctattcagtcatcagctttatatgaagaccgatatcttttaggaacttcacttgctagaccttgtattgctagaaaacaagttgaaatagcccaaagagaaggtgctaaatatgtttcacatggagctactggtaagggaaatgatcaagtaagatttgaattaagttgttatagtttagctccacaaattaaggttattgcaccatggagaatgccagaattttataatagatttaagggtagaaatgacttaatggagtatgctaaacaacacggtattcctattccagtaacgccaaaaaatccatggtcaatggatgaaaatttaatgcatatttcatatgaagctggtattttagaaaatccaaagaatcaagcaccaccaggattatatacaaaaactcaagatccagctaaagcaccaaatactccagatattcttgaaattgaatttaaaaaaggagttccagttaaagttacgaatgttaaagatggaactacacatcaaacatcattagaattattcatgtatttaaatgaagttgctggtaaacatggtgtaggacgaattgatattgttgaaaatagattcattggaatgaagtcaagaggaatttatgaaactccagcaggaaccattttatatcatgctcatttagatatagaagcattcactatggatagagaagtaagaaaaattaaacaagggttaggtttaaagttcgctgaacttgtatatacaggattctggcatagtccagagtgtgaattcgttagacattgtattgcaaaatcacaagaacgtgtagaaggtaaggttcaagtttctgtattaaaaggacaagtttatattttaggacgtgaatctccattatcactttataatgaggaattagtttcaatgaatgtacaaggagattacgaaccaactgatgctactgggttcattaatattaatagtttaagattgaaagaatatcatagattacaatccaaagtgactgctaaa

SEQ ID NO: 6893 - DNA, 1236 bp, synthetic construct
  misc_feature 1..1236: note = source = /note="Description of Artificial Sequence: Synthetic coding sequence"
  source 1..1236: mol_type = other DNA
atgagctcaaaggggtcggtggtgctggcatactccggcggactggatacgtcgtgcatccttgtgtggctgaaagagcagggatacgatgtcatcgcctacctggcaaatatcgggcaaaaggaggatttcgaggaagcccgaaaaaaggcgctcaaacttggggcgaagaaggtgttcatagaagatgtctcgcgcgagttcgtggaagagttcatctggccggctatccagagctcggccctgtacgaagatcgatacctgctgggcacttcgctcgcacggccttgcatcgcgcgcaagcaggtggaaatcgcccagcgggaaggggcaaaatacgtctcccatggagcgaccggaaagggcaatgaccaagtgcgcttcgaactgtcctgctactcactggcaccacaaatcaaggtcatcgccccatggcgcatgcctgaattctacaaccggttcaagggacgaaacgaccttatggagtacgccaaacagcatggaattccgatcccggtgaccccgaagaacccctggtccatggatgaaaacctgatgcacatcagctacgaagccggaatcctggaaaatcccaagaatcaggctcctcctggcctgtacactaagactcaagatccggccaaggcgccaaacactccggacatccttgaaatcgagttcaaaaaaggagtcccggtcaaggtgaccaacgtgaaggacggaactacccatcagacttcactggagctgttcatgtacctcaatgaagtggcgggaaagcacggcgtgggaagaatcgacatcgtggagaatcggttcattggaatgaagtcgcgcggaatatacgaaactccagcgggaactatcctgtaccacgcacatttggacatcgaggctttcactatggaccgggaagtgaggaagattaagcagggactcggactcaagtttgccgaactcgtgtacactggcttctggcactcacccgaatgcgagtttgttagacactgcattgctaaatcccaggagcgcgtggaggggaaggtgcaagtctcagtgcttaagggacaggtttacattctgggccgagagtccccgctctccctctacaacgaagaactggtcagtatgaacgtacagggtgattatgagccgaccgacgctaccggattcattaacatcaactcgctcaggctgaaagaataccaccgcctgcagagcaaagtgaccgcaaaa

SEQ ID NO: 6894 - DNA, 1236 bp, synthetic construct
  misc_feature 1..1236: note = source = /note="Description of Artificial Sequence: Synthetic coding sequence"
  source 1..1236: mol_type = other DNA
atgagttccaagggctccgtggtccttgcgtactccggcgggttggatacgtcatgcatactggtgtggctaaaggaacaggggtatgatgtgattgcctacctagccaatattggccagaaggaggacttcgaagaagcacgtaaaaaagcactgaaactgggtgccaagaaggtgtttatagaagatgtgtcacgggagtttgtagaggaatttatctggccagcaatccagtcatccgcactctacgaagatcgatacttgctcggcacaagtcttgcccgcccctgtatcgcccgcaagcaagtcgagatcgcacagagggagggggcaaaatacgtgtcacacggtgcaactggaaaagggaacgatcaggtgcgctttgaattgtcgtgctactccctggctccacagatcaaggttatcgcaccgtggagaatgcccgagttctacaaccgctttaaagggagaaacgatctgatggaatatgcaaaacaacatggtataccaataccagtgacaccgaagaacccgtggagcatggacgaaaatctgatgcacatctcctacgaagcaggtatcctggagaatcccaaaaaccaagcccctccaggtctgtacacaaagacccaggaccccgccaaagcccccaacacaccagatatcctggaaattgagtttaagaagggagtacccgtgaaagtgacaaacgtgaaggacggaaccacacatcagacctctctggaactgtttatgtacttaaacgaagtggcagggaagcatggagttggtcgcattgatatagtggaaaacaggttcatcggaatgaagtcaagaggaatatacgagacgccggcaggaactatcttgtaccacgcccatctggacatcgaagcgtttacaatggaccgagaggtgcgcaagattaaacaaggattgggtttgaaattcgccgaactcgtgtacactggattttggcatagccctgagtgtgagttcgtccggcattgcattgctaagtctcaggaacgtgtggaggggaaagtacaggtttctgtcttgaaaggacaggtgtacatcttgggaagggagagcccactcagcctgtacaatgaagaactagttagtatgaacgttcagggggactatgagcctacggacgcaaccggtttcattaacattaactcgctgcgactgaaggaataccaccgcctccagagcaaggtgaccgctaag

SEQ ID NO: 6895 - DNA, 1236 bp, synthetic construct
  misc_feature 1..1236: note = source = /note="Description of Artificial Sequence: Synthetic coding sequence"
  source 1..1236: mol_type = other DNA
atgtcttccaagggtagcgtggttcttgcctactccggtgggcttgacacttcctgtattcttgtctggttgaaggaacagggctacgatgtcatcgcctatttggctaatatcggccagaaagaggattttgaagaggcgcggaagaaagcactgaagctgggcgccaaaaaggtgttcatagaggacgtctccagagaattcgtggaagaattcatctggccagcgatccagagcagtgccctgtacgaggacaggtatctgttgggcacaagcctcgctcgcccatgtatcgccaggaagcaggtggaaattgcacagcgggagggggccaaatacgtctctcacggcgccactgggaaggggaacgaccaggtgcgcttcgaactctcttgttattcccttgcccctcaaattaaggtgatcgcaccttggaggatgcccgagttctacaataggtttaaagggcgcaacgatctgatggaatatgctaaacagcatggaatcccaatccctgttacacctaagaatccttggtccatggacgagaacctgatgcatatctcctatgaggcaggaattctggaaaatcccaaaaaccaggcaccaccgggcctttacaccaagacccaagatccagcaaaggcccctaatactcctgacattctcgaaattgaattcaaaaaaggagtgccagttaaggtgaccaacgtaaaggatggaacaacgcaccagaccagtctcgaactgtttatgtatctgaacgaggtcgcaggcaagcacggggttggaagaatcgacatagtagagaaccggttcatcggcatgaaaagccggggtatatatgagactcccgcaggaaccattctgtaccatgcccatctggatattgaggctttcactatggaccgggaagtgagaaaaatcaagcaggggctcggattgaagttcgccgagttggtatacacaggcttctggcacagtccagagtgtgagtttgtgaggcattgcatcgctaaatcccaggagcgggtggagggaaaggtgcaggtgagcgtgctgaaaggtcaggtgtatatcttgggccgcgagtctccgctgagtctctacaatgaagaactggtcagcatgaacgtgcagggtgactatgaaccaaccgatgcaaccggttttattaacattaattctctgagattgaaggagtatcaccgactccaaagcaaggttacagctaaa

SEQ ID NO: 6896 - DNA, 1236 bp, synthetic construct
  misc_feature 1..1236: note = source = /note="Description of Artificial Sequence: Synthetic coding sequence"
  source 1..1236: mol_type = other DNA
atgtcgtcgaaaggttcggttgtactagcgtattcgggtggtctagatacgtcgtgtatactagtttggctaaaagaacaaggttatgatgtaatagcgtatctagcgaatataggtcaaaaagaagattttgaagaagcgcgtaaaaaagcgttaaaattaggtgcgaaaaaagtatttatagaagatgtttcgcgagaatttgttgaagaatttatatggccggcgatacaatcgtcggcgttatatgaagatcgttatctattaggtacgtcgttagcgcgaccgtgtatagcgcgtaaacaagtagaaatagcgcaacgagaaggtgcgaaatatgtatcgcatggtgcgacgggtaaaggtaatgatcaagttcgttttgaattatcgtgttattcgctagcgccgcaaataaaagtaatagcgccgtggcgtatgccggaattttataatcgttttaaaggtcgaaatgatttaatggaatatgcgaaacaacatggtataccgataccggtaacgccgaaaaatccgtggtcgatggatgaaaatttaatgcatatatcgtatgaagcgggtatattagaaaatccgaaaaatcaagcgccgccgggtttatatacgaaaacgcaagatccggcgaaagcgccgaatacgccggatatactagaaatagaatttaaaaaaggtgtaccggtaaaagtaacgaatgtaaaagatggtacgacgcatcaaacgtcgctagaattatttatgtatctaaatgaagtagcgggtaaacatggtgttggtcgaatagatatagttgaaaatcgatttataggtatgaaatcgcgaggtatatatgaaacgccggcgggtacgatattatatcatgcgcatctagatatagaagcgtttacgatggatcgagaagtacgtaaaataaaacaaggtttaggtctaaaatttgcggaattagtttatacgggtttttggcattcgccggaatgtgaatttgttcgacattgtatagcgaaatcgcaagaacgagtagaaggtaaagttcaagtttcggttttaaaaggtcaagtatatatactaggtcgtgaatcgccgttatcgctatataatgaagaactagtatcgatgaatgttcaaggtgattatgaaccgacggatgcgacgggttttataaatataaattcgttacgtttaaaagaatatcatcgactacaatcgaaagttacggcgaaa

SEQ ID NO: 6897 - DNA, 1236 bp, synthetic construct
  misc_feature 1..1236: note = source = /note="Description of Artificial Sequence: Synthetic coding sequence"
  source 1..1236: mol_type = other DNA
atgtcttctaagggaagcgtggtcctggcttatagcggtggcttagatacgtcctgtattctggtctggctaaaggaacagggctatgacgtcattgcctatttagccaacattggccagaaggaggatttcgaagaggccaggaaaaaggccctgaagctcggagcaaaaaaagtttttatcgaagacgtatcacgagaattcgtggaggaatttatatggccagccatccagtctagtgctctgtacgaagaccgatacctgttgggaacctcactagctagaccttgtatcgcccggaagcaggtggaaatcgctcagagggagggcgccaaatacgtgagccacggcgcaacagggaaaggcaacgatcaggtacggtttgagctatcctgctattccctggctccgcagatcaaagtaatcgcaccatggagaatgcctgaattctacaatcgtttcaaagggagaaatgacttgatggagtatgctaaacagcacggtatcccgatcccagttactccaaagaacccgtggtcaatggacgaaaacctcatgcacatctcttacgaggcagggattctggagaatcccaagaatcaggcccctcctggactgtacaccaaaactcaggatcccgccaaggcgccaaatacaccggatatcctagagatagagtttaaaaaaggagtccccgttaaggtgacaaatgttaaagatgggaccacacaccagacctctcttgagctatttatgtaccttaacgaggtagcgggtaagcatggagtcggaagaattgacattgtggagaacaggttcatcgggatgaagtcacggggtatttatgagacacctgctggaacaatattgtatcacgcccacctggatattgaggcatttacaatggacagagaagtgcggaaaatcaaacaaggtctggggctcaagtttgcagagctggtctatacagggttctggcatagtccggaatgcgaattcgtgcgacattgcatagccaaatcccaggagcgtgtggagggtaaagtgcaggtgtccgttttaaagggccaagtgtacattctggggcgggaatcccccctgagtctctataatgaagaattagtctccatgaacgttcagggcgactacgagcccacagatgccacaggattcatcaatattaacagtctgcgcctaaaagagtatcacaggctgcagtccaaggtgacagcaaag

SEQ ID NO: 6898 - DNA, 1236 bp, synthetic construct
  misc_feature 1..1236: note = source = /note="Description of Artificial Sequence: Synthetic coding sequence"
  source 1..1236: mol_type = other DNA
atgtcgtcaaagggttcagtggtgctcgcatactccggcggactggatacgtcctgtatcctggtgtggctgaaagaacagggctacgatgtgatcgcataccttgcaaacattggtcagaaggaggattttgaggaagcaagaaagaaagcacttaaacttggcgctaagaaggtgtttatcgaagatgtctcgcgggaatttgtggaagagttcatatggcccgcaattcagagctccgcactctacgaggaccgctacctgctcggcaccagcctggcgaggccatgtattgcccgaaagcaagtggaaatcgcacaacgcgaaggtgcaaaatacgtctcgcacggagcaaccggaaagggaaatgatcaagtgagatttgagctgagctgttactcgcttgcgcctcagattaaggtcattgcaccttggcggatgcccgaattctacaacagattcaaaggaagaaatgatttgatggagtacgccaagcaacatggaattccaattcccgtgactccaaagaacccttggtccatggatgaaaaccttatgcacatctcctacgaagccggtattctcgaaaatcctaagaatcaagctccccctggactgtacactaagactcaggacccagctaaggcacctaacacgcctgatattctcgaaattgaattcaagaaaggagtccctgtcaaggtgaccaacgtgaaggacggcactactcatcagacgtcactggaacttttcatgtaccttaatgaagtggcaggtaagcacggtgtgggtagaattgatattgtggaaaacagatttatcggcatgaagtcccgggggatttacgaaacccctgccggtactatcctttaccacgcacacctcgatattgaggcatttaccatggaccgggaggtccgaaagatcaagcaagggctcggccttaagtttgcggaactggtctacactggattttggcatagcccagagtgcgaatttgtgaggcattgtatagcaaagtcgcaggaacgtgtggaggggaaggtccaagtgtcggtccttaagggacaggtgtacatcctgggaagagaatcgcctctttccctgtacaatgaagagctggtgtcaatgaacgtgcaaggagattacgaacccaccgacgccaccggctttatcaacatcaacagccttcggcttaaagagtatcatagactgcagtcaaaggtcactgcaaag

SEQ ID NO: 6899 - DNA, 1236 bp, synthetic construct
  misc_feature 1..1236: note = source = /note="Description of Artificial Sequence: Synthetic coding sequence"
  source 1..1236: mol_type = other DNA
atgagctccaagggctcagtggtgttggcttactcaggtgggcttgatacctcgtgcatcctggtctggctgaaagagcaaggatacgatgtcattgcttaccttgcaaatatcggacaaaaagaggacttcgaagaagcccggaagaaggccctgaaactcggcgctaagaaagtctttatcgaagatgtctctagggaattcgttgaagaattcatctggcctgcaatccagtcctcagcgctgtatgaagatcggtacctgctcggcacttcgctcgccaggccgtgcatcgctagaaagcaggtggaaattgcccagcgagagggagccaaatatgtctcccacggtgcgactggcaagggcaatgatcaggtgcggttcgagctgtcatgctactctctggcaccgcaaatcaaagtcatcgccccgtggcgcatgccggaattctacaaccgcttcaaaggacggaatgacctcatggagtatgcgaagcagcacggcatccctatcccggtgaccccgaagaatccgtggagcatggacgaaaacctcatgcatatctcatacgaagccgggatactggagaatccaaagaaccaggcaccccccggcctttacaccaaaacccaggacccagcgaaggccccgaacacccccgacattttggagatcgagttcaaaaaaggtgtgcctgtcaaagtgacgaacgtcaaggatgggacgacgcatcaaacctccctcgaactcttcatgtatctcaacgaagtcgcgggaaagcacggagtgggcaggatcgacatcgtggaaaaccgcttcatcggtatgaagtccagagggatctatgagactcctgccggaacgatcctctaccatgcccaccttgacatcgaagcctttactatggaccgggaggtgcggaagatcaaacagggactgggtcttaagttcgccgaactggtgtacaccggattttggcactcgcctgagtgtgagttcgtgcggcactgcatcgccaaaagccaagaaagagtggagggaaaggtccaggtgtcggtgctgaagggacaagtctacattctcggacgcgaatccccgctgtcactctacaatgaggaactggtgagcatgaacgtgcagggcgactacgagccaaccgatgcaactggatttatcaacatcaattccctgcgccttaaggagtaccataggctgcagagcaaggttactgcaaag

SEQ ID NO: 6900 - DNA, 1236 bp, synthetic construct
  misc_feature 1..1236: note = source = /note="Description of Artificial Sequence: Synthetic coding sequence"
  source 1..1236: mol_type = other DNA
atgtcctccaaaggctccgtggtgctcgcctactcgggagggttggatactagctgcatcctggtctggctgaaggagcagggttacgacgtgatcgcgtacctcgcaaacatcggccagaaagaggacttcgaggaagcacgcaaaaaggctttgaaactgggcgcgaaaaaggtgttcatcgaggatgtgtcgcgcgagttcgtggaagagttcatctggccagcaatccaatcgagcgcactgtatgaggatcgctacttgcttggcaccagcctggcccgcccgtgcattgcccgaaagcaagttgaaattgcccagcgggagggagcgaagtacgtctcccatggcgcaaccggtaagggtaatgatcaggtgcgcttcgaactgagctgttactcgctcgcgccgcaaatcaaagtgatcgccccatggagaatgcctgagttctacaatagattcaaggggcgcaatgatctgatggagtacgctaagcagcatggcatcccaatccctgtcacgcccaagaatccgtggtccatggacgagaaccttatgcacatttcatatgaagccggcatactcgaaaacccaaagaatcaggcgccgccaggactctacaccaaaactcaggatcccgctaaggctccgaacaccccggacatcctggaaatcgagttcaaaaagggagtccctgtgaaggtgactaatgtgaaagatggcaccactcaccaaacctccctcgaactgttcatgtacctgaacgaggtcgccgggaagcatggggtgggacggatcgacatcgtggagaaccgattcatcggcatgaaatccagaggaatctacgaaaccccggcaggaactattctctaccacgcccacctggacatagaagcgttcaccatggacagggaagtgcggaagattaagcaaggacttggactgaagttcgccgagctggtgtacaccggattctggcactcgccggagtgtgagtttgtgcggcactgcattgccaagtcacaggaaagggtggaagggaaggtccaggtgtccgtgctgaagggacaagtgtacatcctcggacgcgagtcccccctctcactctacaacgaggagctggtgtcaatgaacgtgcagggcgactacgaaccgaccgatgccactggattcatcaatatcaactcgctccggcttaaggaataccaccgccttcaatcaaaagtcaccgcaaag

SEQ ID NO: 6901 - DNA, 1236 bp, synthetic construct
  misc_feature 1..1236: note = source = /note="Description of Artificial Sequence: Synthetic coding sequence"
  source 1..1236: mol_type = other DNA
atgtccagcaaaggcagcgtagtgttagcctattcaggcggcctggacacctcatgcattctcgtctggctgaaggaacaaggatacgacgtcatagcttatcttgcaaacattggtcagaaggaggatttcgaggaagcaaggaagaaagcccttaagctgggagccaaaaaggtttttattgaagatgttagtcgtgagtttgtggaagagttcatttggcccgctattcaatcaagtgctttgtacgaagacaggtatctgttgggcacctccctggcccgtccatgcattgcacgaaagcaggtcgagatagcccagcgcgaaggggcaaagtatgtgagtcatggagcgaccgggaaggggaatgatcaggtgaggttcgaactgtcctgctattctctcgccccgcaaatcaaggtcatcgctccatggcggatgcctgagttttataacaggttcaaagggaggaacgacctcatggagtatgcgaagcagcacgggattcctatccctgtgacacccaagaacccctggtccatggacgagaatctgatgcacatcagctacgaggccggaatactggagaacccaaaaaatcaagctccacccggactgtacaccaaaacccaggaccctgctaaagcacctaatactcctgatattttggaaatagaattcaagaagggcgtccccgtcaaagtcacaaatgtgaaggacggaacaacacatcagacgtctctggaactctttatgtatctgaatgaagtcgccggaaagcatggagtaggacgaatcgatatcgtagagaataggttcattgggatgaagagccgaggcatctacgaaacgcccgcgggcacgattctttatcatgcgcacctggacatcgaagcattcacaatggaccgggaggtgcgaaagatcaaacaggggctcggcttaaagttcgctgagctggtctacaccgggttctggcattccccggaatgcgagttcgtcagacattgcatcgcaaaaagtcaggagagagtggagggaaaggtccaggtatccgtacttaaagggcaagtttacatcttgggacgagagagtcctctgtctctgtacaacgaagaattggtatccatgaacgtgcagggcgactacgagccaacagatgctacgggtttcataaatattaactccttgcgcctaaaggaatatcatagattgcagtcaaaggtgacagccaag

SEQ ID NO: 6902 - DNA, 1236 bp, synthetic construct
  misc_feature 1..1236: note = source = /note="Description of Artificial Sequence: Synthetic coding sequence"
  source 1..1236: mol_type = other DNA
atgagcagcaagggcagtgtagtattggcgtatagcggtggtctagacaccagttgtatcctcgtgtggctgaaagagcagggctatgatgtcattgcttatctggctaatatcggtcaaaaggaggacttcgaggaagcccgtaaaaaagccctaaagctgggcgccaagaaagtattcatcgaggacgtcagtagggaattcgtcgaagaattcatctggccagcgatacaaagttcggctctgtacgaagaccggtacctccttggcacctccctggcaaggccttgcattgcgaggaagcaggtcgagatagcccagcgggaaggtgccaaatatgtaagtcacggagccactggcaaaggtaacgaccaagtcaggtttgaactgtcttgctattccctggcaccacagataaaagtcatagctccctggaggatgcccgaattctataaccgtttcaagggtaggaatgaccttatggagtatgccaagcaacacggcattcctatacccgtaactccaaagaatccctggagcatggatgagaacctcatgcacatctcttacgaggctggaattctggaaaatccaaagaaccaagctccgcccggattatacactaagactcaggaccccgccaaagcccccaatactcccgacatcctagaaatagagttcaagaagggggtccctgtgaaggtaaccaacgtaaaagacggcactacacaccaaaccagtttagaactgttcatgtatttgaatgaagtggctgggaagcatggtgtgggaagaatcgatatagttgaaaatcgcttcataggcatgaagtcacgtggtatttacgagacccctgccggcaccattttgtatcacgcccacttagatatagaggcattcacgatggatagggaggtgagaaagatcaagcagggattaggattgaagttcgctgaacttgtttatacggggttctggcattcccccgagtgtgaattcgttcgacactgtatagctaagtcccaggaaagggtggaaggtaaagttcaagtgtccgttcttaaaggccaggtgtatatactgggtagggaatcacccctatccctgtacaacgaagaactggtgagcatgaacgtgcagggggactatgaacctacagacgccaccgggtttatcaatatcaattctctcaggcttaaggagtaccaccgcttacagtcaaaggtcacagcaaaa

SEQ ID NO: 6903 - DNA, 1236 bp, synthetic construct
  misc_feature 1..1236: note = source = /note="Description of Artificial Sequence: Synthetic coding sequence"
  source 1..1236: mol_type = other DNA
atgtcctccaaggggtcagtggtgcttgcctacagtggagggctggacacttcttgcatcctcgtttggctgaaggagcagggttatgacgtcatagcctatctggccaacatcggacaaaaagaagactttgaggaggcccgcaagaaagctctgaagctcggagccaaaaaagtcttcattgaggacgtgtcccgggaattcgttgaggagtttatctggccggcaattcagagctccgcattgtacgaggatcggtacctactcggcacctctttagctcgtccttgtatcgctaggaaacaggtggagattgcgcagagggaaggcgccaagtacgtgtcgcatggggccactggcaagggaaatgaccaggtacgcttcgagttatcttgttatagcttggcgccccaaatcaaggtgattgcgccttggagaatgcccgaattctacaatcgcttcaagggacgaaacgatttgatggagtatgcaaagcagcacggcataccaattcctgtgacccctaaaaacccctggagtatggacgaaaacctcatgcatatatcatacgaagccggtatcttggaaaacccaaagaatcaggcgccaccaggattgtacaccaagacacaggatcctgccaaggctcctaacactccagatattctggagatcgagtttaaaaaaggggtacccgttaaggtgacgaatgtaaaggacggaactacccaccagacttccttggagcttttcatgtatcttaacgaagttgccggcaaacacggggttgggcgaattgacattgtggagaataggttcatcggcatgaagtccagaggaatatacgaaactccagctggcactatcctctatcacgctcatctggatatcgaggcattcaccatggaccgggaagtgaggaagatcaaacaaggtctaggactgaagtttgctgagctggtttacactggattctggcacagcccagagtgcgaattcgtgaggcactgcatagctaagtcccaggagcgagtcgagggaaaggtgcaggtcagcgtgcttaagggacaagtgtatatcttgggacgggagagccccctgtctttgtataatgaagagctggtttccatgaatgtgcagggcgattacgaaccaacagatgcaactggctttatcaacatcaattctctgcggttgaaggagtatcaccggctacagtccaaagtaaccgccaag

SEQ ID NO: 6904 - DNA, 1236 bp, synthetic construct
  misc_feature 1..1236: note = source = /note="Description of Artificial Sequence: Synthetic coding sequence"
  source 1..1236: mol_type = other DNA
atgtcaagcaagggttccgtcgtgcttgcttactcgggcggacttgacacttcctgtatcctggtgtggctgaaggaacagggttacgatgtgattgcctacctcgcgaacattggacagaaggaagatttcgaagaagcccgcaagaaggcgctcaaactcggggccaagaaggtctttattgaagatgtgtcgcgagagtttgtggaagagtttatctggcctgcaatccaatccagcgcgctttacgaagatcgttaccttctcgggacttcgttggcaagaccctgcattgcaagaaagcaagtggaaatcgcacaacgcgagggggcaaagtacgtctcccatggtgcgaccggcaagggaaacgatcaagtgagatttgaactgtcatgctactccctggctccccagattaaagtcatagccccgtggcgtatgccagaattctacaaccggttcaagggtaggaatgacttgatggaatacgccaagcagcatggaatccctattcctgtgaccccaaagaacccgtggtcaatggacgagaatctgatgcacatatcgtatgaagcaggcatccttgaaaaccctaagaatcaggctcctcctggtctgtacacgaaaacccaagacccagcaaaggcacctaataccccagatatactggaaatcgaattcaaaaagggggtgcccgtcaaagttaccaatgtcaaagatggaaccacccatcaaacctcgcttgagttgtttatgtaccttaatgaggtggcaggaaagcatggagtgggaagaattgacattgtcgagaacaggttcattggcatgaagtccaggggaatatacgaaactccggctggtactattctgtaccacgcccacctggatattgaagcattcaccatggatagagaagtgaggaaaatcaagcaaggccttggtctgaagttcgccgagctggtctacactggattttggcactcccctgaatgtgaatttgtgcgtcattgcattgccaagagccaagaaagagtggaaggcaaggtccaggtgtcggtgcttaagggtcaagtctacattctggggagagaaagtcccctctcgctgtacaacgaagagctcgtctcgatgaatgtgcagggtgactacgagccaactgatgcaaccgggtttatcaatatcaactcattgagattgaaggagtaccaccgtctccagtcaaaagtgaccgcaaag

SEQ ID NO: 6905 - DNA, 1236 bp, synthetic construct
  misc_feature 1..1236: note = source = /note="Description of Artificial Sequence: Synthetic coding sequence"
  source 1..1236: mol_type = other DNA
atgtcctcaaaaggcagcgttgtccttgcttactccgggggccttgacaccagttgtatcctggtctggctcaaggagcaggggtatgatgtcatcgcatacttggcaaatatcggtcaaaaggaggatttcgaagaggctcgaaaaaaggctctaaagctgggggctaagaaagtttttatagaagacgtcagccgtgaattcgtggaagagttcatatggccagctatccaatcctccgcgctgtacgaggatcgctacttgctaggaacatccctggcccgaccctgtattgctcgtaagcaagtggaaatcgctcagcgggaaggggctaagtacgtttctcatggcgcaactggaaagggaaacgatcaggttcgctttgaactctcgtgctacagtctggcaccccagataaaggttatcgctccatggcgcatgcctgagttctacaatcgcttcaaaggtcgcaatgacctgatggagtatgcgaagcagcatggaatcccgattcccgtgacgccaaagaacccttggtctatggatgagaatctcatgcacatctcatatgaggctggaattctagagaaccctaaaaaccaagcccccccaggtctctacaccaaaacccaggatccagcgaaagccccaaatacccccgatatactggagattgagtttaagaagggcgtcccggtcaaagtgacgaatgttaaagacggcactacgcaccaaacatctttagagttgttcatgtacctcaatgaggtggccggcaagcatggtgtgggtcgtatcgatatcgtggaaaatcgttttataggaatgaagtcacgggggatttatgagaccccagcagggactatcctctaccacgcgcacctcgacattgaggcgttcacgatggatcgtgaagttaggaagataaaacaaggtctgggccttaagtttgcggagcttgtgtacaccggattctggcactcgccagaatgcgagtttgttcgccattgcattgccaagtctcaagaacgggtcgaaggtaaggtccaggtttctgtcctaaagggacaagtatatatcctcgggcgtgaatctcctctatcgttatacaacgaagaactagtctcaatgaatgtgcaaggcgattacgagcctactgacgctacgggttttattaatatcaactccctccggcttaaggaataccatcgccttcagtccaaagtcactgcgaaa

SEQ ID NO: 6906 - DNA, 1236 bp, synthetic construct
  misc_feature 1..1236: note = source = /note="Description of Artificial Sequence: Synthetic coding sequence"
  source 1..1236: mol_type = other DNA
atgtcctctaagggttcggtcgtcctggcgtactccggcgggctggataccagctgcattctcgtctggcttaaggagcagggctacgatgttattgcctatctcgccaacatcggacagaaggaagatttcgaggaggcccgcaagaaggccctcaagctgggcgcgaagaaggtgttcatcgaagacgtgagtcgcgagttcgttgaagaatttatctggcccgccatccagtcgtccgccctctacgaggatcgttacttgctgggtactagcctggcgaggccatgcattgcccgcaagcaggtcgagatcgcccagcgtgagggtgctaagtacgtctcgcacggtgctaccggaaagggcaacgatcaggtgcgtttcgagctaagctgctattcgctggccccccagatcaaggttatcgcgccctggcgtatgcctgaattttacaaccgattcaagggccgcaacgatctgatggagtatgccaagcagcacggaatcccgatccccgtcacgcccaagaacccttggagtatggatgagaacttgatgcatatctcctacgaagccggtatccttgagaatcctaagaaccaggcacctccgggcctgtacaccaagacccaagaccccgctaaggcccctaataccccggatattctggagatcgagttcaaaaagggagtccctgtgaaggtaactaacgttaaggacggcaccacccaccagactagccttgagctgttcatgtacttaaacgaggtcgccggtaagcacggcgtcggccgcatcgatattgtagagaatcgctttatcggtatgaagtctcgtggaatttacgaaactcctgcgggcacaattttgtaccatgcccacctggatatcgaagccttcacgatggatcgcgaggtccgtaagattaagcaaggcctggggctaaagttcgcggaactggtgtacaccggtttctggcactctcccgaatgcgagttcgtccgacactgcatcgcgaagtcgcaggagcgtgtcgaggggaaggttcaggtcagtgtgctcaagggtcaggtgtacatcctgggccgtgagtcgcctctctccctctacaacgaggagttggtcagtatgaacgtccagggtgactacgagcccacggatgctaccggcttcatcaacatcaactccctgcgtcttaaggaataccaccgcttgcagagcaaggttacggcaaag

SEQ ID NO: 6907 - DNA, 1236 bp, synthetic construct
  misc_feature 1..1236: note = source = /note="Description of Artificial Sequence: Synthetic coding sequence"
  source 1..1236: mol_type = other DNA
atgtcaagtaagggcagcgtggtgttggcgtacagcggtggtctggacacctcttgtatcctcgtctggctgaaggaacaggggtacgatgtcatcgcctacttggctaatatcgggcagaaggaagattttgaggaggctaggaagaaggctctgaaattgggagcaaagaaggtgttcatcgaagatgtgtccagagaatttgtggaagaattcatttggccggctatccagtcctcggctctgtacgaggaccgctacctgctggggacgtccctggccagaccgtgcatcgcccggaaacaggtggagattgctcaaagagagggcgccaaatacgtgtcgcatggagccaccggaaagggaaacgatcaagtgaggttcgaactcagctgctactcactggcgccgcagatcaaggtgatcgcgccatggcggatgcctgagttctataaccgcttcaaggggagaaacgacctgatggaatacgccaaacagcatggaatcccaattccggtgactccgaaaaatccctggtcgatggacgaaaacctcatgcacattagctacgaagccgggatcctcgagaaccccaagaaccaagcacccccaggattgtacaccaagacccaggaccctgccaaggcgccgaatacgccggacatcttggaaatcgaattcaagaagggagtgcctgtcaaggtcactaatgtgaaagatggaaccactcaccaaacgagcctggagctgttcatgtacctcaacgaggtcgccggtaaacacggagtggggcggattgatatcgtggaaaaccgcttcataggcatgaagagccggggcatctacgagacgccagccggaacgatcctctatcacgcccatctggatatcgaggcttttaccatggaccgggaggtccgcaagatcaagcagggactcggactcaagttcgccgagcttgtgtacaccggattttggcattcacctgagtgtgaattcgtgcgtcactgcatcgccaagtcgcaagagagagtcgagggcaaggtgcaggtgtccgtgctcaaaggacaagtgtacatccttggccgagagagcccgctttcactgtacaacgaggaactggtgtccatgaacgtgcagggggattacgaaccaacggacgccactggattcatcaacatcaactcattgcgcttgaaggagtaccacagactgcagtccaaggttacggcgaag

SEQ ID NO: 6908 - DNA, 1236 bp, synthetic construct
  misc_feature 1..1236: note = source = /note="Description of Artificial Sequence: Synthetic coding sequence"
  source 1..1236: mol_type = other DNA
atgtcaagcaaagggagcgtggttctcgcctatagtggcgggttggacacatcatgcatactcgtctggcttaaggagcaaggctatgatgtgatcgcctatctggccaatattggccagaaggaggattttgaggaagctcgaaagaaggcactcaagctgggcgctaaaaaggtcttcatcgaagacgttagccgcgagttcgtggaagagtttatttggcctgccatacaatcctctgctctctatgaggataggtatttacttggtaccagccttgccagaccatgcattgctcggaagcaggtcgagatagctcaaagggagggggccaaatatgtgtcacatggagccaccggcaaaggcaatgaccaggtacgcttcgaactgtcatgttacagtctcgctcctcagataaaagtgatagctccatggcgcatgccagagttttataatcgatttaagggacgcaatgatcttatggaatacgccaaacaacatggtatccccatccccgtcacgcctaagaatccctggtctatggatgaaaacttgatgcacatatcttatgaggccggtatcctggaaaatcccaaaaatcaggctccacccgggctgtacacgaaaacccaggatcccgctaaggcccccaacactccagacatactcgaaatcgagttcaagaaaggcgtgcccgtcaaggtgactaacgttaaggacggtaccactcaccaaactagtctggaactattcatgtatctaaacgaagttgccgggaaacacggcgtgggacggatagatatagtggagaaccgatttataggaatgaaatcacgaggtatctacgagactcctgccggcaccatcctttaccatgctcaccttgacatcgaggctttcacaatggatcgagaagttcggaagatcaagcagggacttggcctgaaattcgcagaacttgtgtataccggattctggcacagcccagagtgcgaattcgtccggcactgcatcgccaaaagtcaggaacgcgtggagggcaaagtccaggtgagcgtcctcaaaggccaggtctatattctgggcagagagtcccctctgtctctttacaacgaggaattggtttctatgaacgtccagggagactatgagccaacagatgccaccggctttatcaacatcaattcacttcgattgaaggaataccaccggctgcagagcaaagtgaccgccaag

SEQ ID NO: 6909 - DNA, 1236 bp, synthetic construct
  misc_feature 1..1236: note = source = /note="Description of Artificial Sequence: Synthetic coding sequence"
  source 1..1236: mol_type = other DNA
atgtcgtccaagggtagcgtggtccttgcatactcgggtgggctggatacttcgtgtattcttgtgtggctgaaggaacagggctatgatgtgatcgcatatcttgcgaatattggtcaaaaggaagatttcgaagaggctcgtaagaaggcccttaaactgggagctaaaaaggtgtttattgaggacgtgtcgagggagtttgtggaagaattcatttggccagccattcaatcgtcagcactgtacgaagatagatacctgctcggaacctcgctcgctcggccttgtatcgcgagaaagcaggttgaaatagcacaaagagagggagccaagtatgtctcacacggtgcaactggtaaagggaatgatcaagttcgtttcgaactttcgtgctactctcttgcaccacaaatcaaggtgattgcaccctggcgaatgcctgaattctacaaccggttcaagggtagaaatgatctcatggaatacgcaaagcaacacggtatacctatccccgtgacccctaagaacccatggtccatggacgagaaccttatgcatatttcgtacgaagctggtatcctcgagaacccaaagaatcaagcaccacctggactctacactaagacgcaggatcccgcaaaggcaccaaatacgccggatattctcgagattgaattcaagaagggcgttcccgtgaaagtgaccaacgtgaaggacggcaccactcatcagaccagtttggaactgttcatgtaccttaatgaagtggcaggaaagcacggcgtgggccggatcgacattgtcgaaaatcggtttattggcatgaagtctcgaggaatatacgaaactcctgcaggaaccattctctaccatgcacacctggatatcgaggcattcacgatggatcgggaggtgcgtaagattaaacaggggctgggcctcaaatttgcggaactggtctacaccggattctggcattcccctgagtgtgagttcgtccgccattgcatcgcaaagagccaggaacgggtggagggaaaagtgcaagtgtctgttctgaaaggtcaggtttacatcctcgggagggaaagcccactttccctgtacaacgaagaactggtttcaatgaacgtgcaaggggactacgaacccactgacgccactggcttcattaacattaactcgcttagacttaaggaataccatcgcctgcagtcaaaagtgaccgccaaa

SEQ ID NO: 6910 - DNA, 1236 bp, synthetic construct
  misc_feature 1..1236: note = source = /note="Description of Artificial Sequence: Synthetic coding sequence"
  source 1..1236: mol_type = other DNA
atgtcaagcaagggctctgttgtgctggcatatagcgggggtctggacacaagttgcatcctagtctggctgaaggaacagggctacgacgtgatcgcgtatctggccaatatcggtcaaaaagaggacttcgaagaggcacggaagaaagcactgaaacttggagcgaagaaggttttcatcgaggatgtctctagggagtttgtcgaggagttcatctggcctgcaatccagagttccgcgctgtacgaagacaggtacctccttggaactagcctggcccgtccttgcatcgctcgaaagcaggtggaaatcgcgcagcgcgaaggcgcgaaatatgtttctcacggggctaccggtaaaggtaacgaccaagttcgtttcgagttatcctgttactcactggccccccagatcaaggtaattgctccatggagaatgccagaattttacaacagattcaaaggacggaacgaccttatggagtatgccaaacaacacggcattcctatcccagtgactccgaaaaacccttggtcgatggatgagaacctcatgcacatttcctatgaggccggcattcttgaaaacccaaagaatcaagccccgcccggtctctacactaagactcaggatccggccaaggcacctaacacccctgacattctggaaatcgaattcaagaaaggggtacccgtcaaggtgaccaatgtgaaggacggaaccacacaccagacatccttggagctctttatgtatctcaacgaagtggccggaaagcatggcgttgggaggatcgacatcgtggagaataggtttattgggatgaaaagccgggggatctatgaaaccccagccgggacaatcttatatcacgctcatctggacattgaagcgtttaccatggatagggaggttcgcaaaatcaagcaggggctgggcctcaagtttgcagaactggtatatactggattctggcactcgcctgagtgcgagttcgtacgccactgcatagcaaagagtcaagaacgggtcgagggcaaagttcaagtaagtgtcctcaaggggcaggtctacatcttggggagggagagccctctgtccctgtataacgaagaattggtgagcatgaatgtgcagggggactatgaaccaaccgacgccaccggctttatcaacattaactccttgagacttaaagaataccacagacttcaatccaaggtgaccgccaag

SEQ ID NO: 6911 - DNA, 1236 bp, synthetic construct
  misc_feature 1..1236: note = source = /note="Description of Artificial Sequence: Synthetic coding sequence"
  source 1..1236: mol_type = other DNA
atgtcatctaagggaagcgttgtgttggcttacagcgggggccttgacactagctgcatcctggtgtggttaaaagagcaggggtacgacgtaattgcataccttgctaacatcgggcagaaggaagattttgaagaagcaagaaaaaaggccctcaagctgggggccaaaaaggtgttcattgaggatgtttcccgcgagttcgttgaggaattcatttggcctgcaattcagagttctgcactatatgaagatcggtacctgctggggacttccctagcgcgcccgtgcatcgcacgcaagcaggtggagattgctcagagggaaggcgcaaagtacgtgtctcatggtgctactgggaaaggcaacgatcaagtgagattcgaactgtcctgttacagtctcgctccccaaattaaagtcattgcaccctggcggatgcctgagttctacaaccgatttaaagggagaaatgacttgatggagtacgccaagcagcacggtatccctatcccggtaactcccaaaaatccttggtcaatggacgagaacttgatgcatatctcctatgaggccggtatcctggagaaccctaagaatcaggcaccaccaggcctgtacacaaagactcaggatcctgcaaaggcgccaaatactcctgatattctggagatagaattcaaaaagggggtgcctgtgaaggtgacaaacgtgaaagatgggactacccaccagacctcactggaactcttcatgtatctgaacgaggtcgcaggaaaacacggcgtgggacgcatcgacattgtagagaatcgcttcattgggatgaaaagcaggggtatttatgaaacccccgcaggcaccatcctgtatcacgcacacctcgacatcgaagccttcaccatggacagggaagtccgaaaaataaagcagggactgggattaaaatttgcggagctggtttataccgggttctggcacagcccagagtgtgaatttgtcaggcactgtatagctaaatctcaggagcgggtcgaagggaaagttcaggtgtccgtgctaaaaggacaggtgtatatcctggggcgggaaagcccactgagcctatataatgaggagttggtatcgatgaatgtgcagggcgattacgaaccaaccgatgccacaggatttatcaatattaatagtctccgacttaaagagtaccatagattgcagtctaaggtcaccgccaaa

SEQ ID NO: 6912 - DNA, 1236 bp, synthetic construct
  misc_feature 1..1236: note = source = /note="Description of Artificial Sequence: Synthetic coding sequence"
  source 1..1236: mol_type = other DNA
atgagctctaagggaagcgtggtcctcgcctatagcggcggactggacaccagctgtatattggtttggctcaaggagcagggctacgacgtgattgcctacttagccaacataggccagaaagaagacttcgaagaggcacgtaaaaaggctctaaaactaggggctaagaaggtcttcatcgaggacgtgtctcgagaatttgtggaggaattcatttggcctgctatacagtctagcgccctgtatgaggacaggtacctgctcggcacttcactggctaggccttgtatagcaagaaagcaagttgagattgctcagcgcgagggcgccaagtatgtctcccacggcgctaccggaaaaggaaatgaccaggtccggttcgagttgtcttgctattcactggcccctcagatcaaggttatcgctccctggaggatgcctgagttctacaaccgcttcaagggccgtaacgatctgatggaatatgctaagcagcacggcattcctattccagtgactccaaagaacccatggtccatggacgaaaacctgatgcatattagttatgaagctgggatcctggaaaatcccaaaaaccaagccccacctgggctttacactaagacacaagatcccgccaaggctcctaatacaccagacatactggagattgagtttaaaaagggggtgcccgttaaggttaccaacgtcaaagacgggactacacaccagacttccttagaactgtttatgtacctgaacgaagtcgccggcaagcacggcgtagggaggatagatatcgtggaaaatcgattcattggcatgaaatcccgggggatatatgaaacccccgccggaacaatcttgtatcacgcccatctggatatagaggcctttacaatggatcgggaggtccggaaaattaagcagggtttgggtctaaagttcgctgaactggtgtatactggattctggcacagccctgagtgcgaatttgtgaggcactgcatagccaagagccaagagcgagttgaagggaaggtacaagtgagcgtgctgaaaggtcaggtgtacatactcggcagggaaagccctctgagcctttacaatgaggaactggtttcaatgaatgtccaaggggactacgaacccacagatgcaaccggctttatcaacattaattccctgcggctcaaagaatatcaccggctgcagagcaaagtgacagcaaaa

SEQ ID NO: 6913 - DNA, 1236 bp, synthetic construct
  misc_feature 1..1236: note = source = /note="Description of Artificial Sequence: Synthetic coding sequence"
  source 1..1236: mol_type = other DNA
atgagcagcaagggtagcgtcgtgttggcctactcaggcggacttgacacttcgtgcatcctggtgtggctcaaagagcaaggatacgacgtcatcgcctaccttgccaacatcggccagaaggaggacttcgaggaagcccgcaagaaggcccttaagctgggagccaagaaggtgttcatcgaggacgtgtcacgcgaattcgtcgaggaattcatctggccagcgattcaatcaagcgccctctacgaagatcgctacctgctcgggacctctctggcgcggccgtgcattgctagaaagcaagtcgaaatcgcacagcgcgaaggcgcgaagtacgtctcccatggggcgaccggaaagggaaacgatcaggtcaggtttgaactttcgtgctactcgctggctccgcagatcaaggtcatcgcgccgtggaggatgcctgagttctacaaccggttcaaaggacgcaatgacctcatggaatacgccaagcagcacggtatcccgattccagtcactccgaagaacccgtggagcatggatgaaaatctgatgcacatttcgtacgaagccggtatcctcgaaaacccaaagaaccaagccccaccgggcctgtacaccaagacccaggaccctgcaaaagcgcctaataccccggacatcctggagatcgagttcaagaagggtgtgcctgtgaaagtcacgaacgtcaaggacggcactacccatcagacctcgctggagcttttcatgtacctgaacgaagtggcagggaagcacggagtggggagaatcgacattgtggagaatcgcttcatcggaatgaagtcccgcggcatttatgaaactccggctggtacgatcctgtaccacgcgcacttggacatcgaggccttcaccatggacagagaggtgcggaagattaagcaaggcctgggtcttaagtttgctgagctggtgtacacgggcttttggcattcgcctgagtgcgaatttgtcaggcattgcattgcaaagtctcaagaaagagtcgagggaaaggtgcaagtgtccgtgctgaagggacaagtgtacatcctgggtagggaaagccccctgagcttgtacaacgaggagctggtgtcgatgaatgtgcagggagattacgagccgaccgatgcgactggatttatcaatatcaattcgctccggctgaaagaataccacagactgcaaagcaaggtcaccgccaag

SEQ ID NO: 6914 - DNA, 1236 bp, synthetic construct
  misc_feature 1..1236: note = source = /note="Description of Artificial Sequence: Synthetic coding sequence"
  source 1..1236: mol_type = other DNA
atgtcctcaaaaggatcagtggtccttgcgtactctggtggacttgacacgagttgcatcctcgtctggcttaaagagcaaggatatgatgtcatcgcttatttagccaacatcggtcaaaaagaagactttgaagaggcccgcaaaaaagcgttaaaattaggcgcgaaaaaagtgtttatcgaagacgtgagccgtgaatttgtagaagaattcatttggccggctattcagtcttcagccttgtacgaggataggtacctgttaggaacgtcactagcaagaccgtgcattgcaagaaagcaggtggagatcgcccagcgggaaggcgcaaagtacgtcagccacggcgctacgggaaaaggcaatgatcaggtgcgctttgagttgtcctgctattcactggctcctcagattaaagttatcgcaccgtggagaatgccggaattttataatcgtttcaaaggtcgcaacgatttaatggaatatgctaaacaacatggaattcctattccggtcaccccaaagaatccgtggtccatggatgaaaatcttatgcatatttcatatgaagcgggaatacttgagaacccaaagaatcaggccccgcctggcctttacacaaaaacacaggacccggcgaaagcacccaacactccagatatattagagatcgaattcaaaaaaggtgtccctgtaaaagtaacgaatgttaaggatggaacaacacatcaaacttcattagaattatttatgtatttgaatgaagtcgcgggaaaacatggcgtgggaagaattgatatcgtagaaaatcgctttataggaatgaaatctcgggggatttatgaaaccccagctggaaccatcttataccatgcacatctcgatattgaagcttttacaatggatcgcgaagtacgtaagattaaacaaggattgggtttaaaatttgctgaactcgtttatacgggtttttggcattcacccgaatgtgagtttgttcgtcattgtattgcaaaatctcaagaacgagttgaagggaaagtccaggtttcagtccttaaaggacaggtttacattttgggacgtgaatcaccactgtcgctctataatgaagaattggtttcaatgaatgttcagggcgattatgaacccacggatgctacgggattcattaacatcaactctctccgtttaaaagaatatcacaggctccaatccaaagtcactgccaaa

SEQ ID NO: 6915 - DNA, 1236 bp, synthetic construct
  misc_feature 1..1236: note = source = /note="Description of Artificial Sequence: Synthetic coding sequence"
  source 1..1236: mol_type = other DNA
atgtcctctaaagggtcagtagttttagcctactcaggaggcttggatacctcctgtattctcgtgtggcttaaggagcaaggctatgatgtcatagcctatcttgctaatatcggacaaaaggaagatttcgaagaagcccgtaagaaagcactgaaattgggggctaaaaaagtattcattgaggatgtgtcacgcgaatttgtggaagaattcatctggcctgccattcagagttccgcattgtacgaagaccgatatctgttgggaacatcgctggctcgtccatgtattgctcgaaaacaagtggaaatcgcacagcgagagggagctaagtacgtttcacatggagctacgggaaagggaaatgatcaggtaagatttgagttgtcttgttattcattagcgcctcaaattaaagtgattgcaccatggagaatgccagaattttataatcgattcaaaggacgaaatgacttgatggagtatgcgaaacaacatggaattcccattccagttaccccaaaaaatccatggtccatggacgaaaatctcatgcatatatcatacgaagcaggaattctcgagaatccaaagaatcaagccccgccaggtctctatactaaaacccaggatccagctaaagctccgaacacccctgacatattggaaattgaatttaaaaagggagtaccagttaaggttacaaatgttaaggacggaactacacatcaaacgtccttggaactttttatgtatttaaacgaagttgcaggaaaacatggagttggccggatcgatatcgttgaaaaccgttttattggtatgaagtctcgtggaatctatgaaaccccggcaggtactatcctgtaccacgctcatcttgacattgaagcgtttactatggatcgagaggttagaaaaatcaaacagggactcgggctcaagttcgcagaattggtgtatacgggtttttggcacagtcctgaatgtgagtttgtccgacactgcattgcaaaatctcaagagcgcgttgaaggaaaagtccaagtgtcagtgttgaagggccaagtttatatattgggacgcgagtcgccactatcattgtacaatgaagagttagtttccatgaacgtccaaggagattacgagccaacagacgcaacaggatttataaatattaattctctacgactcaaggaatatcatcgcctccaatcaaaggtcactgctaaa

SEQ ID NO: 6916 - DNA, 1236 bp, synthetic construct
  misc_feature 1..1236: note = source = /note="Description of Artificial Sequence: Synthetic coding sequence"
  source 1..1236: mol_type = other DNA
atgtcatcgaaaggctccgtggtcctcgcatacagcggtggtctggataccagctgtattctcgtgtggctcaaagagcaaggatacgacgtgatagcttacctggcaaacataggtcagaaggaagattttgaggaggcgcgaaagaaagccctgaagttgggtgcaaagaaggtgtttattgaggacgtgtcccgtgagttcgttgaggagttcatctggcctgcaatacaatcctcagcactttacgaagatcggtacctcctcgggacttcgcttgccagaccgtgtatcgcacgaaaacaggtcgaaatcgcacagagagaaggagcaaagtacgttagccacggggcaaccggaaagggaaacgatcaggtgcgatttgaactttcgtgttactcccttgctccacagattaaagtcatcgcaccttggcggatgcctgaattctacaacagattcaagggccgtaacgatctgatggaatacgcaaagcagcacgggattccaattcccgtgactccgaagaatccctggtcgatggatgagaacctgatgcatatttcgtacgaggctggaatccttgaaaatcccaagaatcaagcacctcccgggctgtataccaaaactcaagaccctgccaaggcgcctaacacccccgatattcttgagattgaattcaagaagggcgtgcccgtgaaggtgaccaacgtgaaggatggaaccacccatcagacgtctctggaacttttcatgtacctgaatgaggtggcaggtaaacatggtgtgggaaggattgatatcgtggagaacaggtttatcggtatgaaatcgaggggtatctacgagactcctgcagggaccatcctttaccacgcacatttggatatcgaggctttcactatggatcgggaagtgagaaagatcaaacaaggacttggactgaagttcgccgagctggtctacactggtttctggcactcacccgagtgtgagtttgtcagacactgtattgccaagagccaagaacgtgtggagggaaaggtgcaagtgtccgtgttgaaagggcaggtctacattctcggacgcgaatcacctctgtcgctgtacaacgaagagctggtcagcatgaacgtgcagggagactacgaacctaccgatgctactgggtttatcaacattaactccctccgcttgaaggaatatcatcgacttcaaagcaaggtgactgcgaag

SEQ ID NO: 6917 - DNA, 1236 bp, synthetic construct
  misc_feature 1..1236: note = source = /note="Description of Artificial Sequence: Synthetic coding sequence"
  source 1..1236: mol_type = other DNA
atgtcctccaaaggcagcgtggtgctggcatacagcggaggactggacacttcgtgtatcctggtctggcttaaggaacaaggttacgacgtgatcgcctacctggctaacatcggccagaaggaagatttcgaggaagcgcggaagaaagcactgaagctgggtgccaagaaggtgttcatcgaggatgtctcacgggagtttgtggaggagttcatctggcccgccattcagtcgagcgctctgtacgaagataggtaccttctgggaaccagtctcgcgaggccttgcatcgcgagaaagcaagtggagatcgcccagcgcgaaggggccaagtacgtctcccacggagctactggcaaggggaatgaccaggtgcgcttcgagctgagctgctacagcctggccccgcagatcaaggtgattgccccatggcgcatgccggagttttacaatcggttcaagggacgcaacgaccttatggagtacgcgaagcagcacggaatcccgatcccggtgactcctaaaaacccgtggtccatggatgagaatctgatgcatatctcctacgaggccgggatcctcgaaaaccccaaaaaccaagcacccccgggactctacactaaaacccaggacccagctaaggccccgaacactccggatatccttgaaatcgaattcaaaaagggggttccggtgaaggtgactaacgtgaaggacggaaccacccatcagacctccctggaattgtttatgtacctgaacgaagtcgctggaaaacacggagtcggacggatcgacattgtagagaacagattcatcgggatgaagtcgaggggaatctacgaaaccccagcaggtactattctgtaccatgcccaccttgatatcgaagcattcaccatggatcgggaagtgaggaagatcaaacaaggactgggcctcaagttcgccgagttggtgtatactggcttctggcactccccagaatgcgaattcgtgagacactgcatcgccaagtcgcaggagagggtggagggaaaagtgcaggtgtccgtgcttaagggccaggtgtacattctggggcgggagtcgcccctcagcctgtataacgaggaactggtttcgatgaacgtgcagggagattacgaaccaaccgacgcgactggcttcattaacatcaatagcctgcgccttaaggagtatcataggctccaaagcaaggtcacggccaaa

SEQ ID NO: 6918 - DNA, 1236 bp, synthetic construct
  misc_feature 1..1236: note = source = /note="Description of Artificial Sequence: Synthetic coding sequence"
  source 1..1236: mol_type = other DNA
atgtcttctaaaggatcagtggtgctcgcctattccgggggcctggacacatcctgtatactggtgtggctgaaagagcaggggtacgatgtgatcgcttacctggctaatattggtcaaaaggaagactttgaagaggctcgcaaaaaggctttaaaactgggcgcaaaaaaggttttcatcgaggacgtctcacgggaatttgtggaggagttcatctggcctgccatccagagctccgcattgtacgaggaccggtacctgctgggcacgagccttgcccggccctgcattgcccgcaaacaagtggagattgcccagcgagaaggcgccaagtatgtgagtcacggtgctaccggaaaaggcaatgaccaagtgaggttcgagctgtcatgttactctctcgctcctcagattaaagtgattgctccctggcggatgcccgagttctataatcgatttaaagggaggaatgatttgatggagtatgccaagcagcacggcatacccatcccagtgaccccgaagaatccttggtcaatggatgagaacctgatgcacatttcttacgaagccggcattctggagaatcccaagaaccaagcacccccgggcctttatactaagacccaggaccctgccaaggctcccaacaccccagacatattggagatcgaatttaaaaaaggcgtgcccgtgaaagtgaccaacgtgaaagacggcactactcaccaaaccagtctggaattgttcatgtacctcaacgaagtggccgggaagcacggcgttggtaggatagatatagtggagaacaggttcatcggtatgaagagtcggggaatttacgagaccccagccggaactatactttaccacgctcatcttgacatagaggcctttactatggacagggaggtccgaaaaataaagcaagggttgggattaaagttcgccgagctggtgtacaccgggttctggcactcaccagagtgcgagttcgtacgtcattgcatcgccaagtctcaagagagagtggaagggaaagttcaggtcagtgttctgaaagggcaggtgtacatcttgggcagagaaagcccactcagcctctacaatgaggaattggtatctatgaatgtgcagggcgactacgaacccactgacgctacagggttcataaatattaacagtcttaggctcaaggaatatcataggctgcaaagtaaggtgaccgctaaa

SEQ ID NO: 6919 - DNA, 1236 bp, synthetic construct
  misc_feature 1..1236: note = source = /note="Description of Artificial Sequence: Synthetic coding sequence"
  source 1..1236: mol_type = other DNA
atgtctagtaagggatctgtcgttttggcttatagtggaggtctggatacctcatgcatcctggtctggctcaaagaacagggatacgatgtgatcgcatacctggccaacatcggccaaaaggaagattttgaagaggccaggaagaaggcgctgaagttgggagcaaagaaggtattcatcgaggatgtgtcaagagagttcgtagaggaatttatctggccggctattcagagctccgctctctacgaagacagatacctgctcggaaccagcctcgcaaggccatgcatcgctcgcaaacaggttgagattgcccagcgcgagggtgctaaatacgtgagccacggcgccactggcaaaggtaacgaccaggtcaggtttgaattgtcatgctacagcctggctccccaaattaaagttatcgcgccgtggaggatgcctgaattctacaacaggttcaagggcaggaatgacttgatggaatacgccaaacaacatggaatcccaattccagtaacacccaaaaacccatggtcaatggacgagaacctcatgcacatatcctacgaggcaggtatccttgagaaccctaagaaccaggccccacccggcctgtacaccaaaactcaggatcctgctaaggcccccaacactccggacatcctcgagatagaattcaagaagggagtgccggtgaaggtgaccaacgtgaaggatggcaccacacaccagacttccttggagctgttcatgtatctcaacgaggtcgcaggtaagcacggtgtcggacgcatcgacatagtggagaacaggttcataggcatgaagagtagaggtatctacgaaactcctgccggaacaattctttaccatgcccaccttgatatcgaggccttcactatggatagggaagtaaggaagatcaaacagggtctgggcctgaagtttgccgagctcgtctacaccggcttttggcattctcctgaatgcgaattcgttcgccactgcatagccaagagtcaggaaagagtagagggaaaggtgcaagtgtccgtgctgaagggccaagtgtatatcctgggcagggagagcccactgagcctgtacaacgaagagctggtgtcaatgaacgtacagggtgattacgaaccgacagatgccacgggattcatcaacataaatagcctgcgcttgaaggaatatcacagactccagtcaaaggtgaccgctaag

SEQ ID NO: 6920 - DNA, 1236 bp, synthetic construct
  misc_feature 1..1236: note = source = /note="Description of Artificial Sequence: Synthetic coding sequence"
  source 1..1236: mol_type = other DNA
atgtccagtaaaggaagtgttgtgttagcgtactcaggggggttggatacatcttgcatattagtttggctaaaggaacagggatatgatgtcatagcctacttggcaaacatagggcagaaagaagatttcgaagaagctcgaaaaaaggccctcaaactaggggccaaaaaagtttttattgaagatgtttcccgcgaatttgtagaagaattcatatggcccgccatccagagttcggctctctacgaagatcggtatctgctgggaacttctttagcccgcccatgtatcgcccggaagcaggtggagatcgcacagagagagggggccaaatatgtgtctcatggggctacaggaaaagggaatgaccaggtccggtttgaactttcctgttattctctcgctcctcaaatcaaggtgattgcaccatggagaatgcctgagttctacaaccggtttaaaggaaggaatgacctcatggaatacgctaaacagcatgggatacccattcccgtcactcccaagaatccatggtcgatggatgaaaatctcatgcacatatcttatgaagccgggatactagaaaatcccaaaaaccaggctcctcctggactttacactaaaactcaggatcccgccaaagcacccaatacacctgatattcttgaaattgaattcaaaaaaggagtacctgtaaaagtgacaaatgtgaaagatggaactacacatcagacttcattagaactgtttatgtaccttaatgaagttgcgggaaaacacggagtggggaggatcgatatagtagaaaaccggtttattggaatgaaatctagggggatctatgaaacacctgctgggactatcctgtatcacgcacacttggacattgaagcctttactatggatcgagaggtgcggaaaatcaaacaggggctggggctgaagttcgccgagctggtatatactggattctggcattcacccgagtgtgagttcgtcagacactgtatagccaaatcccaggaacgcgttgaaggaaaagtccaggtgagtgtcctcaaagggcaagtgtatattttagggagagaatcccccctatcactgtacaatgaggaactagtgtctatgaatgttcagggagattatgaacctactgatgctactggattcataaacattaactctctaaggctcaaagaataccataggttacagagtaaggtcactgccaag

SEQ ID NO: 6921 - DNA, 1236 bp, synthetic construct
  misc_feature 1..1236: note = source = /note="Description of Artificial Sequence: Synthetic coding sequence"
  source 1..1236: mol_type = other DNA
atgagttccaaggggtctgtggtgctggcctactctgggggcttggatacaagctgcatcctggtttggctcaaggagcaaggctacgatgttatagcgtatctcgcaaacatcggtcagaaggaagatttcgaggaggctagaaaaaaagcgctgaaactgggcgctaaaaaagtgtttatcgaggatgtcagtcgagagttcgtagaagaattcatctggccagctatccagagcagcgcgctctacgaggatcgatatctgttgggtacttccttggcccgcccctgcatcgctagaaaacaggtggaaatagcacagagggagggagcaaagtacgtgtcccacggagccacaggaaagggcaacgaccaggtgcggtttgaactttcttgctactccttggcgccccagattaaggtcatcgcgccttggagaatgcctgagttctacaaccgattcaagggaagaaatgatcttatggagtacgcgaagcagcacgggatcccaattccagtaacccccaagaacccatggtcaatggacgagaaccttatgcacatctcatacgaagccggcatactggagaatcccaagaatcaggcgccacctggtctgtatacgaaaacccaggatccggctaaggctcctaatacccccgacatcttggaaattgagttcaaaaagggagtacccgtgaaagtgacgaatgttaaagatggaaccactcaccaaacttcactggagctgttcatgtacctcaacgaggtggctgggaaacatggggtgggaaggattgacatagtcgaaaaccgcttcatcggaatgaagagccgcgggatttatgagaccccggctggcaccatcctgtaccatgcacacctcgatattgaagcttttactatggacagggaggtcagaaaaatcaaacagggactcgggttgaagtttgccgaactcgtgtatacaggtttttggcacagccccgaatgcgagttcgtgaggcactgcatcgcgaagtctcaggagcgcgtcgaggggaaggtccaagtgtccgttttgaaggggcaggtttacatactggggcgcgagtcccccctctcactgtacaacgaagagctcgtctctatgaatgtgcagggcgactacgagcctacagacgccacaggcttcatcaatatcaactctctccgcctgaaagaatatcatcggctgcagagcaaggtgactgccaaa

SEQ ID NO: 6922 - DNA, 1236 bp, synthetic construct
  misc_feature 1..1236: note = source = /note="Description of Artificial Sequence: Synthetic coding sequence"
  source 1..1236: mol_type = other DNA
atgtcgtccaagggctcagtcgtcctcgcttatagcggcggcctagacacaagttgcattcttgtttggctgaaggaacaggggtacgacgtcatcgcataccttgccaacatcggacagaaggaggacttcgaggaggcacggaagaaagccttaaaactcggcgcaaaaaaggtctttatcgaggacgtgagtagggaattcgtcgaggaatttatctggcctgccatccagagctccgcactatacgaggacagatatctgcttggaacttctttggctagaccctgtattgccagaaaacaagtggaaattgctcaacgggaaggtgcaaaatacgtctcccatggcgcgaccgggaaaggcaatgaccaggtgaggttcgaactgtcgtgctactctctggcaccccagataaaggtgatcgcaccctggcgaatgcccgagttttataaccgttttaagggccgtaatgacctcatggagtacgccaagcagcatggtatacccattccagtgacccccaaaaacccctggtcaatggatgaaaaccttatgcacattagctatgaagcagggatcctggagaacccgaagaaccaggcccctcctggcctgtacaccaaaacccaggatccagctaaggcacctaatactccagatatcctcgagattgagttcaagaagggggttccggtgaaggttactaatgtgaaagacggtaccacacaccagacttccttggagcttttcatgtacttgaatgaggtggccgggaaacacggtgtgggacgcatcgatattgtggagaacagatttataggtatgaagtctcgcggcatctacgagactcctgctggcactattctgtatcacgcacacttagatattgaggcttttacaatggacagggaggtgagaaaaataaagcaggggctggggctcaagttcgccgagctggtttatacgggattctggcacagtccagagtgtgaatttgtgcgccattgtatcgccaagagtcaagagcgtgttgagggtaaggtgcaggtctccgtgctgaaggggcaggtttatatccttggaagagagagtcccctttccttgtataacgaagagctggtctccatgaatgtgcagggggattacgagccaacagatgcaactggctttatcaatattaactcattacgactgaaagagtaccatcggctgcaatccaaagtcacggccaaa

SEQ ID NO: 6923 - DNA, 1236 bp, synthetic construct
  misc_feature 1..1236: note = source = /note="Description of Artificial Sequence: Synthetic coding sequence"
  source 1..1236: mol_type = other DNA
atgtcaagcaagggttcggtggtgcttgcatattccggaggacttgatactagctgtattctcgtgtggctgaaggaacaagggtacgacgtcatagcatacctcgccaatattggtcagaaggaagattttgaagaagccaggaagaaggcactcaaacttggagcaaaaaaggtgtttatcgaagatgtgtcccgcgaatttgtcgaggagttcatctggccggcgattcaatcgtctgcactgtacgaagatcgatacttgctcggtacttccctggctcgcccctgtattgccagaaagcaagtggaaattgctcaaagagaaggagcaaagtacgtgagccacggggcaacggggaagggtaatgatcaggtccggtttgagcttagctgctattcactggcccctcagattaaggtgattgcaccctggcgtatgcctgagttttacaatcgattcaagggcaggaatgacttgatggaatacgcaaaacagcatggcatcccgattccggtgactcccaagaacccttggtcgatggatgaaaatctgatgcacatttcatacgaagcaggtattcttgagaaccctaagaaccaagcaccacctgggctctacactaagactcaagatccagcaaaggcacccaatacccccgatattctggagatcgaattcaaaaaaggcgtccctgttaaggtgactaacgtgaaagacggaaccacccaccagacctcgctggaacttttcatgtacctgaacgaggtggcaggaaagcatggagtgggacggatcgacattgtggaaaacaggttcatcggtatgaagagccgagggatttacgagactccagcaggcactatcctgtaccacgcacacctggatattgaggcatttactatggatcgcgaagtcaggaagattaaacaagggctgggactgaaattcgcggaactcgtctataccggattctggcattcaccagaatgtgagtttgtgagacattgtattgctaagtcgcaggaaagagtggaaggaaaggtgcaagtgtcggtgcttaagggacaagtgtacattcttggacgggagtccccactttcactgtataacgaggaactggtgagcatgaacgttcagggagactacgagcctaccgacgctactggattcataaacattaacagcctcaggctgaaagagtaccataggctgcaatcgaaggtgaccgccaag

SEQ ID NO: 6924 - DNA, 1236 bp, synthetic construct
  misc_feature 1..1236: note = source = /note="Description of Artificial Sequence: Synthetic coding sequence"
  source 1..1236: mol_type = other DNA
atgtcgtccaagggaagcgtggtgcttgcatactcaggtggcctggacacttcttgtattctggtgtggttgaaagaacaaggctacgacgtgatcgcttacctcgcgaacattggtcagaaggaggacttcgaagaggccaggaagaaggcactgaagttgggggcaaagaaagtgttcatcgaggatgtctcccgggagttcgtggaggaattcatttggcctgccattcagagctccgccctgtatgaggatcgctacctgctgggcacttcgcttgcgcggccgtgcatcgcccgcaagcaggtcgaaattgcacaaagggaaggagcaaaatacgtctcacatggagccactggaaaaggaaatgatcaggtccggttcgagctgtcatgttacagcctggcgccacagatcaaggtgatcgccccgtggcgaatgccggagttctacaatagatttaagggacggaacgacctcatggaatacgccaagcaacacggaatcccgatcccggtgaccccgaaaaacccgtggtctatggacgaaaatctcatgcatatcagttacgaagccgggatcctggaaaatcccaagaatcaagcacctccgggactgtatactaagacccaggatccggcgaaggcgccaaacaccccggacatcctggaaattgaattcaaaaagggtgttccggtgaaggtgactaacgttaaggacggaactactcaccagacctccctcgagctgttcatgtacttgaacgaagtcgccggaaagcatggagtgggacggatcgacatcgtcgagaaccggttcatcggtatgaagagcaggggcatttacgagactccggcgggtaccatcctgtaccatgcacacctggatatcgaagcctttaccatggaccgcgaagtgcggaagatcaagcaggggctgggcctcaagttcgcagagctggtctacactggcttttggcacagccccgagtgcgaatttgtccgtcactgcattgctaaatctcaggaacgggtggagggtaaggtccaagtctcggtcctgaaagggcaggtgtacatcctgggtcgggaatcaccactctccctgtacaacgaagagctggtgagcatgaacgttcaaggagattacgagccaactgacgccactggattcatcaacataaactccctgcggttgaaggaataccaccgactccagtcgaaagtgaccgccaaa

SEQ ID NO: 6925 - DNA, 1236 bp, synthetic construct
  misc_feature 1..1236: note = source = /note="Description of Artificial Sequence: Synthetic coding sequence"
  source 1..1236: mol_type = other DNA
atgtcgtccaaggggagcgtggtgttggcctactcaggtggtcttgatacctcgtgcattcttgtctggctgaaggaacagggatacgatgtgattgcatacctggcaaacataggtcagaaggaagattttgaagaagcacgcaaaaaagcactcaagctcggagcaaaaaaggtgtttatagaagatgtgtcgcgggaatttgttgaagagtttatctggccagcaatccaatcatcagccctttatgaggaccggtatctgcttggaacttcgcttgcgaggccttgcatcgctcggaaacaggtcgaaattgcccaaagagaaggtgctaagtacgtgagccacggagccaccggaaagggcaacgatcaagtccgatttgagctttcgtgttacagcctggcaccgcagataaaagtgattgccccttggcgaatgcctgagttttacaacagattcaaaggacggaatgatctcatggagtacgcaaagcaacatggaattcccattccagtgacccctaagaatccctggtcaatggatgagaacctgatgcatatatcatacgaagctgggattttggaaaatcctaagaatcaggcgccaccgggactgtacactaagactcaggatccagcaaaggcaccgaatacccccgatattcttgaaattgagtttaagaagggcgtcccagtgaaggtcactaacgtcaaggatggcactacccatcaaacctcccttgagctgttcatgtaccttaacgaggtggcagggaagcatggtgtgggtcgtatcgacatcgtggagaaccggttcatcggaatgaagtcgagaggcatctacgaaacccccgctggaaccattctgtaccacgcccacctggacatcgaagcatttaccatggaccgggaagttcggaagataaaacaaggcctgggacttaagtttgccgaactggtgtacactggattttggcactcgcctgaatgtgaattcgtgcgccattgtattgccaaatcgcaggaaagggtggagggaaaggtgcaggttagcgtgcttaagggccaagtgtacattcttggacgtgaatccccgttgagcctctacaatgaagaactcgtgagcatgaatgttcaaggagactacgagcccacggatgcaactgggttcataaacattaactcgctgcggctgaaggagtatcaccgcctgcagagcaaagtcaccgccaag

SEQ ID NO: 6926 - DNA, 1236 bp, synthetic construct
  misc_feature 1..1236: note = source = /note="Description of Artificial Sequence: Synthetic coding sequence"
  source 1..1236: mol_type = other DNA
atgagcagcaagggctcagtggtgctcgcgtacagcggcggactcgacactagctgtattctggtctggcttaaggaacagggctacgacgtgatcgcatatttagccaatattggccagaaggaagacttcgaggaagcacgcaagaaggcactgaaactgggagccaaaaaggtcttcatcgaagatgtttcccgtgagtttgttgaagaatttatctggccagcaattcagtcttccgctctctatgaggaccgctatctcctgggaaccagcctcgccaggccctgcattgctagaaagcaagttgaaattgcccaaagggagggcgctaagtacgtctctcacggagccactgggaaggggaacgaccaggtccgattcgaactatcgtgttacagcttggccccacagatcaaagtgattgctccatggagaatgcctgagttctacaacagatttaagggccgtaacgatctgatggaatacgcaaagcagcatggcatccctatccccgtgacccccaagaacccatggtccatggacgaaaacttgatgcacatcagttatgaggcaggcatcctagagaacccaaaaaaccaggcacccccgggcctatacaccaagacccaggatccggccaaagcccccaatacccccgacattttggagatcgagttcaagaagggcgtgcctgttaaggttacgaatgtgaaggatggcacgacacaccaaacttcacttgagttgttcatgtacttgaatgaggtggccggcaaacacggggttggtcggattgatatcgtcgagaaccgtttcattggaatgaagtcccggggcatatatgaaactcctgcagggaccatactttaccacgcacacctcgacattgaggctttcaccatggacagagaagtgagaaaaattaaacagggactgggcctaaaattcgctgagctcgtgtatacagggttttggcattcccccgagtgtgagtttgtgcggcactgcattgctaagtcccaggagagggtggaaggaaaggtgcaggtctctgtactgaagggccaggtctatatcttggggcgagagtctcccctgtccctgtataatgaagaacttgttagcatgaacgtccagggcgactacgaaccgactgacgccacaggctttatcaacattaattccttgcgcctgaaagaataccatagattgcagtccaaggttacggctaag

SEQ ID NO: 6927 - DNA, 1236 bp, synthetic construct
  misc_feature 1..1236: note = source = /note="Description of Artificial Sequence: Synthetic coding sequence"
  source 1..1236: mol_type = other DNA
atgagctctaaagggtcagttgtattagcatattccggcggactagatacatcttgcattctggtttggctgaaggagcagggctatgacgttatcgcttatctagcaaacattggccagaaggaggatttcgaagaagctaggaaaaaggcactaaagttgggtgcaaaaaaagtatttatcgaggatgtatctcgggaattcgtggaggaatttatctggcccgcaatacagagtagtgctctgtacgaggataggtacctgttggggacttcgctcgccaggccctgcattgcacgcaaacaagtcgaaatcgcccagagggaaggagcaaaatatgtgtcgcacggcgctaccggcaagggcaacgaccaagttcggtttgaactctcttgctattctcttgccccccagattaaagtgatcgcaccttggcgaatgcccgagttctataatcggttcaagggtaggaacgatcttatggagtacgccaaacaacatgggatcccgattcccgtcacccccaagaatccatggagcatggacgagaaccttatgcatattagttatgaagctggtatcttggagaaccctaaaaatcaagcccccccaggactttacacaaagacccaggatcccgcaaaggcacctaatacacctgatatcttggaaatagagttcaagaagggagtgcctgtgaaagttaccaacgtgaaggacgggaccacacatcagacatcccttgaactgtttatgtatttgaacgaggtcgcaggcaagcatggagtgggtcgcattgatatcgtggaaaatcggtttatcggaatgaagtctcgcggaatctatgagacacccgcaggtactattctctaccacgcgcatctcgacattgaggcttttactatggaccgggaagttcgcaaaataaagcaaggactaggcctaaagtttgcggagcttgtctataccggattctggcattctcccgaatgcgagttcgtgagacattgcatcgccaagagtcaggagcgcgtcgagggcaaggtgcaggtaagtgtgcttaaaggccaggtctacatcttgggcagagaaagtcctctgagtctgtataatgaagagttggtttccatgaatgtgcagggtgactacgaacctaccgatgctactggattcatcaatatcaattccctgagattaaaggagtaccaccgactccagtccaaagtgacagccaag

SEQ ID NO: 6928 - DNA, 1236 bp, synthetic construct
  misc_feature 1..1236: note = source = /note="Description of Artificial Sequence: Synthetic coding sequence"
  source 1..1236: mol_type = other DNA
atgtcctcgaagggatcggttgtgctcgcatattctggggggctggacacctcatgcatactcgtatggcttaaggagcagggctacgatgtcattgcatatttagctaatatcggtcagaaagaggacttcgaggaggccaggaaaaaggccctgaagctgggggcaaagaaagtattcatcgaggacgtgagtagggagtttgtggaggaatttatatggcctgcaattcaatctagcgctctttatgaggatcggtacctgctgggcaccagcctggcacgcccttgcattgctcgcaagcaggtggagatcgcccaacgggagggggcaaagtacgtcagtcacggcgcaactggcaaaggcaacgatcaggtccggtttgaactctcctgttatagccttgccccccaaattaaagttatcgcaccatggcgcatgccagaattttacaaccggttcaagggaagaaacgacctgatggaatatgccaagcagcacggaataccaatccccgtgacacctaaaaatccatggagtatggacgaaaacctgatgcacatttcctacgaggctggtattctcgagaatccaaaaaaccaggctccccccgggctgtacaccaagactcaggacccggctaaggcaccgaacactcccgatatcctcgagatagaatttaaaaaaggggtacccgtgaaggtcaccaacgttaaggatggaacaacccatcagacctcattggagcttttcatgtacctgaatgaggtggctggaaaacacggtgtagggagaattgatattgttgagaataggttcatcggcatgaaaagtaggggtatttacgaaacgcccgcagggactattctgtatcacgcgcatctagacattgaagcttttactatggaccgggaagtccgtaagatcaagcagggcttgggtctgaagttcgccgaactcgtttacactggcttttggcacagcccggagtgtgaattcgttagacattgcatcgccaagtcccaggagagggttgagggcaaggtgcaggtttctgtcctgaaggggcaggtatatatcctggggcgcgaatcgcccctgagtttgtacaatgaagagctcgtgagtatgaatgtgcagggcgactatgagccaaccgacgctaccggcttcatcaatatcaatagtctccggctgaaagagtaccatagactgcagtctaaagtcactgccaaa

SEQ ID NO: 6929 - DNA, 1236 bp, synthetic construct
  misc_feature 1..1236: note = source = /note="Description of Artificial Sequence: Synthetic coding sequence"
  source 1..1236: mol_type = other DNA
atgtccagtaagggttcggtggtgctggcctactcgggaggacttgatacttcttgtatacttgtgtggctcaaagagcaaggttacgacgtcatcgcatacctggcaaacatcgggcagaaggaagatttcgaagaagcaaggaagaaagcactgaagctcggtgcaaagaaagtgttcatagaggacgtctcgcgcgaatttgtggaggagttcatttggccagcaattcaaagctctgcgctctacgaggaccgatacctgctgggaacctcacttgctagaccgtgtatcgcacgcaagcaagtcgaaatcgcgcaaagagagggggcaaagtacgtgtcccatggagccactggtaagggtaacgaccaggtccgtttcgaactgtcgtgttatagcttggctccccagatcaaggtgattgcaccctggcgcatgcccgaattctacaataggtttaagggcaggaacgatttgatggaatacgcaaaacaacatggcattccaatcccagtgaccccaaagaacccatggtcaatggacgaaaaccttatgcatatctcatacgaagcaggaatactcgaaaaccctaagaaccaggcaccgcccggcctttacaccaagacccaagatccagcgaaggcccctaatactcccgacattcttgagatagagtttaagaaaggcgtgccagtgaaggtgactaacgtgaaggatggcactactcatcaaacgtccctggaactgttcatgtatctcaatgaagtcgcaggaaagcatggagtgggtcgtatcgacatcgtggagaataggtttatcggaatgaagtccaggggaatctacgaaacccctgcaggaaccatactctaccacgcacacctggatatagaggcatttactatggatcgggaagtgcgtaagataaagcaaggtttgggtctgaagtttgcggaactcgtgtacactggcttttggcactcgcctgaatgcgaatttgtgcggcattgcattgctaagagccaggaacgcgtcgaaggtaaggtgcaggtgtccgtcttgaagggacaagtgtacattctcggaagagaatcacctctttcactgtacaacgaagaactggtgtccatgaatgtgcagggagattacgaaccgactgatgccaccggatttatcaatatcaattcccttagacttaaggaataccaccggttgcagtcaaaggtcactgcaaag

SEQ ID NO: 6930 - DNA, 1236 bp, synthetic construct
  misc_feature 1..1236: note = source = /note="Description of Artificial Sequence: Synthetic coding sequence"
  source 1..1236: mol_type = other DNA
atgtcgtccaaggggtcagtggtcctggcatattcgggtggtctggacacctcttgcattctggtgtggttgaaagagcaggggtacgatgtgattgcttacctcgccaatataggacaaaaggaagattttgaagaggcaagaaagaaggcgctcaagctgggagcaaagaaagtgtttatcgaggatgtgagccgtgagtttgtcgaagaattcatttggcctgctatccagtcgagcgcactttacgaagatcggtacctgctgggtacttcgctggcacggccatgtattgcacggaagcaagtggaaattgcgcaaagagaaggagcaaagtacgtctcgcatggtgcaaccggaaaaggtaacgatcaggtgcggtttgaactgtcctgctactcgcttgccccgcagattaaagtgatcgcaccatggcggatgccagaattctataacaggtttaaaggaagaaacgacctcatggaatacgcaaaacagcatggaataccaatacccgttacccctaagaacccgtggagcatggatgagaacttgatgcacatctcgtatgaggcgggaattcttgaaaatcctaaaaaccaggcaccacctggcctttacactaaaacccaagatcctgctaaggcacctaatactccagatattctggagatcgagttcaagaaaggtgtgccggtgaaagttaccaacgtgaaggatggaacgactcaccaaacctcgctggaactgttcatgtacctgaacgaggtcgcaggtaagcatggagtcggacgcattgatatagtcgaaaatcgctttattggaatgaagtcgagaggaatctacgaaaccccagccggtactattctgtaccatgcgcaccttgatatagaggcatttaccatggaccgggaagtcagaaagattaagcagggtcttggtcttaagttcgcagaactggtctacactggattctggcattctccagaatgtgaatttgtgagacactgtattgcgaagtcacaggagagagtggaaggaaaggtgcaggtgtcggtcctgaagggacaagtctacatcttgggccgagaatcccccctttcactctacaatgaagaactggtgtcaatgaacgtgcaaggtgattacgaacctactgatgctactggattcataaacataaactcccttcgtctgaaggagtaccaccgtctgcagtccaaggtgaccgccaag

SEQ ID NO: 6931 - DNA, 1236 bp, synthetic construct
  misc_feature 1..1236: note = source = /note="Description of Artificial Sequence: Synthetic coding sequence"
  source 1..1236: mol_type = other DNA
atgagcagcaaaggttccgtggtgctcgcttactccgggggactcgatactagctgtatcttggtttggctcaaagagcaagggtacgacgtcatcgcatacttggccaatatcggccagaaggaggacttcgaagaggcacggaaaaaagcattgaagctgggtgcgaagaaagtgtttattgaggacgtgtcaagggagttcgtggaagagttcatctggccggccatccagtctagtgccctttacgaggacagatacctgctcgggacctcgctggctagaccgtgcattgcgcgcaaacaagtcgaaatcgcgcagagagaaggagcgaagtacgtctcgcatggagcaactggaaaggggaacgaccaggtgcggtttgaactgagctgctactcacttgccccacagattaaagtgatcgcaccatggcggatgcctgaattctacaatcgtttcaaaggacgcaacgacctcatggagtacgcaaagcagcacggtatcccgatcccggtcaccccgaagaatccttggagcatggatgaaaacctcatgcacatcagctacgaagccggaatcctcgagaacccgaaaaaccaggccccgcccggtctgtacactaagacccaagacccagctaaggcacctaatactccagacattttggaaatcgaattcaagaagggagttcctgtcaaggttacgaacgtcaaagatggcaccactcaccagacctcgttggagctgttcatgtatctgaacgaagtggcgggtaaacatggggtgggtagaatcgatatcgtggagaatcgcttcataggaatgaagtctcggggcatttacgaaaccccggccggaactatcttgtaccacgctcatctggacatcgaagccttcaccatggatcgcgaagtgagaaagatcaagcagggactgggacttaagttcgcggagcttgtgtacaccggcttctggcactcaccggaatgcgaatttgtgcggcactgcatcgcaaagtctcaggagagagtcgaaggcaaggtccaggtgtcggtgctgaagggccaagtgtacatcttgggtcgagagtcgcccctcagcctgtacaatgaggaactggtgtccatgaatgttcagggagactatgagcctaccgacgccaccggctttatcaacattaactccttgagactgaaggaataccatcgacttcagtccaaggtcaccgccaag

SEQ ID NO: 6932 - DNA, 1236 bp, synthetic construct
  misc_feature 1..1236: note = source = /note="Description of Artificial Sequence: Synthetic coding sequence"
  source 1..1236: mol_type = other DNA
atgagcagcaaagggtcagtcgttctggcttacagcggtgggctcgacacttcttgcattttagtgtggctgaaggaacagggttatgatgtgatcgcctacttggcaaatatcgggcagaaagaagatttcgaggaggcgagaaaaaaggcactgaagctgggagccaagaaagtatttatagaagacgtctcacgtgagtttgtagaggaattcatctggccggccattcaatcttcagccttgtacgaggacaggtatctgctggggacctccctggcacgcccatgcattgcaagaaaacaggttgaaatcgcgcagcgagagggcgccaaatatgtgtctcacggggctacaggaaagggcaacgatcaggtacgctttgagctatcgtgctacagcctcgctcctcagattaaggtgatcgcaccctggaggatgcctgagttctataaccgcttcaagggtcgcaatgacctgatggaatacgctaagcagcatgggatccccatccccgtcactcccaagaacccctggagcatggacgagaacctgatgcacatctcatacgaggccggtattctagagaatcctaagaaccaggcacccccggggttatacaccaaaacgcaggaccctgctaaggcccccaacacacctgatattttggagattgagttcaagaagggcgtgccagttaaggtgacgaacgtgaaggacggaaccactcaccaaactagcctggaactgttcatgtacctaaatgaagttgcgggcaagcacggggtcgggaggatcgatatagtcgaaaataggtttatcggcatgaagagcaggggcatttatgagacccctgctgggacaatcctgtatcacgcgcacctggacattgaggcctttactatggatagagaggttcgtaagatcaaacagggcctggggctgaagtttgccgagttggtttacacgggcttctggcattcccctgaatgtgagtttgtgaggcattgcatcgctaagtcccaggagcgggtggaaggcaaggtgcaggttagtgtgcttaagggtcaggtgtacatcctgggaagagagagccccctctcgctgtacaacgaggagctggtttccatgaacgttcagggtgactatgaacccactgatgccacaggctttatcaacatcaacagccttcgcctaaaggagtatcaccgcctgcagagcaaggtgactgctaag

SEQ ID NO: 6933 - DNA, 1236 bp, synthetic construct
  misc_feature 1..1236: note = source = /note="Description of Artificial Sequence: Synthetic coding sequence"
  source 1..1236: mol_type = other DNA
atgtcgtccaagggatcggtggtcctggcatactcgggagggctggacacctcgtgtattctcgtctggcttaaggagcaaggttacgacgtgattgcatacctcgcaaacatcgggcaaaaggaagatttcgaggaagctagaaaaaaggcgcttaagctgggagctaagaaggtgtttattgaggacgtgtcgagagaattcgtggaagagtttatctggccagcaattcagtcatccgcactttacgaagatcggtacctcctcggtacctcgctcgcacggccctgtattgcaagaaagcaagtggagatcgcacagcgcgaaggcgccaagtacgtctcgcatggtgcgacgggcaagggtaacgatcaagtgcgctttgagctgtcctgttactcccttgccccccagattaaagtgattgcaccatggaggatgcctgagttttacaaccgctttaagggacgaaatgaccttatggaatatgccaaacagcatggtatcccaattcccgtcactcccaaaaacccttggtcgatggatgaaaatctgatgcatatctcatacgaggccggaattcttgaaaaccctaagaaccaggcgcctccaggcctgtacaccaagacccaagacccggcgaaggcacctaacactcctgatatacttgagatcgagtttaagaaaggagtccccgtgaaagtgaccaacgtgaaagatgggaccactcaccagactagcctggagctctttatgtacctgaatgaagtggcaggtaagcatggcgtgggacggattgatatagtggagaatcggttcattggtatgaaatcgagaggcatttacgaaacccctgcagggaccatcctttatcatgcacatctggatatcgaagcgtttactatggatcgtgaagtgcgcaagatcaagcaggggctcggactgaagtttgcggaactcgtgtacactggattttggcattcgccggaatgcgagttcgtccgacattgtatcgcaaagagccaggaacgtgtggagggtaaggtccaggtgtccgtgctcaagggtcaggtctacatcttgggtcgcgaatcccccctttcgctttacaatgaggagcttgtctcgatgaacgtccagggagattacgaaccgaccgatgcaaccggattcattaacatcaattcactgaggcttaaggagtaccaccgactccagtcgaaggtgactgcaaag

SEQ ID NO: 6934 - DNA, 1236 bp, synthetic construct
  misc_feature 1..1236: note = source = /note="Description of Artificial Sequence: Synthetic coding sequence"
  source 1..1236: mol_type = other DNA
atgtcttcgaaggggagtgtagttttggcgtactcaggaggacttgatacttcgtgtattttggtttggttgaaagaacaaggatatgacgttatagcatacttggcaaacattggtcagaaggaagacttcgaggaagcacggaagaaggctctcaagcttggagcaaagaaggtttttatagaggatgtgtctagggagttcgtcgaagagtttatatggccggccattcaatctagtgcattgtacgaagatcgttatcttcttggaacttcgcttgctagaccttgtatcgcaaggaaacaagttgaaattgcgcaaagggaaggtgctaagtacgtctcacacggcgctactggtaagggaaacgatcaggtgcgatttgaactaagctgttactcattggccccccagattaaggtcatagccccttggagaatgcccgagttttacaatagatttaaagggagaaacgatttaatggaatatgccaaacaacacgggatacctattccagtgactcctaaaaacccttggtcaatggatgaaaatctgatgcacatttcgtacgaggctggtattctagagaaccccaagaaccaagctccaccgggcctatatacaaaaactcaagaccccgcgaaggcccctaatactcctgatatccttgagattgaattcaaaaagggcgttccagttaaagtgactaacgtcaaggatgggacaacccaccaaacttcccttgaacttttcatgtatctcaatgaggttgctggtaagcatggtgtgggaaggatcgacattgttgagaacaggttcatcgggatgaaaagccgaggaatatatgagactcctgctggtaccatattatatcacgcacatttggatatcgaggcattcactatggatagagaggttcgtaagattaagcaaggcttaggactgaagtttgctgaactcgtttatacaggtttctggcactctcctgaatgcgagtttgtccgtcactgtattgccaaatcccaagaaagggtcgaaggaaaagtgcaggtttctgttttgaagggacaagtttatattctgggccgtgaaagtcctcttagcctatataatgaggaactcgtatccatgaacgttcaaggcgactacgaaccaaccgacgctactggattcattaacatcaattctttgcgacttaaagaatatcaccgcctgcagtcaaaggttactgctaaa

SEQ ID NO: 6935 - DNA, 1236 bp, synthetic construct
  misc_feature 1..1236: note = source = /note="Description of Artificial Sequence: Synthetic coding sequence"
  source 1..1236: mol_type = other DNA
atgtcaagcaaaggatcggtggtgctcgcctactcgggaggactcgacactagctgcatccttgtatggttgaaggagcaaggatatgacgtgattgcctacctcgctaacatcggtcagaaggaagatttcgaggaggcccggaagaaagccctgaaacttggtgccaaaaaggtgttcatcgaagatgtgtcccgggaattcgttgaggagttcatctggcccgcgatccagtcctcggccctgtacgaggaccggtacctcttgggaacttccttggcccgaccgtgcatcgcgaggaagcaagtggaaatcgctcagagagaaggagccaagtacgtgtcgcacggcgcgaccggaaaaggcaacgaccaggtgaggtttgagctcagctgctactcgctggcaccgcagatcaaggtcatcgccccctggcgcatgcctgaattctacaaccgctttaagggcagaaatgacctgatggaatacgctaaacagcacggaatcccgattccggtcacgcctaagaatccttggtcaatggatgagaacctgatgcacatttcatacgaggctggaattctggaaaacccgaagaatcaagcaccgccaggactttacactaaaacgcaggacccggccaaggcaccaaacactcctgacatcctggaaatagaattcaagaagggcgtgcccgtgaaggtcaccaacgtgaaagacggtaccacccaccagacctctctggaattgttcatgtacctgaatgaagtcgcggggaagcatggagtcgggcgcatcgacatcgtcgagaacagattcatcggcatgaaatcccgtggcatctacgagactccagcgggaaccatcctctaccacgcacatctggatattgaagcattcactatggaccgcgaagtccgcaaaatcaagcaaggtctgggactcaagttcgccgaactggtttacaccgggttttggcattcaccggagtgcgaatttgtccgccattgtattgcgaagtcgcaggaaagagtggagggaaaggtgcaagtctcggtgctgaagggccaagtgtacatcctcgggcgggagtcaccactcagcctctataatgaagagctggtgtccatgaacgtgcagggagattacgagccaactgatgcgaccggcttcatcaacatcaattccctgcggctgaaggaataccaccggctgcagagcaaggtgaccgctaag

SEQ ID NO: 6936 - DNA, 1236 bp, synthetic construct
  misc_feature 1..1236: note = source = /note="Description of Artificial Sequence: Synthetic coding sequence"
  source 1..1236: mol_type = other DNA
atgtcgtcgaagggctccgttgtgctcgcctactccggaggactggacacctcttgcatcctcgtgtggctgaaagagcaaggctacgatgtgatcgcttacctcgcaaacattggtcagaaagaggatttcgaagaagcacggaagaaggcccttaagctgggtgccaagaaggtgttcattgaagatgtctccagagaattcgtggaagagttcatctggccagcgatccagtcatccgctctctacgaagatcgctacctcctcggtacctcgctcgcgcgcccatgcattgctcggaagcaagtggaaatcgcacaacgcgagggagctaagtacgtgtcgcacggtgctaccgggaagggtaatgaccaggtgcgcttcgaactctcgtgctactccctggcgccacagatcaaagttatcgcgccttggcgcatgccggagttctataaccgcttcaagggacgcaacgacttgatggagtacgcaaagcagcacggaatcccgatccctgtgacccccaagaacccgtggagcatggatgagaatttgatgcatatctcgtacgaagcgggaatcttggagaacccgaaaaatcaagcgccgccgggactgtataccaagacccaggacccggccaaggccccgaataccccagacatcctcgagatcgagtttaagaagggagtcccagtgaaggtgaccaacgtcaaggatggaaccacccaccaaacctcgctcgagcttttcatgtacctgaacgaggtcgcaggaaagcacggcgtgggaagaattgacatcgtggaaaaccgcttcatcggaatgaagtcccgcggaatctacgaaactcccgcaggcactattctgtaccatgcacacctcgacatcgaagcgttcaccatggaccgggaagtccgcaagatcaagcaggggttgggactgaagttcgccgaactcgtctatactggattctggcactcaccggaatgcgagtttgtcagacattgtattgcaaaatcacaagagagggtggagggtaaggtccaagtgtccgtgctgaagggacaagtgtacatcctgggacgggaaagcccactgagcctgtacaacgaagagctggtgtcaatgaacgttcaaggagattacgagcctactgacgcaactggcttcatcaatatcaatagcctgcggttgaaggaataccaccgcctccaatcgaaagtgaccgctaag

SEQ ID NO: 6937 - DNA, 1236 bp, synthetic construct
  misc_feature 1..1236: note = source = /note="Description of Artificial Sequence: Synthetic coding sequence"
  source 1..1236: mol_type = other DNA
atgtcttctaagggcagtgtggtcctcgcttattctggtggactcgacacaagttgcatcctggtgtggttgaaggaacagggttacgacgtgatcgcataccttgccaacattggacagaaggaagattttgaggaggcacgcaagaaggctcttaagctgggagcaaagaaggtattcattgaggacgtgtctcgtgagttcgtggaagagttcatctggcctgctattcagtctagcgctctgtacgaggatcgctacctgctgggaactagcctggctcgtccttgcattgctcgtaaacaagtggagattgcacagcgtgagggagcaaaatacgtgtcacacggcgctacaggcaaaggaaacgatcaagtgcgttttgagttgagctgctatagcctggctcctcaaatcaaggtgatagccccctggagaatgcccgaattctataacaggttcaagggtcgtaacgatttgatggagtatgcaaagcaacacggtataccaattcctgtcacacccaagaatccctggagtatggacgaaaatctcatgcacatatcatatgaagctggcattttggagaaccccaaaaaccaggctccccccggtctgtacactaaaactcaggatcccgccaaggcccctaatactcctgacatactcgaaatagaatttaagaagggagtgcctgttaaggtcactaacgtcaaagatggaacaacacaccagaccagcttggagctctttatgtatttgaatgaggtggcaggaaaacatggcgttggcaggatcgacattgtcgagaatcgcttcatcggaatgaagtccaggggcatctacgaaactcctgcaggaacaatcctgtaccatgctcatttggatatcgaggctttcaccatggaccgtgaggtacgcaagatcaaacagggcttgggtctgaaattcgctgagctggtgtacacaggcttttggcacagccctgaatgcgaatttgtacgccattgtattgcaaagagccaggagcgcgtggagggaaaggttcaagtgtctgtgctcaagggtcaggtatacatcctcggtagagagtcacctttgtctctttacaatgaggagctggtatccatgaacgttcaaggagattacgagccaaccgatgccactggatttataaacatcaacagcctgcgccttaaggagtatcacaggctccaatccaaagtgaccgccaaa

SEQ ID NO: 6938 - DNA, 1236 bp, synthetic construct
  misc_feature 1..1236: note = source = /note="Description of Artificial Sequence: Synthetic coding sequence"
  source 1..1236: mol_type = other DNA
atgagctcgaagggatctgtggttctggcgtactctggaggactggatacttcgtgtatccttgtgtggttgaaggaacagggatacgacgtgattgcgtacctggctaacataggacagaaggaggacttcgaagaagcccgtaaaaaggctctgaagctcggagccaagaaagtgttcatcgaggacgtctcacgcgagttcgtggaggagtttatctggcccgctatccagtcatcagcgctgtacgaggatcgctacctgctgggcacttccctcgcaaggccatgcatcgcacggaagcaagtggaaatcgcgcagagagagggagctaaatacgtctcgcacggggcgactggaaaagggaacgatcaggtcagatttgaactttcgtgctactcacttgctccccagattaaggtcatcgccccttggagaatgccagagttttacaatcggttcaagggaaggaatgacctcatggagtacgccaaacaacatgggatcccaatcccggtgacgccaaaaaacccttggtcgatggacgaaaatcttatgcatatttcctatgaagccgggatactggaaaaccctaaaaaccaggcgcctcctggactgtacactaagactcaagatccggccaaggcaccgaacaccccggatatcttggaaatcgaattcaaaaaaggagtcccagtgaaggttaccaacgtgaaagacggcaccacccaccaaactagcctcgaactgttcatgtacctgaatgaggtcgccggaaagcacggcgtgggaagaatcgacatcgttgagaaccggttcatcggcatgaaatcccggggtatctacgagactccggccggaaccatcctttaccatgcacacctcgacattgaagccttcactatggacagagaagtccgaaagatcaagcagggtctggggcttaagtttgcggagctggtgtacacgggcttttggcacagccctgagtgtgaattcgtgcgccattgcatcgcgaagtcgcaggaacgggtggaaggaaaggtgcaggtgtcagtcctcaagggccaagtgtacattctcggcagggaaagcccgctgtcgctgtacaacgaagagttggtttccatgaatgtgcagggtgattatgaacctaccgacgcaactggtttcatcaacatcaattcactgcgtctgaaggagtaccaccgactgcaaagcaaggtgaccgcaaag

SEQ ID NO: 6939 - DNA, 1236 bp, synthetic construct
  misc_feature 1..1236: note = source = /note="Description of Artificial Sequence: Synthetic coding sequence"
  source 1..1236: mol_type = other DNA
atgtcctccaaaggtagcgttgttctagcatattctggcggcctggacactagctgtatattggtttggctgaaagaacagggttacgacgtaatcgcgtatctggcgaatatcggtcagaaggaagacttcgaggaggcccgcaagaaagcactcaaactcggagctaaaaaggtctttatagaagacgtgtctagagagttcgtggaggagttcatctggccagcaattcaatctagcgccctttacgaggatcgataccttctcggtaccagtctggcccgcccttgtatagcacgtaaacaggtggagattgctcaacgagagggcgccaagtacgtgagccacggcgcgaccggcaagggtaacgaccaggtgcggttcgagctcagctgttattctctggcacctcagattaaggttatcgcgccttggagaatgccagagttttacaatcgctttaaaggccgcaacgacctgatggagtacgcgaagcagcacggaattcccatacctgtgactcccaaaaacccatggtcaatggacgaaaatttgatgcacatcagctacgaagctggaattctggagaaccctaaaaaccaggcgccaccaggtctgtatactaaaacccaggacccggcgaaagcaccgaacacaccagacattctggagatcgaatttaagaagggggtgcctgtcaaagtgacgaatgtgaaggatggcaccacacaccaaacctccctcgaactgttcatgtacctgaatgaagttgcaggaaagcacggtgtaggacggattgatatcgtagagaaccgatttatcggcatgaagtctcgtgggatctacgaaactccagcgggcacaatcctgtaccacgcccacctggacatcgaggcgtttaccatggaccgcgaagtgcgcaagattaagcagggcctgggtctgaagtttgcagagttggtctacacgggcttttggcacagcccagaatgcgagttcgtgcgccattgtattgcgaagagccaggagagagttgaaggtaaagttcaagtgtctgtgctgaagggccaggtgtacattctgggtagagagagccctctcagcctgtataatgaggaactcgtgagcatgaacgtgcagggcgactacgaacctaccgacgcaactggcttcattaatatcaattccttgcgcttaaaggagtatcacagactccagagcaaggtcaccgcaaag

SEQ ID NO: 6940 - DNA, 1236 bp, synthetic construct
  misc_feature 1..1236: note = source = /note="Description of Artificial Sequence: Synthetic coding sequence"
  source 1..1236: mol_type = other DNA
atgtctagcaaagggtcagtcgtgctcgcctatagtggcggcctggatactagctgcattcttgtatggctgaaagagcaggggtacgacgtgatagcttatctggcaaacattggccaaaaggaggacttcgaggaggctcggaaaaaggcactgaaacttggtgcaaaaaaagttttcattgaggacgtttcacgagagttcgttgaggaatttatctggcctgccattcagagttcagcactctatgaagatcgctacctgctggggactagcctggcccgaccttgtatcgctcgaaagcaggtggagattgcgcaacgggaaggcgccaagtacgtctctcacggggctaccggcaagggcaatgatcaggtcagatttgaactaagttgttattccctcgcaccacagattaaggtgattgcaccttggcgtatgcctgagttctacaaccggtttaaaggccggaacgacttgatggagtacgccaaacagcatggcatacctatcccggtgacccccaagaacccatggtccatggacgagaaccttatgcacatcagctacgaggctggcattctggaaaatccaaagaaccaagctccccctggcctatataccaagactcaggatcctgccaaagcacctaatacacccgacatccttgagattgagtttaagaagggcgtgcccgtgaaagtgacgaacgtaaaagacggaactacacaccagacgtccctcgagcttttcatgtacctcaatgaggttgcaggaaaacacggtgtgggcaggatcgatatcgtggagaaccggtttatcggaatgaagtccagaggaatctatgaaacgcccgctggaacaattttgtaccacgcccacttagacattgaagcttttacgatggatagagaggttcgcaaaataaagcaggggctcggactcaaatttgcagagctcgtttacacaggcttttggcacagccccgagtgcgaattcgtacgccactgtattgcaaagtctcaggagcgtgtcgaggggaaggtccaggtgagcgtactgaagggtcaggtttacatactgggaagagagtccccactgagtttgtacaacgaggagctggtgtctatgaacgtacagggagactatgaacctaccgacgcaactggcttcatcaacattaattctttgcggttgaaagaataccaccggctccagtccaaagtgactgctaaa

SEQ ID NO: 6941 - DNA, 1236 bp, synthetic construct
  misc_feature 1..1236: note = source = /note="Description of Artificial Sequence: Synthetic coding sequence"
  source 1..1236: mol_type = other DNA
atgtcaagcaaaggctctgtggtgcttgcatacagcggagggcttgataccagctgcattctggtgtggctgaaagaacagggatacgatgtcattgcctacctggccaatatcggacaaaaagaggactttgaggaagctagaaagaaggcacttaagctgggcgcaaagaaggtgttcattgaagatgtgagcagggaatttgtggaagaattcatttggccagcaatacaaagctcggccctgtacgaagatcgataccttcttggtacctccctcgcaagaccttgtatcgccagaaagcaagtcgagattgcacagagggaaggggcaaagtatgtgtcccatggagcaactggtaaggggaacgatcaggtgaggtttgagctgtcatgctactcgctggcccctcagattaaagtgatcgctccctggagaatgccagaattctacaacaggtttaagggtcgcaatgaccttatggaatacgccaagcaacatggaatacctattcccgtgacgccgaagaatccttggtctatggacgaaaatcttatgcacatttcatacgaagcaggtatcttggagaacccgaagaatcaggctccaccaggattgtacacgaaaacccaagatcccgccaaggcgccaaacaccccagatatcctcgaaatcgaattcaagaaaggcgtgcccgtcaaagtgaccaatgtgaaagacggtaccacccaccagacgagcctggaactgtttatgtaccttaacgaagtggcagggaagcatggagtcggaagaattgatattgtggaaaataggtttattgggatgaagagcagaggcatttatgagactcccgcgggaactatcctttaccatgcacatctggacattgaggcctttaccatggatcgggaagtgcgaaagattaaacagggcctcggtcttaagtttgcagagctcgtctatactggattttggcactcgccagagtgtgaatttgtgcgacactgcattgcaaagagccaagagcgtgtggaagggaaggttcaggtgtctgtgctgaagggacaagtctatatactgggcagagaatcccccctgtcgctttacaacgaagaactcgtgagtatgaatgtgcagggtgattacgaacctaccgatgccactggatttatcaacattaacagccttcgactcaaggaataccatcggcttcagtccaaagtcaccgccaaa

SEQ ID NO: 6942 - DNA, 1236 bp, synthetic construct
  misc_feature 1..1236: note = source = /note="Description of Artificial Sequence: Synthetic coding sequence"
  source 1..1236: mol_type = other DNA
atgagctccaagggctcggtggtactggcatacagcggcggccttgatacgtcctgcatccttgtctggcttaaggaacaaggatacgatgtcatcgcatacctggccaacattggacagaaggaggacttcgaagaagctagaaagaaggcactgaagctgggcgccaagaaggtgtttatcgaggacgtctcccgtgagtttgtcgaggagtttatctggcctgcaatccaatcgtcagcgctttacgaagataggtaccttcttggtacgagtctcgcacgcccatgtattgcaaggaagcaagtggaaattgcacagcgcgagggtgccaagtacgtctcacacggggccactggtaagggcaatgaccaagtgcgttttgagctgtcgtgttacagccttgctccgcagataaaagtgattgcaccatggcgcatgcccgagttttacaaccgcttcaaaggaagaaacgatctgatggaatacgcgaagcaacatggaattcccatcccagtgaccccaaagaatccctggtcgatggatgaaaacctgatgcatatatcatacgaggcaggaattctggagaaccccaagaatcaagctcctcctggtctgtacactaagacccaggacccagccaaggctcctaacactcctgatatcctcgagattgaattcaagaaaggcgtgccagtgaaggtgaccaacgtgaaggatgggaccacccatcaaactagccttgaactgtttatgtacttgaatgaagtggcaggaaagcacggagtgggaagaatcgacattgtggagaacagattcatcggtatgaaatcacgcgggatttatgaaaccccggccggtaccattttgtaccatgcacatctcgacattgaagccttcaccatggacagagaggtgaggaaaatcaagcaaggactcggtcttaagtttgccgaactggtgtacaccggcttttggcattccccggaatgcgaatttgtcagacactgtatcgcgaagagccaggagcgagtggaagggaaggtgcaagtgtcagtcctgaagggtcaagtttacattctgggtcgggaatcacccctttcgctgtacaacgaagaacttgtctccatgaacgtgcaaggagactacgaacctactgatgcaactgggttcattaacatcaactcgcttcgcctcaaggaataccatcgcctccagtccaaggtgacggccaaa

SEQ ID NO: 6943 - DNA, 1236 bp, synthetic construct
  misc_feature 1..1236: note = source = /note="Description of Artificial Sequence: Synthetic coding sequence"
  source 1..1236: mol_type = other DNA
atgtcaagcaagggctccgttgttctggcttattctggaggtctggatacttcctgtattctggtctggctgaaggagcagggctacgatgtcattgcatatttggctaatatcggtcaaaaggaagacttcgaggaggcccgtaagaaggccttgaagctcggagctaaaaaagtgttcatagaggacgtgagcagggagttcgtggaagagttcatctggcccgcgatccagagcagtgccctttatgaggatagatatctgctgggcacctcactagcgcgcccttgcattgcccgaaagcaggtggagattgctcagagagagggggcgaaatatgtcagccacggtgccacaggcaaggggaacgatcaggtccgctttgagctgagttgttactcccttgcgcctcagataaaagtcatcgcgccatggcgaatgcccgaattctataataggtttaagggcagaaatgacctgatggagtacgcaaagcaacatggcattcccatccctgtcaccccgaagaacccttggtcaatggacgagaacttgatgcatatctcttatgaagctgggatcctcgaaaatcctaaaaaccaagctcccccgggcctctacaccaagacccaggaccctgcaaaggcaccaaatacccccgacatcctggaaatcgagtttaaaaaaggtgtgcctgtgaaggtgacgaatgtaaaggatggcacaacacatcaaacctcattggaattgtttatgtatttgaatgaggtcgccggaaagcatggcgtaggacggattgacattgtagagaatcgattcatcggtatgaaatcccgagggatctatgaaaccccagcagggacaatcttatatcatgctcacttagacattgaagctttcactatggaccgggaagttagaaagattaagcaagggttgggcttgaagttcgctgagctggtttacaccgggttttggcatagcccagagtgcgaattcgtgagacattgcattgctaaatcacaggaacgtgttgaagggaaggtgcaggtttctgtactgaaggggcaagtgtatatcctcggccgcgaatcccccctctccctatataatgaggagctggtctccatgaacgttcaaggagactatgagccaaccgacgccacaggctttataaacatcaatagcctccgactgaaggaataccaccggttgcagtcaaaagttacagccaag

SEQ ID NO: 6944 - DNA, 1236 bp, synthetic construct
  misc_feature 1..1236: note = source = /note="Description of Artificial Sequence: Synthetic coding sequence"
  source 1..1236: mol_type = other DNA
atgtcctccaagggttccgtcgtcttagcctacagcggaggtctggatacctcctgtattttggtgtggttgaaggagcagggctacgatgttattgcctacctggctaacatcggccagaaggaggatttcgaggaggcccgcaagaaggccttgaagctgggcgccaagaaggtgtttattgaggacgtgtcccgggaattcgtggaagagttcatctggccagccattcagagctccgcgctgtacgaggatcgttatctactgggtacgtccctcgcgcgcccctgcatagcccgcaagcaggtggaaatcgcccagagggagggggccaaatacgtatcgcacggagccactggcaaaggtaacgatcaggtgcggtttgagctgagttgctactccttagccccgcagattaaagttattgccccctggcgcatgccagaattttataataggttcaagggccgcaatgacctgatggagtatgccaagcagcatggcattccgattcccgtgaccccgaaaaacccgtggtcgatggatgagaatctaatgcacatctcctacgaggcaggcatcctagagaacccgaagaatcaggctcccccgggtctgtacactaagactcaagatccagcgaaagcccccaatactcccgatatactggagatagagttcaagaagggcgtgccagtgaaggttactaacgttaaagacggtaccacccatcaaacttccctggagttatttatgtacctgaatgaggtggctggaaagcatggcgtaggcaggatcgatatcgtggagaatcggttcatcggaatgaagtcccgaggaatctacgaaacccccgctggcactatactgtaccatgcccatctggacattgaggcttttaccatggatcgcgaagtcagaaagatcaaacagggcctgggtctcaagttcgccgaactggtttacacaggattctggcactcgccagagtgcgagtttgtccgacactgcatcgcgaaatcccaagaacgagtggaaggtaaggtgcaggtgtcagtcttgaagggtcaggtttatatccttggccgcgaaagccctttgtccctgtataatgaagaactggtaagtatgaacgttcagggcgactacgagccgacggatgctacgggattcatcaacataaattccctaaggctgaaggagtaccaccgactacagtcaaaagttaccgccaag

SEQ ID NO: 6945 - DNA, 1236 bp, synthetic construct
  misc_feature 1..1236: note = source = /note="Description of Artificial Sequence: Synthetic coding sequence"
  source 1..1236: mol_type = other DNA
atgagcagcaaaggctccgtcgtgctggcctattctggtggtctggatacaagttgcatcctcgtgtggcttaaggagcagggctacgacgtgatcgcctatctggctaacattggccagaaagaggatttcgaggaggctaggaagaaggcactgaaactcggtgccaaaaaagtcttcatagaagatgtctccagggaattcgttgaagaatttatttggcctgcaatccagtcgtctgccctttatgaggacaggtatctactaggaacttcgcttgcaagaccatgcatcgccagaaagcaagtggagatcgcccagagagagggagccaaatacgtgtcccacggagccaccggtaaagggaatgaccaggttagatttgaactctcatgttatagtttggcccctcagattaaagttatcgcaccctggcgaatgccggagttttataacagatttaaagggaggaatgacctaatggagtatgccaaacagcacggcattcccatccccgttacacccaagaacccatggtcgatggatgaaaatttaatgcacatttcgtacgaggcagggatcctggaaaacccgaagaatcaggcccctcccgggctatacaccaagacacaggacccagccaaggctcccaacacaccagacattcttgagatcgaattcaaaaagggagtgcctgtgaaagtgacaaatgtcaaggacggaactacccaccagacatctttggagctcttcatgtatcttaacgaagtggcaggaaagcatggggtggggcgaatcgatattgtagagaacaggttcatagggatgaaatccagggggatttacgaaactcctgctggaaccatcctgtaccacgctcatttggacatcgaagcctttaccatggatcgagaggtgaggaagatcaagcagggcctgggtctgaagtttgctgagctcgtctacactggcttctggcactccccagaatgcgaatttgtcagacactgcatcgcaaagtctcaagagagagtcgagggaaaagtacaggtcagcgtgttgaagggtcaggtctacatcctgggccgagaatcaccactgtcactgtacaacgaggaactcgtgagcatgaacgtacaaggagactatgaacccacagacgctaccgggttcatcaacataaactcccttcggcttaaggagtatcatagactgcaatcaaaggtgacggcgaag

SEQ ID NO: 6946 - DNA, 1236 bp, synthetic construct
  misc_feature 1..1236: note = source = /note="Description of Artificial Sequence: Synthetic coding sequence"
  source 1..1236: mol_type = other DNA
atgtcatccaaaggcagcgtggttctcgcatactcaggcggccttgatacttcgtgcatccttgtgtggctgaaagaacagggatacgatgtcatcgcatacctcgctaacatagggcaaaaagaggacttcgaagaggctagaaaaaaggccttgaagctgggtgcaaagaaggtgtttatagaagatgtcagccgcgaatttgtggaggagtttatctggccagcgattcagtcctcggcgctgtacgaagatagatacctgctggggacctcccttgcacggccatgcattgcacgaaagcaagtcgaaattgcacagcgagaaggtgcaaaatacgtgtcacatggtgcaactggcaagggtaatgaccaagtgcggtttgaactttcgtgttactcgctggcgccacagattaaggttatcgcaccgtggagaatgcctgaattctacaatcgctttaaaggtagaaacgatcttatggaatacgcaaagcaacatggaatccccattcctgttacgcctaaaaacccctggtcaatggacgaaaacctcatgcatatttcatatgaagcaggaattctcgaaaatcccaagaaccaggccccgcctgggctttacaccaagactcaagacccggctaaggcccctaatactccggatatcctggaaatcgaattcaagaagggtgtgccagtcaaggtcaccaatgtgaaggacggtactactcaccaaacctcgctggaactctttatgtacctgaatgaagtggccggcaagcatggagtgggcagaatagacattgtggaaaatcgctttatagggatgaagagcagaggaatttacgaaactccagcgggtaccattctgtaccacgctcatcttgatattgaagcatttactatggatagagaggtgagaaagattaaacaggggctgggactgaaattcgccgaactcgtgtatactggattctggcactcgcctgaatgtgaatttgttcgacattgtattgctaagtcgcaggaaagagtcgaagggaaagtgcaagtctcggttctgaagggtcaggtgtacattcttggaagggagtccccacttagcctgtacaacgaggaacttgtgtcgatgaatgtgcaaggagattacgaacctactgatgccactggtttcattaacattaacagtctccgtttgaaagaatatcataggcttcagtcgaaagtgaccgccaaa

SEQ ID NO: 6947 - DNA, 1236 bp, synthetic construct
  misc_feature 1..1236: note = source = /note="Description of Artificial Sequence: Synthetic coding sequence"
  source 1..1236: mol_type = other DNA
atgtcctccaaaggatctgtggtgctcgcatacagtggcggactggataccagctgtatcctcgtgtggctgaaagagcaggggtacgatgtgatcgcctacttagcaaacatcgggcaaaaggaggactttgaggaagcccggaagaaggccctgaagttgggcgccaaaaaagtctttatcgaggatgtgagcagagaatttgttgaggagtttatttggccagccatccaaagcagcgcgctttatgaagacagatacttactcggaactagcctcgccaggccctgcatcgcccgcaagcaagttgaaatagctcaaagggaaggggccaagtatgtgtcccatggggctactggtaaaggcaatgaccaggtgagattcgaactgagctgttattctcttgctccccagatcaaagtcatagccccatggaggatgcctgaattttacaataggtttaaaggtaggaatgatctgatggagtatgctaagcaacatggaattcctatccccgtgactcctaaaaatccatggtctatggatgagaacctgatgcacatttcttacgaggccggaatcctcgagaaccctaaaaaccaggcacctccaggtctctataccaaaacgcaggacccggcgaaagcgcctaatacaccggacatcctcgagattgagtttaaaaagggggtcccagtgaaggtgactaatgtaaaggatggcacaacccaccagaccagcttggagctgttcatgtatctcaacgaggtggccggcaagcacggcgtcggcaggatcgacatcgttgaaaaccgcttcatcgggatgaaatctagagggatctacgaaacacccgccgggacaatcttgtaccatgcacatctcgatatcgaagcattcaccatggacagagaagtgagaaagatcaagcaaggccttggacttaaattcgctgagctggtgtacaccggcttctggcattctcccgagtgcgaatttgtgaggcattgcattgccaaaagccaggagcgcgttgaaggaaaagtccaagtctccgttctcaaaggacaagtttatattctcggtcgggagtcaccgcttagcttgtataacgaggaactggtgagcatgaacgtccaaggtgactacgagccaactgatgccaccgggtttattaatataaacagcttgcgtttgaaagagtatcacagactgcagtcgaaggtgactgcaaaa

SEQ ID NO: 6948 - DNA, 1236 bp, synthetic construct
  misc_feature 1..1236: note = source = /note="Description of Artificial Sequence: Synthetic coding sequence"
  source 1..1236: mol_type = other DNA
atgtcctcaaagggctccgtcgtgcttgcctactccggtggacttgatacctcctgtatcctggtgtggctgaaggaacagggctacgacgtgattgcctacctcgcaaacattggacaaaaggaagattttgaagaagcaaggaagaaagcactcaagctgggggctaagaaggtgttcatagaggatgtgagccgggaattcgtggaagagtttatctggcctgcaatccaatcgtccgcactctatgaggatagatacctccttggtacctcgcttgcacgcccgtgtattgcaagaaaacaggtggaaatcgctcaacgtgaaggggccaagtacgtgtcgcatggagccaccggaaagggtaacgaccaggtccgattcgaactgagctgttacagccttgcaccccagatcaaggtgattgcaccctggaggatgccggaattctataaccggttcaaaggtaggaacgacctgatggaatacgcaaaacaacatggaattccaatcccggtgactccaaagaatccctggagcatggatgaaaatcttatgcacatttcatacgaggcgggaattcttgaaaacccgaagaaccaagcgccaccaggcctttacaccaagactcaagatcccgcaaaggcaccgaacacgccagatattctggagatcgagtttaagaagggcgtccccgtcaaggtgactaacgtcaaggatggtacgacccaccaaacctcgctggagttgttcatgtaccttaacgaggtagctggaaaacatggtgtgggaagaatagacattgtggaaaatcgctttatcggaatgaaaagccgcggcatctacgaaaccccggcagggactatactttatcatgcacatcttgacattgaagcgtttaccatggatagagaagtccggaaaatcaaacagggattgggtcttaagtttgctgaactggtgtacaccggtttctggcatagtccggaatgcgaatttgtgagacattgcatcgcaaaatcccaggagcgcgtcgaaggaaaagtgcaagtgtcagtgctgaagggacaggtgtacatactcgggagagaatcccccctctcactttacaacgaagaacttgtttccatgaacgttcaaggcgactacgagcctactgatgccactgggtttatcaacattaactccctgcgtcttaaggaataccatcgtctgcagtcaaaggtcaccgccaag

SEQ ID NO: 6949 - DNA, 1236 bp, synthetic construct
  misc_feature 1..1236: note = source = /note="Description of Artificial Sequence: Synthetic coding sequence"
  source 1..1236: mol_type = other DNA
atgtcatccaaaggttcggtggtgcttgcctactcaggtggacttgatacttcctgtattttggtgtggcttaaagaacaaggttacgatgtgatcgcgtaccttgcgaacattggacaaaaagaagattttgaggaggcaaggaaaaaagctctgaaacttggggcaaagaaagtctttatcgaagatgtgagccgtgaattcgtggaagaattcatttggccagcaatccaaagttccgcactttacgaagatcggtacctgctggggacctcactggcacgcccctgtattgcacggaagcaggtggagatagcacaaagagagggtgcgaagtacgttagccatggagcaacgggaaagggcaacgatcaagtgagatttgagctctcatgttactcccttgccccccagatcaaagtgatagcgccctggagaatgcctgaattctacaatcgattcaagggcagaaacgatctgatggaatatgcgaaacaacacgggattcctatccccgttactcctaagaatccttggagcatggatgaaaacctgatgcacatttcatacgaggcagggattctggagaaccccaagaatcaggctccaccaggtctttacactaagacgcaagacccagcaaaggcaccaaacactccagatattcttgaaattgagttcaagaagggtgtgcctgtcaaggtgaccaacgtgaaggacgggactacccatcaaacctcacttgaattgtttatgtaccttaacgaggtggccggaaagcatggtgtgggccgcattgatattgtggagaacagattcatcggaatgaagtcccgaggaatctacgagactccggcaggaactattctttaccatgcgcatctggacatagaagccttcactatggatcgtgaagtgcgcaagattaagcaaggcctcgggctcaaatttgcggaactcgtctacaccgggttttggcattcgcctgagtgtgagtttgtgaggcattgtatcgctaaatcccaggaacgggtggagggtaaggtgcaggtcagcgtcctgaagggtcaggtgtacatcctgggtagggaatcgccactcagtttgtataatgaggaactcgtgtcgatgaacgtccagggcgattacgaacctaccgacgcaacggggttcatcaatatcaatagcctgcgcctcaaagaatatcatcgcctgcaaagcaaggtgacggctaag

SEQ ID NO: 6950 - DNA, 1236 bp, synthetic construct
  misc_feature 1..1236: note = source = /note="Description of Artificial Sequence: Synthetic coding sequence"
  source 1..1236: mol_type = other DNA
atgtcctcaaaagggagcgtggttctggcatatagcgggggtctggatacttcctgtattcttgtctggctgaaggagcaggggtacgacgtgatcgcatacctcgcaaacattgggcaaaaggaagatttcgaagaagcaaggaagaaggcacttaagctgggtgcaaagaaagtctttatagaggacgtgtcgagggagttcgtggaagaattcatctggccagctattcaatcttctgcgctctatgaggatcgatacctcctcggtacctcccttgccaggccatgtatcgcaaggaaacaggtggaaatcgcacaaagagaaggcgctaagtacgtgtcgcatggcgcgaccgggaagggaaacgatcaggtgagattcgaattgtcctgctacagcctggcgcctcagattaaggtcatcgcaccctggcggatgccagaattctacaaccggtttaaaggaagaaacgatcttatggaatacgcaaagcaacacggaattcctattcccgtcacgccgaagaatccttggtctatggacgaaaatctcatgcatattagctacgaggcaggaatacttgagaatcctaagaatcaagcgcctcccggattgtacactaaaacccaagatcctgccaaggcacctaataccccagatattctggaaattgagtttaagaagggagtgccagtgaaggtcaccaatgtcaaagacggcaccactcatcaaacctcactggaattgtttatgtacttgaatgaggtggccgggaaacatggagtgggacgcattgacatcgtggaaaacaggttcatcgggatgaaatcgcgtgggatctacgaaacccccgccggaactatcctgtaccatgcccatcttgacattgaggcatttacgatggatagagaagtcagaaagattaaacagggattgggccttaagtttgctgaacttgtgtatactggcttctggcactcgccagaatgcgagtttgttcggcactgtattgcaaagtcacaagaaagggtggagggaaaggtccaagtttccgtgttgaagggacaggtgtacatactggggcgcgaatcccctctctccctgtacaacgaggaactggtcagcatgaacgtgcagggtgattacgagccaactgatgcaactgggtttatcaacatcaactcacttcgtcttaaggagtaccatcgccttcaatcgaaggtcactgcgaag

SEQ ID NO: 6951 - DNA, 1236 bp, synthetic construct
  misc_feature 1..1236: note = source = /note="Description of Artificial Sequence: Synthetic coding sequence"
  source 1..1236: mol_type = other DNA
atgtcctccaaagggagcgttgtgttggcatactctggaggcctggacaccagctgcatcctggtttggttaaaggagcagggttacgatgtgatcgcatatttggctaatatcggacagaaggaggactttgaggaggcgaggaaaaaagcgctgaaattgggggcaaagaaagtttttattgaagacgttagcagagaattcgtggaagagtttatttggccggctattcaaagcagtgcattgtacgaagatagataccttttaggaacgtcactggccaggccatgtatcgcccgtaaacaggtggaaattgctcaacgcgagggggccaagtacgtgagccatggtgcgaccggtaagggcaatgatcaggtgcgatttgaactgtcgtgctatagtctggccccacagataaaagttatcgccccttggcggatgccagaattctacaaccggttcaaaggacggaatgatcttatggagtatgcgaagcagcacggcattcctatcccggtgaccccgaaaaatccctggtccatggatgaaaacctcatgcatattagctatgaggccggaattctcgaaaaccccaaaaaccaggcccccccaggtctctacactaagactcaggacccggcgaaagcccctaacacacctgacatcttggaaattgaattcaagaagggtgtgccagttaaggtcacaaacgttaaggatggcacaacccatcagacgtctctggagctctttatgtatctcaatgaagttgcaggaaagcacggcgtaggaagaattgacatcgtggaaaataggttcatcggcatgaagtctcgcggaatatatgagactccagccggcactattctctaccacgcccacctagacatcgaggctttcacaatggaccgcgaagtccgcaagatcaagcaaggcctgggtctgaagtttgcggaactggtctacaccgggttctggcatagccccgaatgtgagttcgtccgacattgcatcgccaagtcccaggaacgtgtcgagggtaaagtgcaggtctcagttctcaaggggcaggtctacatcctgggccgcgagtccccattatccctgtataatgaggagttggtttctatgaatgtgcagggtgattatgagcctacagatgccaccggtttcatcaacatcaatagcctacgcctcaaagaataccacaggctacagagtaaggtgactgccaaa

SEQ ID NO: 6952 - DNA, 1236 bp, synthetic construct
  misc_feature 1..1236: note = source = /note="Description of Artificial Sequence: Synthetic coding sequence"
  source 1..1236: mol_type = other DNA
atgagctcaaagggatccgtggtgctcgcctactccgggggcctagacacatcgtgcatcctggtgtggctgaaggagcagggatatgatgtaatcgcttacctggcaaacatcgggcaaaaggaagacttcgaggaagcaagaaagaaagctctgaaactgggcgcaaaaaaggtattcatagaggacgtgtccagggaatttgtggaggaatttatctggcccgctatccagtccagcgcgttgtatgaagatcggtacctattaggcacaagcctcgctagaccctgtatcgcgagaaagcaggtcgagatcgcgcagcgtgagggagccaagtacgttagccacggcgctaccggcaagggtaacgatcaggtaaggttcgaactgtcatgctatagcctggctccccaaattaaggttattgcaccctggcgtatgccagagttttacaaccgcttcaaagggcggaatgatttgatggaatacgccaaacagcacggaatccccattcccgttactcctaagaatccgtggtcaatggatgagaacttgatgcatatatcctatgaggctggaatcttagaaaatcctaagaaccaggctccaccaggactctatacaaagactcaggaccctgccaaggctccaaacacaccagacattctcgagatcgaatttaaaaagggcgtacctgtaaaggtgaccaatgtaaaagacggtactactcatcagacctcactggagctcttcatgtatttgaacgaagtcgcgggcaagcatggcgtcggacgaattgatattgtggagaatagattcattgggatgaagtcacgtggcatctatgaaacacctgccggaactatactgtaccacgcacacctggatattgaggccttcaccatggatcgggaagtaagaaagatcaagcagggtttgggcctcaagttcgcagaactggtttacactggattttggcactcaccagagtgcgagtttgtacggcattgcattgccaagagccaggagcgtgtggagggtaaagtgcaggtgtccgtcctaaaggggcaggtttatattcttggcagggagtccccattgtcactgtacaatgaggagctcgtctccatgaatgttcagggagactacgagccgacggatgccacaggattcattaacattaacagcctgcggctgaaggaatatcaccgccttcagagtaaagtcacagccaaa

SEQ ID NO: 6953 - DNA, 1236 bp, synthetic construct
  misc_feature 1..1236: note = source = /note="Description of Artificial Sequence: Synthetic coding sequence"
  source 1..1236: mol_type = other DNA
atgtcatccaaaggttcagtggtgctggcgtactccggaggactggacacctcgtgcatcctggtgtggctgaaggagcagggatacgatgtgatcgcatacttggcgaacatcggacagaaggaagatttcgaagaagcccggaagaaggcactgaagctgggcgccaaaaaagtctttatcgaggacgtgtcccgggaattcgtggaggaattcatttggcccgcgatccaatcaagcgcactgtatgaagatcgctacctcttgggaacctccctcgcgcgcccctgcatcgcacggaaacaggtggaaatcgcccagagggaaggggcgaagtacgtcagccatggcgcaaccggcaaaggaaatgatcaggtgcgcttcgagctgtcgtgctactcactggctccgcagatcaaagtgattgccccttggcggatgccggagttctacaatcgcttcaaggggcgcaatgatcttatggaatacgctaagcagcatggcatcccgatcccggtgaccccgaaaaacccatggtccatggacgagaatctcatgcatatttcctacgaggctggcattctggagaaccccaagaaccaagcgcctccgggcctgtacaccaagactcaagaccctgctaaggccccaaacaccccggacatcctggaaattgagttcaaaaagggcgttccggtgaaggttactaacgtgaaggacgggactacccatcagaccagccttgagcttttcatgtacctgaatgaggtcgcgggcaagcacggggtcggacggattgacatcgtggagaacaggtttatcggcatgaagagccggggtatctacgaaacccctgccgggactatcctgtaccacgcccacctggacatcgaggcctttactatggacagggaggtgagaaagattaagcagggactcggactgaaattcgcagagctcgtgtacacggggttctggcattcgcctgagtgtgaattcgtcaggcattgcatcgcaaagagccaagaaagggtggaaggaaaagtgcaggtttccgtgttgaagggacaagtgtacatcctcgggcgcgagtccccactctcactttacaatgaagagctcgtctcgatgaacgtccaaggagactacgaaccgaccgatgctactggattcatcaatatcaattcactgaggttgaaagaatatcaccgcctgcaatccaaggtgaccgctaaa

SEQ ID NO: 6954 - DNA, 1236 bp, synthetic construct
  misc_feature 1..1236: note = source = /note="Description of Artificial Sequence: Synthetic coding sequence"
  source 1..1236: mol_type = other DNA
atgtccagcaaaggatcggtagtactggcctatagcggagggctggacacctcttgcatcctggtttggttgaaggaacagggttacgatgtgatagcctatctggcgaatataggccagaaggaagattttgaggaagcacgaaagaaagcccttaaactaggtgccaaaaaagtcttcatcgaagatgtatcccgcgagtttgtcgaggagttcatttggcctgcaatacagtcttccgctctgtacgaggaccggtatttgttgggtacctccctagcacgaccttgcatagcccggaagcaagtggagatagcacagcgggaaggcgccaagtatgtgagccatggagccacaggcaaaggtaatgatcaggttagatttgagctatcttgctattcgctggcccctcagatcaaagtaattgcaccctggcgcatgcctgagttctacaatcgcttcaagggacggaacgacctgatggagtacgctaagcagcacggcattcccatccccgtaactcctaagaatccttggagtatggatgagaacctgatgcatatcagctatgaggccgggatcttagagaacccgaagaatcaggccccgcccggcttatacacgaagacccaagatcctgccaaggcgcccaacacccctgacattctcgagatcgagtttaagaaaggagtgccagtaaaggtgaccaacgtcaaagacgggacaacccaccagacctctcttgagctttttatgtacctgaacgaagttgctggaaagcacggagtgggacggatcgatatcgtagagaatcgtttcataggtatgaaatctcggggaatttatgagacccccgccgggactattctgtaccatgcacacttggacattgaggcatttacaatggatagagaggtacgcaagatcaagcaagggttgggattgaaatttgccgagctggtgtacacgggtttttggcactcccctgaatgtgaattcgtgaggcattgtatcgcgaaatcccaggagcgcgtcgaagggaaagtccaagtgagcgtgctcaaaggacaagtctacatactgggacgagagtcacctctgtcgttgtataatgaggaattggtcagcatgaatgtacaaggcgactacgaacctaccgatgccaccgggttcatcaacattaattctctccgactgaaggagtatcatcgcctgcagtctaaggttaccgccaaa

SEQ ID NO: 6955 - DNA, 1236 bp, synthetic construct
  misc_feature 1..1236: note = source = /note="Description of Artificial Sequence: Synthetic coding sequence"
  source 1..1236: mol_type = other DNA
atgtcaagcaaagggagcgtcgtgctggcttatagcggggggttagatacctcctgtatcctggtctggttgaaagagcagggctatgacgttattgcctacttggctaacattggccagaaggaggacttcgaggaagccagaaaaaaggcgctcaagcttggagctaagaaagtctttatcgaagatgtgtctcgcgagttcgtggaggaattcatttggccagcaatccagtctagcgcactgtacgaggacaggtacctcttgggtaccagccttgcacggccgtgcatagctcggaagcaggtggagatcgctcaaagggagggtgcaaaatacgtgtctcacggagccactggcaagggcaacgatcaggtacgcttcgagctgtcgtgttattctttagcccctcagattaaggttattgcaccatggaggatgcctgagttttacaacaggttcaagggcaggaacgatttaatggaatatgcaaaacagcacggcatcccaattcccgtgacccccaagaatccatggtccatggacgagaatttgatgcacatcagctacgaggcaggaattttggagaatcccaagaaccaagccccccctgggctatacacaaaaactcaggatcctgccaaggcacccaacacacctgacattctggagatagagttcaagaagggcgtgcctgttaaggtgaccaacgtgaaagatgggacaacacaccagactagtctggaactgttcatgtaccttaatgaggttgccggcaagcatggggttggaagaatcgacatcgtagagaaccggtttattggaatgaagtcacgcggcatctacgagactcccgcgggaacaatactgtaccacgcacacctggacatcgaagcctttaccatggaccgcgaggtcagaaaaataaaacagggcctgggcttgaaattcgctgagcttgtgtatacaggtttctggcacagtccagaatgcgagtttgttcgacactgtatcgcaaaatcccaggagcgcgtggaaggcaaagtgcaagtgagtgtacttaaagggcaggtttatatcctagggagggagtcgccactttccctgtacaacgaggagctggtatcgatgaacgttcagggggactacgagccaaccgatgctaccggatttatcaacattaacagtttaaggcttaaggagtaccataggctgcagtctaaggtgacagcaaag

SEQ ID NO: 6956 - DNA, 1236 bp, synthetic construct
  misc_feature 1..1236: note = source = /note="Description of Artificial Sequence: Synthetic coding sequence"
  source 1..1236: mol_type = other DNA
atgtcatctaagggaagcgtggtacttgcctactccggcgggttggacactagttgtattctcgtatggctcaaggagcagggttacgacgtcatcgcttacttagctaatatcggccagaaagaggatttcgaagaagcccgtaagaaagcactgaagcttggtgccaaaaaggtcttcatcgaggatgtgagtcgagaattcgtcgaggagtttatatggcccgccatccagtccagcgcgctgtacgaagatagatacctcttgggcacaagtctagccaggccttgcattgccaggaagcaggtagaaatagcccagcgggagggggccaagtacgtatcacacggagcaaccggtaagggtaatgatcaggtgcggttcgaactgagttgttactctttagctccccagatcaaagtgatcgctccttggagaatgcctgagttttacaatcggtttaaaggacgcaacgatcttatggagtatgccaagcagcacggaatccctatccccgttacacctaaaaatccatggagtatggatgagaatctgatgcatatatcttacgaagctggcatattggagaaccctaagaatcaggcaccacctgggctctacacaaagactcaggatccagctaaggcccccaacacacctgacattctggagatcgaattcaagaaaggcgtgcctgtgaaagtcactaatgtgaaagacggtaccacccatcagacctcacttgagctattcatgtacctcaatgaggtggctgggaaacatggagttggaaggatcgatattgtggagaacagatttattggaatgaagtctcggggaatttacgaaacgcctgcagggactattctgtatcatgcccatcttgatattgaagccttcaccatggaccgggaggtaaggaagataaagcaggggttgggacttaagttcgccgaactcgtgtacactggattttggcattcacctgagtgcgagttcgtgcgacattgcatcgccaagtcccaggaacgagtggagggtaaagttcaggtgtcagtcctcaaaggacaggtgtacatccttgggagggagtcccccctgagcttatacaatgaggagctcgtgtctatgaacgtgcagggagattatgaacctactgacgcaaccggattcattaacatcaacagtctgcgattgaaggagtaccaccgtctgcagagtaaagttacagccaag

SEQ ID NO: 6957 - DNA, 1236 bp, synthetic construct
  misc_feature 1..1236: note = source = /note="Description of Artificial Sequence: Synthetic coding sequence"
  source 1..1236: mol_type = other DNA
atgagcagcaaaggatcggtggtgctcgcgtactcgggcggcctggatacttcctgtattctggtgtggctcaaggaacaaggctacgatgtaatcgcctatctcgctaacatcggccaaaaggaggacttcgaggaagcccgaaagaaggccctcaagctgggtgcgaagaaagtgttcatcgaggacgtctcccgcgaattcgtggaagaattcatttggccagcgatccagagctctgcgctgtacgaagatcggtaccttctcggaacctccctcgctagaccatgcatcgctaggaaacaagtcgaaatcgctcagcgcgagggagctaagtacgtgtcgcacggagcaaccggaaagggaaacgatcaggtccggttcgagctgtcctgctactcgctcgccccacagatcaaagtgatcgcgccgtggaggatgccagaattctacaatcggtttaaggggagaaacgaccttatggaatacgccaaacagcatggaatcccgatcccggtgacccctaagaacccgtggtccatggacgagaacctgatgcacatctcctacgaggcgggaatcctcgaaaatccaaagaatcaggcccctccgggattgtacactaagacccaggacccggccaaggctcctaacaccccagatatcctggaaatcgaattcaagaagggtgtgccggtcaaagttaccaatgtgaaggacggaaccactcaccagacttcactcgaattgttcatgtacctgaacgaagtggcagggaagcatggagtgggcagaatcgacatcgtggagaataggtttatcggaatgaagtccaggggtatctacgaaaccccagccggaacgatcctctaccatgcgcacctcgacatcgaagcgttcaccatggaccgcgaggtcaggaagattaaacagggattgggactgaaatttgcggaacttgtgtacactggattttggcattcgcctgaatgtgagttcgtgcggcattgcattgccaagagccaagagcgggtggagggcaaggtccaggtgtcagtgctgaaagggcaagtgtacattctcgggcgtgaatccccactcagtctgtacaacgaagagctggtgtccatgaacgtgcaaggagactacgaaccaaccgatgctactggtttcatcaacatcaactccctgcggctgaaggaataccatcggctgcagtctaaagtcaccgcaaag

SEQ ID NO: 6958 - DNA, 1236 bp, synthetic construct
  misc_feature 1..1236: note = source = /note="Description of Artificial Sequence: Synthetic coding sequence"
  source 1..1236: mol_type = other DNA
atgagctcgaagggcagcgtcgtcctggcttactcaggtggactggatacttcatgtatcttggtttggctcaaggagcagggctacgatgtgatcgcgtacctcgccaacatcggccagaaggaagatttcgaagaggcacgcaagaaagccctgaaactgggagctaaaaaggtgttcatcgaggacgtgtcgcgggaattcgtggaagagttcatttggccggcgatccaatcctcagcactgtacgaggaccgctacctccttggtacctccctcgccagaccctgcatagctcgcaagcaggtcgaaatagcccagcgggaaggcgcgaagtatgtgtcccatggcgctaccggaaaagggaacgaccaggtacgctttgagctgtcctgttactccctggcaccccaaatcaaggtgatcgccccttggcggatgcctgagttctataaccggttcaagggtcgaaacgatctgatggaatacgctaagcaacacggtattccgattcctgtcaccccgaagaacccttggtctatggatgagaatctgatgcacatctcctacgaggcggggattcttgagaaccccaagaaccaggccccaccaggtctttatactaaaacccaagacccggccaaggcccctaataccccggacatcttggaaatcgagtttaagaagggcgtgccggtgaaagtgactaacgtcaaggacggaactacccatcaaactagtctcgaacttttcatgtacctgaatgaggttgccggcaagcacggggtgggacggatcgacatcgtggaaaacaggtttattggtatgaaaagcaggggaatctacgaaacgccggcaggaactatcctctaccacgctcacctggacatcgaggccttcactatggatcgcgaggtgagaaagatcaagcaaggccttgggttgaagttcgccgaacttgtatacaccggattttggcattctccagaatgcgaattcgtgagacattgtatcgcgaagagccaggagcgagtggaaggaaaagtccaagtttcggtcctgaaaggtcaggtctacattcttggaagggagtcaccgctgagcctctacaacgaagagctggtgtcgatgaatgtgcagggagactacgagccaaccgacgcgactggattcatcaatatcaattcgttgcgcctcaaggaataccaccgccttcagtccaaggtcacggcgaaa

SEQ ID NO: 6959 - DNA, 1236 bp, synthetic construct; identical to SEQ ID NO: 6911
  misc_feature 1..1236: note = source = /note="Description of Artificial Sequence: Synthetic coding sequence"
  source 1..1236: mol_type = other DNA

SEQ ID NO: 6960 - DNA, 1236 bp, synthetic construct
  misc_feature 1..1236: note = source = /note="Description of Artificial Sequence: Synthetic coding sequence"
  source 1..1236: mol_type = other DNA
atgtcgagtaagggttcggtggtcctggcatactcggggggattggatacttcgtgtattctggtgtggctcaaggaacaggggtacgatgtgattgcctaccttgctaacattgggcagaaagaggactttgaagaagcgagaaagaaggctcttaagctcggagcaaagaaggtctttattgaggatgtgtcaagggaatttgtagaagagttcatctggcccgcaatccagtcgtccgcactgtacgaggatcgctacctcctcggtaccagccttgcgcggccttgtatcgcccggaaacaagttgaaattgcgcaacgagagggagcaaagtacgtcagccacggagcaaccggaaaaggaaacgaccaagtgcgatttgaactttcatgttacagtctggcccctcagattaaagtgatcgccccgtggcgcatgcctgaattctataacagatttaagggaagaaacgatttgatggaatacgcaaaacagcatggaattccaattcctgtcactccgaagaacccgtggtccatggacgaaaatctgatgcatatctcctacgaggccggaatcctggaaaatccaaaaaaccaagcacccccaggcctttacaccaagacccaagatccagctaaggcccccaatactccagatatcctggagatagagtttaagaagggagtcccagtaaaggtgaccaatgttaaagacggcacgactcatcagaccagcctcgagcttttcatgtatctgaatgaagtggcgggaaaacatggagtaggtcgcatcgatattgtcgaaaaccgttttatcggcatgaagagcaggggtatatacgagacgccagcaggtaccatcctgtaccacgcacaccttgatatcgaagcatttactatggatcgggaagtccgcaaaatcaagcagggtctgggcttgaaattcgcagagcttgtgtatactggcttctggcattcacctgagtgcgaattcgtgagacattgcattgcaaagtcccaagaacgcgtggaaggtaaagtgcaagtgtcagtgctcaaggggcaagtctacatacttggcagagagtcccctttgtcgctgtacaacgaagagctcgtctcaatgaatgtgcaaggagattacgaaccaacggacgcaactgggtttatcaacattaactccctcaggctcaaggaataccacaggctccaatcgaaagtcactgccaag

SEQ ID NO: 6961 - DNA, 1236 bp, synthetic construct
  misc_feature 1..1236: note = source = /note="Description of Artificial Sequence: Synthetic coding sequence"
  source 1..1236: mol_type = other DNA
atgtcgtctaaaggaagcgttgtgctggcctattcagggggcctagacacttcatgcatcctggtttggctcaaagaacagggatatgatgtgattgcctatttggctaacatcggacagaaagaggacttcgaagaagcccgcaaaaaggcgctaaagctgggcgccaagaaagtgtttattgaggatgtctcaagggagtttgtcgaagagtttatatggccagctatacaatccagcgccctatacgaggatcggtacctgctgggcacaagccttgctcggccttgtattgcgaggaagcaagttgaaatcgcacagcgggaaggagcaaaatacgtaagccacggcgctaccggcaagggcaacgaccaagtgagattcgagctatcgtgttactccctcgccccacagatcaaggtgatcgcaccttggagaatgcccgaattctataacaggtttaagggcagaaatgatctcatggaatacgccaagcagcatggtattcccatcccagtgacaccaaaaaacccctggagtatggacgaaaatttaatgcacatctcttacgaggcaggcatcttagagaatcctaagaaccaagcccctccaggcttgtacaccaagacgcaagatccagccaaggcacccaatactccagacatactggagatcgagttcaagaaaggggttcccgtcaaagttactaatgttaaagacggcacaacccatcagacttctctggagctgttcatgtacttaaatgaagttgctggcaaacacggcgtgggcagaatcgatatcgtggagaataggttcatcggcatgaaatctcgaggaatctacgagactcctgccggaacgatcctttaccacgcccatcttgacatcgaggcctttacaatggaccgcgaagtccgtaagatcaagcaaggcttggggttgaaatttgcggaactggtctataccggtttttggcactcacccgagtgtgaattcgtccgacattgtatagccaagagccaggagagggtcgaggggaaggtccaggtgtctgtgctgaagggacaggtctatatcctgggacgcgagtcccccctctctctttacaacgaggagctggtgagcatgaacgtccagggtgactatgagcccacagatgccacagggtttattaacattaactctctgcggctaaaagaatatcacagactacagtccaaggttactgccaag

SEQ ID NO: 6962 - DNA, 1236 bp, synthetic construct
  misc_feature 1..1236: note = source = /note="Description of Artificial Sequence: Synthetic coding sequence"
  source 1..1236: mol_type = other DNA
atgtcgtcgaagggatcggtggtgctggcatacagcggaggacttgatactagctgtattctggtgtggctgaaagagcaaggctacgacgtgatcgcgtacctcgcaaacatcgggcagaaggaagattttgaagaagcgagaaagaaggctctcaagctgggtgcgaaaaaagtgttcatcgaggatgtctcccgcgaatttgtcgaggaattcatctggccagccatccagtcgtcggccctgtatgaggaccgctacctcctcggtacctccctggctcgcccgtgcattgcccggaaacaagttgaaatagcccagcgagaaggagcgaagtatgtcagccatggtgccacgggaaaaggtaacgaccaggtccgcttcgagctgagctgctacagcttggctccacaaatcaaggttatcgcgccctggcggatgccagagttctacaaccggttcaagggtcgcaatgaccttatggagtacgcgaagcagcatggaatcccaatcccagtgaccccgaaaaacccatggtccatggatgaaaatctcatgcacatcagttacgaggccggaatcctggagaacccgaagaatcaagctcctccgggactgtacactaaaactcaggacccggccaaagcgccgaataccccagacattttggagatcgaatttaagaagggcgtgcctgtgaaggtcaccaacgtgaaagacgggaccacgcaccagacctcactggagctgttcatgtacttgaacgaggtggccgggaagcatggtgtgggacgtatcgatatcgttgaaaatagattcattggaatgaagtcgcggggaatctatgagactccggctggtacgattctgtaccacgcccatctggacatcgaagcctttactatggacagggaagttcggaagataaagcaaggattgggactgaaattcgcggagctggtttacactgggttctggcacagccctgagtgtgaattcgttcgacactgcattgcgaaatcacaggagagagtggaaggcaaggtgcaggtcagcgtactgaaaggccaagtgtacatcctggggagagaatcaccgctctctctgtacaacgaagaactcgtgtccatgaacgtccagggggattacgaaccgaccgatgccaccggcttcatcaacatcaactccctgcgtctcaaggaataccacagacttcagtccaaagtcaccgccaaa

SEQ ID NO: 6963 - DNA, 1236 bp, synthetic construct
  misc_feature 1..1236: note = source = /note="Description of Artificial Sequence: Synthetic coding sequence"
  source 1..1236: mol_type = other DNA
atgagttccaaaggcagtgtcgtgctcgcttattcagggggacttgacacctcgtgcattctcgtgtggctgaaggaacaggggtatgacgtgattgcctatctggcaaacattggccagaaggaggacttcgaagaggccagaaaaaaagcgctaaaactgggggcgaagaaagtgtttatcgaggatgtgtccagagagtttgtagaagagtttatttggcctgccatacagagtagcgccctgtacgaggatcgctatttactgggaacgtctctggccagaccatgtatcgcacgcaagcaagtggagatcgctcagcgtgagggcgccaaatatgtgagtcacggggcaactggtaaggggaacgatcaggtccgctttgaactcagttgttattcacttgcacctcaaatcaaagtcatcgccccctggcggatgccagaattctataatcgcttcaaagggcggaacgacctgatggagtatgcaaagcaacacggaatccccattccagtaactcctaaaaatccctggtctatggacgagaaccttatgcacatatcctatgaggctggcattctcgaaaatccaaaaaaccaggccccccctggcctctatacgaaaacccaggatcctgccaaggcacctaatactccagacattttggagattgaattcaaaaagggtgtgcctgtcaaggtgactaacgtcaaagacgggacaactcaccagacttccctcgaactctttatgtacctgaatgaagtggctggaaagcacggggtcggtcgcatcgatatagtggagaatagattcatcggcatgaaatcgcgcggtatatatgagacgccagcaggtaccattctgtatcatgcacacttggatatcgaggcctttactatggatagagaggtccgcaagataaagcaagggctgggcctgaagtttgccgaacttgtttacactggcttttggcacagccccgaatgtgagtttgtgcgacattgcatcgcaaagtcccaggagagagtcgaaggcaaagtgcaggtctctgtgctgaagggccaggtatacatcttgggcagagaaagtcccctcagtctttacaatgaggaactcgtttcaatgaacgttcagggggattacgagccaactgatgccactggctttatcaatataaattctttgcgtctgaaagagtaccataggcttcaatcgaaagttactgcaaag

SEQ ID NO: 6964 - DNA, 660 bp, synthetic construct
  misc_feature 1..660: note = source = /note="Description of Artificial Sequence: Synthetic coding sequence"
  source 1..660: mol_type = other DNA
atggagctgggcctaggcggcctcagcactctcagtcattgcccatggccacggcagcaaccagccctgtggcccaccttggcggcgcttgcactgctgagcagcgtggcggaagcaagcttgggatcagccccccgctcacctgcaccgcgcgaaggtccgcccccagtgttggcgtctcctgccgggcacctgcccggaggacgaacagctagatggtgtagcgggcgggccaggagacccccccctcaaccaagtcgacctgcaccccccccgcctgccccaccctccgccctgcctagaggtggcagggccgctcgggcaggcgggccggggtcacgcgctcgggccgccggggcccggggctgtaggctgcgctcacagctggtgccagtgagggcccttgggcttggacatcgctcagatgagctcgtcagattccgcttctgctccggtagctgtcggagagcccggtcgccacacgacctttccctagcctcactcctgggggctggcgccttaagaccacctcccgggtctagacctgtcagccagccttgctgtcgccccacgaggtatgaagcggtgagctttatggacgtcaattcaacatggaggaccgtggataggctctcagcgaccgcgtgtggatgcctcggg

SEQ ID NO: 6965 - DNA, 660 bp, synthetic construct
  misc_feature 1..660: note = source = /note="Description of Artificial Sequence: Synthetic coding sequence"
  source 1..660: mol_type = other DNA
atggaactgggacttgggggactgtcgaccctttcccactgcccctggccccgccaacagcctgcactctggcctaccctggcagcactggcactgctgtcgtcagtggcagaagcatcgcttggatcggcccctcgttcccctgcacctagagaaggacctccgcctgtgcttgcctcgccagcaggacaccttcccggtggccgcactgccagatggtgctccggtcgcgcgcggcgccctcctccacaaccttcaagacctgcaccaccacccccagcaccaccatctgcgttgcctcgtggggggcgagcagcgcgagcaggtggacctggtagccgtgcccgagccgcaggtgcaaggggttgtagacttagatcgcaactggtgcccgtgcgcgcactgggactgggtcacagatcggacgagctggtgagattccggttttgcagcggcagctgcagacgagctagaagcccccacgatctctcacttgcatcgcttcttggagcaggggctctgaggcctccccctggctcccggcctgtctcccagccatgctgtcgacctactcgttacgaagctgtgagctttatggatgtgaactcaacttggcgcaccgtggatagactctccgcgacggcatgtggatgccttggc

SEQ ID NO: 6966 - DNA, 660 bp, synthetic construct
  misc_feature 1..660: note = source = /note="Description of Artificial Sequence: Synthetic coding sequence"
  source 1..660: mol_type = other DNA
atggagctcggactgggaggactttcaacgctttcgcactgtccatggccaagacagcaaccagcgctttggcccacgcttgctgctcttgcccttctgtcctcagtcgccgaagccagcctgggctcggccccgagatccccggcgcctcgggaagggcctcctccggttttggcatcaccagcgggccacctgcccggagggaggactgctaggtggtgctcaggcagagcccgccgcccaccgccacaaccaagccgcccagcacctccacctccggccccgccttcggccctcccacgcggaggcagagcagccagagccggagggccagggtcgcgggccagggcggcgggcgctcgcggatgccgcctgaggtcccagctcgtgcctgtccgcgcactcgggctgggccaccggagcgatgaactggtgcgctttcgcttctgcagcggatcgtgtcgtcgcgctcgctcgccgcatgatctgtcgctcgcgtcacttttgggcgccggcgcactgcgcccaccgccgggatcgcggcccgtcagtcagccgtgctgccggcccactaggtacgaggccgtgagctttatggacgtgaactccacctggcggaccgttgacagactgtcggctaccgcttgtggatgcctcgga

SEQ ID NO: 6967 - DNA, 660 bp, synthetic construct
  misc_feature 1..660: note = source = /note="Description of Artificial Sequence: Synthetic coding sequence"
  source 1..660: mol_type = other DNA
atggagttggggctgggggggctaagtactttaagccactgtccctggccccgacagcagccagcactgtggccaacactggcagctctggcactgctttcctctgtggccgaggccagcctgggcagcgctcctaggtcccccgccccccgcgaagggccacctcccgtgctcgcctcgccagctgggcatctgccaggcggccgtaccgccagatggtgcagcgggagagcccgcaggcctccgccccagccatctcggccagctcccccaccccccgcccctccaagtgccttgcctcgaggagggagagccgcccgggccggtggccctggcagtcgcgcccgggcggcaggggctagaggctgtcgcctgcggagccagcttgttccagtccgcgcattggggttgggacatagatccgacgaactcgtgaggttccggttctgttcagggagttgtaggcgcgcacgctctcctcacgatctatctttagcgtcccttctcggcgccggggccctcagaccacccccaggttctcgtcctgtctctcaaccatgctgtaggccaacccgctacgaagcagtgagttttatggatgtcaattcgacttggcggaccgtggacagactttctgcaactgcttgcgggtgtcttggc

SEQ ID NO: 6968 - DNA, 660 bp, synthetic construct
  misc_feature 1..660: note = source = /note="Description of Artificial Sequence: Synthetic coding sequence"
  source 1..660: mol_type = other DNA
atggaactgggactcgggggactctcaaccctgtcccactgcccatggccaagacagcagcctgcactgtggccaaccctcgccgcgctcgcacttctctcctccgtggcggaagcctcgttggggtctgcccctagatcgccggcgccacgcgaaggaccgccgccggtgctggcatcaccggcaggacacctgccaggcgggcgcactgcacgctggtgctcaggccgggcgagacggccgccgcctcaaccatcccgaccggccccaccgcccccagccccgccgtccgcgctgcctcgagggggccgcgcagctagggcaggcggacctggaagcagggcgagagcagccggagcgcgcggctgcaggctgagatcgcagcttgtcccggtgagagcactgggattgggccacagatcggacgaactggtccgcttccgcttctgcagcggttcgtgcaggcgcgcgagatccccacatgacctgtccctggcctcactgctgggcgccggtgctctgcgccctccgcccgggtcgcgcccagtcagccagccgtgctgtcgaccaacccgctatgaggctgtgtcctttatggatgtgaactcgacctggagaaccgtggataggcttagcgccactgcttgtggatgcttggga

SEQ ID NO: 6969 - DNA, 660 bp, synthetic construct
  misc_feature 1..660: note = source = /note="Description of Artificial Sequence: Synthetic coding sequence"
  source 1..660: mol_type = other DNA
atggaacttggactcggagggctttccactctatctcactgtccttggcctaggcagcagccagccctatggccaacattagcagccctcgcactcctcagttcggtagccgaagcctcattggggtctgcacccagaagtcctgccccacgagagggaccaccccccgtcctcgcttctcccgctggacacctccccggggggagaacagcacgatggtgtagtggaagggccagacggcctcctcctcagccctcccgtcctgctccccccccccccgcacctccctctgccctgccacgcggagggagagctgccagggctggagggcctgggagtagggccagagcggctggagcgcgagggtgcagactgcgcagtcagctcgttcctgtgcgagctttaggactgggacatcgaagtgatgaactcgtgcggttccggttttgttccggaagttgtcgaagggccagaagtccgcacgatctcagtctggcgtccctccttggagcgggggctcttaggccacctcccgggtctcggccagtctctcaaccttgctgtcgccccactcggtatgaagctgtgtcttttatggatgtgaactcaacttggaggacagttgatagacttagtgctactgcatgtgggtgcctggga

SEQ ID NO: 6970 - DNA, 660 bp, synthetic construct
  misc_feature 1..660: note = source = /note="Description of Artificial Sequence: Synthetic coding sequence"
  source 1..660: mol_type = other DNA
atggagctaggcctggggggactgtccacattaagtcactgcccatggccgaggcagcagcctgctctgtggcccaccctggccgccctggccctcttgtcctccgtggccgaagcctccctcgggtccgcccctcgcagccctgcaccgcgcgagggcccacctcccgtgctcgcctcgccagcgggtcacctgcccggcggtagaaccgcgagatggtgctcgggtagggcccggagaccgcccccacaaccatcgagacctgctccacccccaccggctccccctagcgcactccccaggggcggacgcgctgcacgggccgggggacctggtagtcgggccagggccgccggcgctagaggatgccggctgaggtcacagctggtgcccgtccgcgccctgggactgggtcaccggagcgatgaattggtgcggttcagattctgttccggaagttgtaggcgtgctcgctccccacatgacctatctctggcttcacttctgggagccggcgccctcagaccaccgccagggtcccggcccgttagccagccgtgttgtcggcctacccgttatgaggcagtgtccttcatggatgtcaacagcacctggagaactgtggaccgcctgtcggcaacggcatgtggttgcctcggc

SEQ ID NO: 6971 - DNA, 660 bp, synthetic construct
  misc_feature 1..660: note = source = /note="Description of Artificial Sequence: Synthetic coding sequence"
  source 1..660: mol_type = other DNA
atggaactggggcttggaggcctgtcaacactgagccattgtccatggccacgacagcaacccgccctgtggccaacattagcagcccttgcgctcctcagttccgtagccgaggccagcctagggtccgccccgcgaagcccggcccccagagaagggccccctcccgtgttggctagcccagcagggcacttaccaggcggaagaacagcccgctggtgttctggaagagcccggcgccctccaccacagcccagcaggcctgctccaccaccccccgcgcccccaagcgcactgccacggggtggacgggcagctcgtgctggagggccgggatctagggcgcgcgcagcaggcgcccggggatgtagactcagatctcagttggtaccagtgagagctctgggtctgggacatagaagcgatgagctggttagattccgattctgtagtgggagctgtagacgagcacgtagcccacacgatttgtccctggccagtctccttggagctggagcactgcgcccaccccccggatcccgtcccgtgagccagccttgttgcaggcccacccgttacgaagcagtatcttttatggatgtgaattctacatggagaacagtggaccgtcttagcgcgaccgcctgcggttgcctcggt

SEQ ID NO: 6972 - DNA, 660 bp, synthetic construct
  misc_feature 1..660: note = source = /note="Description of Artificial Sequence: Synthetic coding sequence"
  source 1..660: mol_type = other DNA
atggagctcggtcttggcggcctgtcaaccctcagccactgtccctggcccagacagcagcccgcactgtggcctacgctagccgccctggcccttctaagctcagtggccgaggcatccttaggttccgcgccgagatcaccagcaccgagagagggccctccacctgtgctagcatcaccggccggtcatctgccgggtggcagaactgcccgatggtgttcagggagagctcgccggcccccccctcagccttcacgcccagcccccccaccacctgcgcctccaagtgctctcccgcggggaggacgggcggcacgggctggaggcccagggtcccgagccagggccgcaggtgcaaggggctgccggttacggtcacaacttgtgcccgtcagagcactcgggttgggacataggtccgacgagctcgtgcgctttagattttgctctgggtcatgcagacgcgcacgtagcccccatgatctgagcttagcctcactgctcggagcgggcgcactgcgcccgccaccgggctcccgtcctgtgtcgcaaccttgctgtcgacccacccggtatgaagctgtatctttcatggatgtcaactcaacctggaggactgtcgatcgcctgagcgccactgcttgcggatgtctcgga

SEQ ID NO: 6973 - DNA, 660 bp, synthetic construct
  misc_feature 1..660: note = source = /note="Description of Artificial Sequence: Synthetic coding sequence"
  source 1..660: mol_type = other DNA
atggagctgggactgggcggactgagtacccttagtcactgtccctggcctaggcagcagcccgccctctggcccactcttgcggcactcgcgctgcttagttccgtggccgaggcctccctagggtcagctcccaggtcccccgccccccgcgaggggcctccccccgtgttagccagccccgccggacaccttccaggggggaggaccgcccggtggtgctccggaagagcacggcgcccgccgccccagccaagtcgaccagcccctcccccacctgcaccaccatctgctcttcctcgcggtgggcgcgcggcccgcgcgggaggacctggctcacgggccagggccgctggggcaagaggctgccggctcagatctcagctcgtgccggtaagagcccttggactcggccatcggtcagacgagctggtccgattcaggttctgctccggcagttgtcggcgcgccaggtccccccacgatttatcactggcatccctcttgggggccggagccctgagacccccccccggcagccggccagtgtcccagccctgttgtaggcccacccgctatgaggcggtatccttcatggacgtgaacagtacctggcgaaccgttgaccggttgtctgctaccgcttgtgggtgcctcgga

SEQ ID NO: 6974 - DNA, 660 bp, synthetic construct; identical to SEQ ID NO: 6972
  misc_feature 1..660: note = source = /note="Description of Artificial Sequence: Synthetic coding sequence"
  source 1..660: mol_type = other DNA

SEQ ID NO: 6975 - DNA, 660 bp, synthetic construct
  misc_feature 1..660: note = source = /note="Description of Artificial Sequence: Synthetic coding sequence"
  source 1..660: mol_type = other DNA
atggagctgggtcttggtggactgtcaactctttcgcactgtccatggccgcgccagcagccagctctgtggcctacccttgccgcactggctttgctctcgtccgtggctgaagcatcgctgggctcagctcctcgttcgcctgccccccgcgaggggcctcctccagtgcttgcatcacctgcaggacatctgccaggtggtcgaaccgccagatggtgtagcggtcgggccagacgtccacccccacagccctcaagaccggcacccccaccgccagccccgccctcagcactccctagaggagggcgcgcagcacgcgcaggaggtccaggaagccgcgctcgagcagcaggtgcccgaggatgtcgacttagatcccagctggtccctgtgagagcactgggactcgggcacagatccgatgagctcgtgcgatttagattctgtagcggatcctgccggagggcacgttcccctcacgatctgtcgctggcatccttgcttggggctggggcccttagacctccccccggaagccgcccggtgtcacaaccatgttgccggccaacgcgctacgaagccgtcagttttatggatgttaactcgacctggcggaccgtggacagactgtcagcaactgcatgcgggtgtttggga

SEQ ID NO: 6976 - DNA, 660 bp, synthetic construct
  misc_feature 1..660: note = source = /note="Description of Artificial Sequence: Synthetic coding sequence"
  source 1..660: mol_type = other DNA
atggagcttgggcttggaggcctctcaaccctgagccactgcccttggccacgccaacaaccagcgctttggccgactctggcggccctggccctgctcagctcagtcgctgaggcctcgctcggatcagcaccgagaagccctgcgccgcgtgaggggccgccccctgtgctggccagcccggccggacacctgcctggcggcagaacggcccggtggtgcagcggaagggcgcgccggcctcccccacagccatccagaccggctcccccgccaccagcaccgccatcagctctgccaagaggaggacgggcagctcgcgccggaggaccaggatcacgtgcccgggctgcgggtgcccggggctgtcgtttgaggtcgcagttggtgccggtgagagccctcggcctggggcatcggtcggatgaactcgtacgcttccgcttctgttccggatcctgcaggcgcgcacggtccccgcacgatctgtccctggcgagtctcctgggcgctggggcacttcgcccgccgccgggatcgcggcccgtgtcccagccttgttgcaggccaacccgctacgaagcggtgtccttcatggacgtgaactccacttggagaactgtcgacagactctcggcgaccgcgtgcggttgccttgga

SEQ ID NO: 6977 - DNA, 660 bp, synthetic construct
  misc_feature 1..660: note = source = /note="Description of Artificial Sequence: Synthetic coding sequence"
  source 1..660: mol_type = other DNA
atggagctgggcctcggcggtttgtccacactgtcacattgcccatggccaaggcagcagcccgcactgtggcccactctggccgctctggctctcctcagtagcgtggccgaggcgagtctcggttccgccccgagatctccggcacccagagagggcccgcctcctgtcctggccagcccggcaggtcacctcccaggcggccgcacagctaggtggtgctcaggaagggcccgcaggcctcccccccaaccttctcgccctgctcccccacctcctgcccctccgtccgcgctccctcgcggaggtagggcggctagagcaggtggaccaggatcaagggctcgcgcagccggagcaaggggctgcaggctcaggagtcaactcgtacccgtgcgcgcactcggtctcggtcatagatctgacgaacttgtgagatttagattctgcagtggctcctgcaggcgcgcaagatcaccccacgatctttctctcgcctccttgcttggcgctggcgccctgagaccacccccgggatctagaccagtctcccagccatgctgcagacccacgaggtacgaagctgtgtcatttatggacgttaactccacttggagaaccgtggacaggctttctgccacagcctgcggctgtttgggc

SEQ ID NO: 6978 - DNA, 660 bp, synthetic construct
  misc_feature 1..660: note = source = /note="Description of Artificial Sequence: Synthetic coding sequence"
  source 1..660: mol_type = other DNA
atggaattaggtttaggaggattatcaacacttagtcattgtccatggccacgtcaacaaccagcactttggccaacattagcagctttagcactattaagttcggttgcagaagcttcattaggttctgctcctagaagtccagctcctagagaaggaccaccaccagttttagcttcaccagcaggacatttaccaggtggaagaacggctagatggtgttctggtagagctagaagacctccacctcaaccatcaaggcctgctcctccaccaccagctccaccaagtgctcttccaagaggaggaagagctgctagagctggaggtccaggatcaagagctagagccgccggtgcaagaggatgtagattaagatctcagcttgtgccagtaagggcacttggtttaggacatagatctgatgaacttgtaagattcagattttgctcaggatcatgtagaagagctagaagtccacatgatttatcattggctagtttgttaggagctggtgcattaagaccaccacctggatccagaccagtatcacaaccatgttgtagaccaacacgatatgaagcagtgtcttttatggatgttaattcaacatggagaacagttgatagattatcagcaacagcatgtggatgtttagga

SEQ ID NO: 6979 - DNA, 660 bp, synthetic construct
  misc_feature 1..660: note = source = /note="Description of Artificial Sequence: Synthetic coding sequence"
  source 1..660: mol_type = other DNA
atggagttagggcttggcggcctatctacgctgagtcactgtccctggccccgacagcagcctgctctctggcccacattagccgcccttgcacttctaagttcagtcgccgaggcttctttgggctcagctcctaggagcccagcaccccgagaaggtcctccacccgtgctggcatccccggccggccacctcccggggggccgcactgcgcgttggtgttcaggacgggcccggcgcccaccaccccagccatctcggccagctcctccacccccggcccctcctagcgcgttgcctcggggtgggcgtgcggccagagcaggggggcccggctctagagccagagcagcaggcgctcgggggtgtcgccttcgctcacaactggtgccggttcgcgcactgggtctggggcaccgcagcgatgagctggtcaggtttcgattctgtagcggctcatgtcggagggcccgctcacctcacgatttatccctcgcctcccttctgggagctggtgccctgaggcccccaccagggtctcgccctgtatcacagccatgctgcagaccaaccaggtacgaggccgtctcctttatggacgtgaactcgacgtggcggactgtagaccggctgtcagcgaccgcgtgtgggtgtctgggt

SEQ ID NO: 6980 - DNA, 660 bp, synthetic construct
  misc_feature 1..660: note = source = /note="Description of Artificial Sequence: Synthetic coding sequence"
  source 1..660: mol_type = other DNA
atggagctgggattgggtggactttcgaccctctcccactgcccgtggccacgccaacagccggccctctggccaaccttggccgccctggcactgctctcgagcgtcgcggaggcgtccctgggctccgcgccgcggtcgccggcaccgcgggaaggccctccacccgtcctggcctcccccgctggacatctcccaggaggtcggactgcccgctggtgctcgggccgcgcaaggaggcctccccctcagccgagcagacccgctccgccaccacctgcccctccatctgctctccctcggggaggcagagcggctcgcgcaggtggaccgggttcgcgcgccagagccgcaggagcacgtggatgtcggttgcggagccagcttgtgccggtgagagccctgggactcggacatcgtagcgacgaacttgtccggttccgcttctgctcgggatcctgtagacgggcacgcagcccgcacgacctgagcctcgcttctctgctgggcgccggtgccctgcgccctccgcccggctctcggccggtcagtcagccatgctgccggccgacccggtacgaagccgtttcattcatggacgtgaactccacctggagaactgtggaccgcctgtcggcgacggcatgtggatgcctcggc

SEQ ID NO: 6981 - DNA, 660 bp, synthetic construct
  misc_feature 1..660: note = source = /note="Description of Artificial Sequence: Synthetic coding sequence"
  source 1..660: mol_type = other DNA
atggagttgggcctgggcggcctgagcacactgtcgcactgcccctggccccgacaacagcctgccctttggcccacccttgccgccctggcgctcctgagttcggtcgctgaagctagcctgggcagcgcccctcggtcccccgcacctagagaaggaccccccccggtccttgcgtcacccgccggccacttgcctgggggaaggaccgccagatggtgctcaggtcgggcaagaagaccccctccccagccttcgcgccccgctccccctccccctgcccctccttccgcactgcccagaggggggagggctgcacgggcaggaggccctgggtcgcgggcacgagcggctggagcgcgcggctgcaggctgagatcgcagttggtcccagtgagggccctgggtctcgggcatagatccgacgagctagtgagattcaggttctgctctggatcctgtcggcgcgcaagatctccgcacgacctgtccttggcgtctttactgggggccggggctctgcgcccaccgccgggctcccggccagtgtcgcaaccatgctgccgcccaaccagatacgaagccgtgagctttatggacgtcaactcaacatggcggacagttgataggctgtcagcaacagcctgcggctgcctgggc

SEQ ID NO: 6982 - DNA, 660 bp, synthetic construct
  misc_feature 1..660: note = source = /note="Description of Artificial Sequence: Synthetic coding sequence"
  source 1..660: mol_type = other DNA
atggaacttgggcttggaggtctgtcaactctctcgcactgtccttggccaaggcagcaaccagctttgtggcccactctggctgcactcgctcttcttagtagcgttgctgaagcatccttgggtagtgctccccgctctccagccccacgagagggcccccctcctgttcttgcctcaccagctgggcatctaccgggtgggagaacagcacggtggtgcagtggtcgtgcaaggcgcccaccaccgcagccttctcgaccagcacctccacctccagctcctccttcagctcttccgcgtggcggcagggctgctcgggccggtggtccaggtagtcgtgcacgagcagctggcgcacgtgggtgccgtctgaggtctcagttggttcccgtgagagcattgggtttaggacatcggtcagatgagttggtgaggtttcgattctgttcaggaagctgcaggagagctcgtagcccccacgatctttcactggcgagcttgctgggtgcaggggcgctgcgtcctcctcctggatctaggcctgtgagtcaaccgtgctgcagacccactagatacgaggccgtatcattcatggacgtgaattctacttggcgcaccgttgaccgacttagcgcaacggcttgcggctgtttaggt

SEQ ID NO: 6983 - DNA, 660 bp, synthetic construct
  misc_feature 1..660: note = source = /note="Description of Artificial Sequence: Synthetic coding sequence"
  source 1..660: mol_type = other DNA
atggaactgggcctcggtggactgtcgacattatctcactgtccgtggccccggcaacaacctgctctgtggccaacccttgcagccctggcattactttcaagcgtcgcagaagcaagtttaggttctgctccgcgttctccggctccgcgcgaaggtccacccccggttcttgcgagcccggcaggtcatctccctggtggtcggacagctagatggtgttcaggaagagcaagaaggcctcctccacagccgtcaagaccagcgccgccgccgccggcaccgccatcagccctgccaagaggcgggcgcgccgcaagagcggggggcccgggttctcgtgcaagagctgcgggcgcgcgcggctgcagactgcggtctcaactcgtcccagtgcgcgcgctgggtctgggacatcgctcagatgaattagtgcggtttcggttctgtagcggctcctgccgcagagctcgatccccgcacgacctttcccttgccagcttactcggagcaggggcgctcagaccgccgccgggctcccggccggtttcccagccttgctgccggcctaccaggtacgaggctgtgtcatttatggacgttaactctacgtggcgtaccgttgaccgcttaagcgcgactgcttgcggatgtttaggt

SEQ ID NO: 6984 - DNA, 660 bp, synthetic construct
  misc_feature 1..660: note = source = /note="Description of Artificial Sequence: Synthetic coding sequence"
  source 1..660: mol_type = other DNA
atggagctcggcctgggaggactgtcgactctttcccactgcccgtggcctaggcaacagccagctctctggccgaccctggccgctctcgcactcctgtcgtcggtcgctgaggcgtccctcgggtcagcaccacgaagccccgctccccgcgaaggtccgccgccagtgttggcgtcgccggcaggacacctgccgggaggaaggaccgcgcggtggtgctcggggcgcgcgaggcgccctccgcctcagccatctcggcctgcacctccgccgccggctcccccgtcggccctccctagaggtggacgcgccgcaagagcaggaggcccaggttcacgggcgcgggccgcaggcgccaggggctgccggctgcgatcacaactggtgccagtccgagccctgggcctgggccataggtcagacgagctcgtgcgattcagattctgctccggcagctgtcgccgcgcgcgcagcccgcatgacctgtcgctggcctcgcttttgggcgcgggcgcgctgaggccgccgcctggtagcagacctgtctcgcaaccgtgttgccgaccaacgcgctacgaggccgtgtcatttatggacgtgaactccacctggcgcactgtggatagactgtcggccactgcctgcggatgcctgggc

SEQ ID NO: 6985 - DNA, 660 bp, synthetic construct
  misc_feature 1..660: note = source = /note="Description of Artificial Sequence: Synthetic coding sequence"
  source 1..660: mol_type = other DNA
atggaattgggactcggaggactttccactctctcacattgtccttggcctaggcagcagccagcactctggccgacccttgcagccctggcactgcttagctctgtggcagaggcatccctgggatccgcaccacggtcgcctgcgccgcgcgaagggcctcctcctgtgctggcatcaccggctggacatcttcccggtgggagaaccgcacggtggtgttccggaagagctcgcaggccacctcctcaaccttcgaggcctgcgcctcccccgcctgcaccaccgtccgccctgcccagaggggggagggcggcaagagcaggaggacctggttcgagagcaagagccgcgggtgcccgcggatgtcgcttgcgcagccagctggtgccagtccgtgcgctgggtcttggacaccggtcggatgaacttgtgcgttttagattttgttctggtagctgtagaagagcccggtcgcctcatgatctttcactggcttccctgctgggtgcaggagcacttagacctccccccggttcaagaccagtgagccaaccttgctgtcggcctactagatacgaagcagtgagctttatggacgtgaattccacctggcgcactgtggatcgactctcggccacggcatgcggatgtcttgga

SEQ ID NO: 6986 - DNA, 660 bp, synthetic construct
  misc_feature 1..660: note = source = /note="Description of Artificial Sequence: Synthetic coding sequence"
  source 1..660: mol_type = other DNA
atggaactgggactcggaggactttcgactctcagccactgcccatggccgagacaacagccggctctgtggcctactctggccgccctcgccctgctctcgtcggtggccgaggcctcccttggttcggcgccgcgctctcccgcaccgcgcgaaggccctcctccggtgctcgcctcacccgcagggcacctgccaggaggcagaactgcacggtggtgctccgggagagcgagacggcccccaccccaaccgtcgcgcccggcacctccgccaccggccccgccgtccgccctcccaagaggtggaagagctgcacgcgctgggggacccggaagccgcgcccgggccgcaggcgcccgcggatgccggctgcgtagccagctcgtgcctgtgcgggccctcggactggggcatcgctcggacgagcttgtgaggttccgcttctgcagcggaagctgccgccgggcacgctccccgcacgatctctcgctggcgagcctgctgggagctggagcgctgcggccgccaccgggatcccgtccggtgtcccagccctgctgcaggccgaccaggtacgaagccgtgagctttatggacgtgaactcaacttggagaaccgtggacagactctcggcaaccgcctgtggatgcctcgga

SEQ ID NO: 6987 - DNA, 660 bp, synthetic construct
  misc_feature 1..660: note = source = /note="Description of Artificial Sequence: Synthetic coding sequence"
  source 1..660: mol_type = other DNA
atggagttgggattgggtggcctgtctactcttagccactgcccctggcctaggcagcagccagctctctggcccactctcgccgctttggccctcctgtccagtgtggcagaggcttcactgggatccgccccaaggtctcctgcccctagggaaggtcctcccccagtgcttgcttcccccgccggacacttgcctggtggtaggactgctcgttggtgctctggaagggcaaggcgtccacccccccagccttcccgcccagctccccccccccctgcccccccaagcgccctgccaaggggaggacgtgcagctcgcgccggaggccccggctctagggctcgcgccgcaggcgctcgtggatgtcgtctcagatcccaactggtgcccgtacgcgctcttggtctgggtcatcgctccgatgagttggtaaggttcagattttgcagtggaagttgtaggcgcgccaggtcaccacatgacttgtccctggcttccttgctcggagcaggcgcactgcgtcccccccccggttccaggcctgtttcacagccctgctgtcgccccactcgctacgaggccgtttccttcatggatgttaacagcacctggagaacagtggacaggttgtctgccacagcctgtggatgcttgggt

SEQ ID NO: 6988 - DNA, 660 bp, synthetic construct
  misc_feature 1..660: note = source = /note="Description of Artificial Sequence: Synthetic coding sequence"
  source 1..660: mol_type = other DNA
atggaattaggactgggagggctttccaccctgagtcactgcccctggccccggcagcagccagctctgtggccaaccttagctgccctagctctgttatcgagcgttgccgaggcttcactgggctctgccccccgctctcccgcccccagagaaggcccacctccagtgttagcctcgcctgcaggccatttgcctggcggtcgcacagccagatggtgttctgggcgagcccgacgcccaccaccccagccttccaggcccgcgcctcccccccccgctccgcccagcgctctgccaagagggggcagggcagcaagagcgggagggccaggaagcagggcacgggccgcaggtgccagaggatgtcgcctgcgcagccagctggtaccggtgagggccctcggcttagggcatcgatcagacgaattggtgaggttccgtttctgtagtggctcttgccgacgagccagaagtccacacgacctgtccctcgcgagccttctcggagccggcgcattaaggccaccaccgggatccagacctgtcagccagccctgctgtcgccccacgcgctacgaggccgtgtccttcatggatgtcaatagcacttggagaaccgttgacaggctgtcagccactgcatgtggctgtctgggg

SEQ ID NO: 6989 - DNA, 660 bp, synthetic construct
  misc_feature 1..660: note = source = /note="Description of Artificial Sequence: Synthetic coding sequence"
  source 1..660: mol_type = other DNA
atggaactgggtcttgggggcctgagcacactctcgcattgcccctggcctagacaacagcctgctttgtggcctacactcgcagccctcgccctcctgagtagcgttgccgaggccagcctcggatctgcgccaaggtcccctgcccccagggaaggacccccacccgtgttggcatctccagctggccaccttcccggtggccgcaccgcacggtggtgctctggtagagctagaagaccacccccccagcctagccgccctgcacccccacccccagccccccctagcgctcttccccgcggcggcagggcagcccgcgctggcggaccaggatctagagcgagagcggccggagcgagaggctgtagactgaggtctcagctcgttcctgtgagagcgcttggattaggacatcgctctgacgagctcgttagatttaggttctgctcaggtagctgcaggcgggccagaagcccacacgatctttcgctggctagcctgctgggtgctggagcactccgacccccccccggcagtaggcccgtcagccaaccgtgttgcaggcccacaagatatgaagcagtctcctttatggatgtcaacagtacatggcgaacagtcgacagactcagcgccacagcctgcggatgcttgggc

SEQ ID NO: 6990 - DNA, 660 bp, synthetic construct
  misc_feature 1..660: note = source = /note="Description of Artificial Sequence: Synthetic coding sequence"
  source 1..660: mol_type = other DNA
atggaactgggtcttgggggattgtcaacgctgagccactgcccctggccccgccagcaacccgcactctggccgactctcgccgccctggcgttgttgagtagtgtggcggaggcttccctcggttctgcccctcgctcacccgctccaagagagggacctccccctgtgcttgcgagccctgcagggcacttgcccgggggccggaccgcgaggtggtgctctggccgcgcaagacgacctccacctcagccctcgcgacctgcaccaccccctcccgcccccccctccgcccttccccgagggggccgggccgcgcgggccggtggacctggcagcagagccagagctgctggggcccgaggttgtcgcctgcgcagccaactggtgcccgttcgtgcactggggctaggccatcgctcagacgaacttgtaagattcaggttctgctccggctcttgcagaagggctcgctcaccccacgacctaagccttgcctctctgcttggggctggagccctgaggccaccccctggttcccggcccgtgagtcagccatgctgccgaccaacaagatacgaggcagtaagttttatggatgtcaacagcacgtggaggaccgtggatagactgagtgcgacagcatgcggctgtctggga

SEQ ID NO: 6991 - DNA, 660 bp, synthetic construct
  misc_feature 1..660: note = source = /note="Description of Artificial Sequence: Synthetic coding sequence"
  source 1..660: mol_type = other DNA
atggagctgggcctcggagggctttctactctgagtcattgcccctggcctcgccagcagcccgccctgtggccaacactggctgcacttgcgttgcttagcagtgtggccgaggcttccctcggttctgctccacgcagcccagccccaagagagggcccgcctcccgtgcttgcctcccctgctgggcacctccccggaggccgcactgccagatggtgttccggaagagcccgaagaccccctccccagccctcccggcccgcacccccaccacctgcacctccttctgccctgccgagaggaggtcgagccgcccgggctggtggtccaggctctagggcgcgggctgccggagcacgtggttgccggcttaggtcacagctggtacctgtgcgggccttggggctgggtcatcggtcggacgagttagtacgcttccggttttgctctggttcctgtcgacgggcgagatccccacacgatctgtcactggccagtctgctgggagcaggcgccctgcggccgccacctggtagccggcccgtttcccaaccctgctgtcgcccgactcggtacgaagctgtgagtttcatggatgtgaattctacctggcggacagtagatcgactttctgccactgcatgcgggtgtctgggg

SEQ ID NO: 6992 - DNA, 660 bp, synthetic construct
  misc_feature 1..660: note = source = /note="Description of Artificial Sequence: Synthetic coding sequence"
  source 1..660: mol_type = other DNA
atggagttaggtctcggcgggttatcaaccctaagccactgcccttggccaaggcagcagcctgccctgtggcccaccttagccgctctggccctcctctcaagcgtagctgaggcgagtctagggtcagctccacggagccccgcaccccgagagggcccccctcctgtgctggcttctcctgccggtcacttgcccggaggcagaaccgctagatggtgtagtggaagggcacggcgtccacctccccaaccctcgcggcctgcccctcctccacctgccccccctagcgccttgccacgcgggggtcgggcggctcgcgccggcggaccaggttccagagctagggccgcaggagcgcggggctgcaggttacggtctcagctggttcctgtgagggccctgggacttgggcaccggtcggacgaattggtgcgtttcaggttttgctccggatcctgtaggcgcgccagaagccctcatgatctgagcttggcttcactcctgggagcgggggcactgcggccccctccaggcagtaggcccgtgtctcagccctgctgccgcccaactaggtatgaggccgtgagttttatggacgtcaattctacctggagaacagttgacagactttcggccacagcatgtggatgtcttggg

SEQ ID NO: 6993 - DNA, 660 bp, synthetic construct
  misc_feature 1..660: note = source = /note="Description of Artificial Sequence: Synthetic coding sequence"
  source 1..660: mol_type = other DNA
atggagctgggtcttggtggtcttagcaccctttcgcactgtccctggccgaggcagcagcctgcactttggcctaccctcgcagcactggctctcctgagttcagtggccgaagcgagcctcggcagcgctcctagatccccggcccccagagagggacccccccccgtcctcgcatcacctgcaggacacttgcctgggggcaggaccgctagatggtgcagcggacgggcccggcgcccaccgccccagcccagccggcccgcgcctccgccgccagcacccccttctgcactgcctagaggagggcgggccgctagggcagggggcccaggttcacgagcacgggccgctggcgctaggggctgtaggttacgcagccagctggtgccagtgcgagcccttggcctgggtcacaggagcgacgagctggtacgcttcagattctgttctggatcctgcagaagggcaaggtcgccacatgacctgtcacttgcttctcttttgggcgctggagccctgaggcccccccctggaagtagaccggtctctcaaccctgttgtcgacctacccggtatgaagcagtctcattcatggacgttaactcaacctggagaactgttgatagactgagtgcgaccgcctgtgggtgtctgggc

SEQ ID NO: 6994 - DNA, 660 bp, synthetic construct
  misc_feature 1..660: note = source = /note="Description of Artificial Sequence: Synthetic coding sequence"
  source 1..660: mol_type = other DNA
atggaactcggattagggggcctttctacactctcccactgcccatggccgcgacagcagccggcgctgtggcccaccctggcagcactggcactcctgtcatctgtggcagaagccagtctcggatcggctcctcgcagcccagccccacgtgaagggcccccaccagtactagctagccccgccggccacctaccaggaggccggacagctcggtggtgcagtggtcgggcccgacgccccccgccacagcccagcagacccgcgcctcctcccccggcgccacctagtgctctccctcgcggcgggcgtgccgccagggccggaggcccaggctcccgtgctcgtgccgctggggctcgggggtgtagactgcgcagccagctggttcctgtgagggcactgggcctgggtcatcgcagtgacgagttggtaagattccgtttttgcagcggtagttgtagacgcgccaggtcaccccatgatctctccctggcaagtctgctgggcgccggagcgctgcgacccccaccggggtcgcgcccagtaagtcaaccctgttgtcggcccactcggtatgaagctgtgagcttcatggatgtgaatagtacatggcgcaccgtggacagactgagcgcgaccgcctgcggctgcctggga

SEQ ID NO: 6995 - DNA, 660 bp, synthetic construct
  misc_feature 1..660: note = source = /note="Description of Artificial Sequence: Synthetic coding sequence"
  source 1..660: mol_type = other DNA
atggagcttggactgggcggtctgtcaactttgtcccactgcccctggccgcgccaacagccagccttatggccaacactggctgctctggccctcttgtcatccgtggctgaagcctcacttggctctgcccccaggtcaccggccccccgtgagggcccccccccggtactggccagtcctgccggacacttaccaggcggccgcacggctcgatggtgcagcggccgcgcccgtagaccccccccgcaaccttctcgtccagcaccccccccaccagcacctcccagtgcgctgccgcgtgggggccgcgccgccagagcaggaggccccggatcgcgcgctcgagctgctggcgcaaggggttgccgattacgctcgcagctggtccctgtccgggccttgggtctaggtcatcgaagcgatgaactggtgcgatttcgtttctgcagcggcagctgccgccgtgcgcgctcgccccacgatttatcgttggcttcacttttgggagctggcgcactgcgaccacccccaggcagccgcccggtaagtcagccatgctgccgcccaacccgttatgaagccgtgagctttatggacgtaaacagcacttggcgcacggtggaccgcctaagtgccacggcttgtgggtgcctgggt

SEQ ID NO: 6996 - DNA, 660 bp, synthetic construct
  misc_feature 1..660: note = source = /note="Description of Artificial Sequence: Synthetic coding sequence"
  source 1..660: mol_type = other DNA
atggagctgggcctcggaggactttcgactctcagccactgtccatggccacgccagcaaccggccctgtggccaacccttgctgcgttggcgctgctttcatctgtggcagaagcgtcgctcggaagcgcccctcgctcgccagctccgcgcgagggccccccgcctgtgctggcaagcccggctggacatctgccgggtggacggacggcaaggtggtgctcgggacgggcacgccgccctcccccgcaaccatcacggcctgcgccgccgcctcctgctccaccgtcggccctccccagaggaggacgggccgctcgggccggtggcccgggatccagagcccgggccgcgggagcccgcggttgccgcctccgctcacagctcgtccctgtaagagcgcttggcctggggcacagaagtgatgaactggtgcggtttcgcttctgctccgggagctgtcgccgtgcacggtcgccccatgacctctctctcgcctcccttctcggcgccggggcgctcagaccgcctccgggctcgcgccccgtgtcccagccgtgctgccggccgacccgctacgaggccgtgagcttcatggatgtcaactcaacctggcggactgtcgaccggctttcagcaaccgcgtgcgggtgcttgggg

SEQ ID NO: 6997 - DNA, 660 bp, synthetic construct
  misc_feature 1..660: note = source = /note="Description of Artificial Sequence: Synthetic coding sequence"
  source 1..660: mol_type = other DNA
atggagctgggcctgggagggctcagtaccctcagtcactgtccatggcccagacagcagccggcactgtggccaaccttggcagccctagcccttctgtccagcgtcgcagaagcgtctctgggcagcgcccctcgaagtcctgccccgcgtgagggtccaccaccagtgctggccagcccagccggacaccttcctggaggtcgaaccgcaagatggtgctctggacgagcccgtcgaccccctccccagccctcccgacccgcgccacctcccccggctccaccttctgccttgccccgaggcggtagggcagcccgcgcaggtggaccaggctcccgagcccgtgcggctggggccagaggctgtaggctgcgatcccagctggtgcctgtgcgagctttggggctggggcatagaagcgacgagctggtacgcttccgattttgctcgggatcctgcagacgtgccagatctccccacgacctaagtctggcatcactgctgggagctggggcactgcggccaccacccggatctaggcctgtgtctcagccatgctgtcgaccaactagatatgaggccgtatcgtttatggatgtcaacagtacgtggaggacagtagaccgcctgtccgctactgcttgcgggtgtcttggg

SEQ ID NO: 6998 - DNA, 660 bp, synthetic construct
  misc_feature 1..660: note = source = /note="Description of Artificial Sequence: Synthetic coding sequence"
  source 1..660: mol_type = other DNA
atggaactcggtcttgggggactctccacgctctcgcactgtccatggccacgacagcaacctgcactgtggccaaccttggcagctctggctcttctgtcgtccgttgcagaagcctccctgggatcagcccctagaagccccgcgcctagagaaggacctcctcctgtgctggcatccccagccggacatcttccaggcggtcggactgcaagatggtgttcaggtcgggcgagaaggcctccacctcaacctagcaggccagctccgccaccccctgcccctccatccgcactcccaagaggagggcgtgcagcacgcgcgggaggcccaggatcacgagcccgggcagcaggagcacgcggatgcagactgcgctcacaactggtgcccgtgcgcgcacttggacttggtcatcgctcagatgagctcgtgagatttagattctgttcaggtagctgtcgaagagcccgcagcccacatgatctttcgcttgcatcgcttctgggcgcaggtgcgcttagacccccacctggtagccggcctgtctcccagccttgctgtcgccctacccgctacgaagcagtttcattcatggacgtaaactccacttggaggaccgtcgacaggctttccgcaactgcatgtggctgtcttggt

SEQ ID NO: 6999 - DNA, 660 bp, synthetic construct
  misc_feature 1..660: note = source = /note="Description of Artificial Sequence: Synthetic coding sequence"
  source 1..660: mol_type = other DNA
atggaactcggactggggggactctcaactctgtcgcactgcccgtggccgcgccagcagccggccctgtggccgaccctggcggccctggcccttctgtcctccgtggccgaggcgtcgctgggttccgcaccgcgctctcctgcaccacgagaaggaccgccgccggtgctcgcgtcgccggcagggcacctgcctggaggaagaactgctcggtggtgctcaggacgggcgcgcagaccgccaccccaaccctccagacccgcgcctccaccgccagctcccccttcagcgctcccacggggaggccgcgcggcaagagcaggaggacctggatctcgcgcccgcgcggcgggcgctcggggatgccggcttcggtcgcagctcgtcccggtgagggccctgggacttggacatagaagcgacgagctcgtgaggtttagattctgtagtggatcgtgccgcagagcccggagccctcacgacctctccctggcctccctgctgggagccggagccctccggccgccgcctgggtccaggcctgtctcacaaccgtgctgtcgcccaaccagatacgaagctgtctccttcatggacgtgaactcgacttggaggactgtggacagactgagcgccaccgcttgcggatgcctggga

SEQ ID NO: 7000 - DNA, 660 bp, synthetic construct
  misc_feature 1..660: note = source = /note="Description of Artificial Sequence: Synthetic coding sequence"
  source 1..660: mol_type = other DNA
atggaactgggactaggaggcctgagcacactatcgcactgtccttggccacggcaacaaccggctctgtggcccactctggctgcactggccttactgtctagcgtggctgaggcatccctcggttcagcccctcgatcccccgccccccgggaggggcccccacccgtcctagctagccctgccggtcaccttccgggcggtagaaccgctcgttggtgctcaggtagggccaggaggccgcccccccaacccagtaggcccgcaccccctcctccggcacctccaagcgcccttccacgcggtggccgagctgctcgggctggaggccctggctctcgggcccgggcagcgggtgcaagaggttgtcgcttgcgcagccagctcgtcccggtgcgggccctgggcttggggcaccggagcgatgaactagtgcgttttcgcttctgctcaggaagctgtcggcgggctcggtctcctcatgacctctccttggcctcacttctcggggccggcgcactgagaccccctccgggatccaggccggtctcgcagccctgttgccgtcccacacgctacgaggccgtctccttcatggatgtgaattccacctggcgcaccgtggacaggctgtccgccacagcctgcggatgcttaggc

SEQ ID NO: 7001 - DNA, 660 bp, synthetic construct
  misc_feature 1..660: note = source = /note="Description of Artificial Sequence: Synthetic coding sequence"
  source 1..660: mol_type = other DNA
atggagctcggcctggggggcctgtctaccctgtcacactgcccctggcctagacaacagcccgccctgtggcctacgctggcagcgctggcattgctgtctagtgtggcggaagccagcctggggagtgcgcctaggagccccgcgccacgcgaggggccccccccagttctcgcctcacccgctggacacctcccaggcggccggaccgcaagatggtgtagcggtagggctcggcggccccctccccagcctagtcgcccagcaccccccccgcccgcccccccgtctgctctgccccgcggcggaagagcggccagggctggtgggcctggcagccgcgctagggccgctggggcacgagggtgtcggctgaggagccagctggttccggtgcgcgctctgggcctggggcatcggtctgatgagcttgtccggttcaggttttgttccggaagttgcaggcgggctcggtccccccatgacctttctctggccagcctgttgggcgctggcgcccttcgccctcctcccggatccaggccagtgagtcagccttgttgccggccaaccagatatgaggcagtgtcatttatggacgtcaacagtacctggcgaacggttgacagactgtcagccacggcctgcggctgccttggc

SEQ ID NO: 7002 - DNA, 660 bp, synthetic construct
  misc_feature 1..660: note = source = /note="Description of Artificial Sequence: Synthetic coding sequence"
  source 1..660: mol_type = other DNA
atggagctgggtcttgggggcctgagcactctgagccactgcccgtggccgaggcagcagcctgcactatggcccactctggcggcgctggcgctgctgagctctgtggcagaagccagtctgggcagcgctccgcgctctccggctcctagggaaggcccccctcctgtcctcgcaagccctgctgggcacctcccggggggtcgaacggcaagatggtgcagcggtcgtgcacgacgaccaccgccacaaccgtcacgcccggctcctcctccacccgctcctccaagcgccctgcctcggggtggtcgggctgcgcgggccggtggcccgggcagccgtgcacgtgccgcaggtgctcgcggatgccgcttgcgatctcaactggtgcctgttcgcgcgttgggtctgggccaccgctctgacgaactggtgaggtttagattctgtagcggcagttgccgccgcgctcgcagcccgcacgacctgtctctcgccagcttactgggtgcgggtgcgctgcgccctccgccggggagccgaccggtgagccaaccatgttgccgtcctacccgctacgaagctgttagcttcatggacgtgaattccacttggcgcacagtcgatcgccttagcgccaccgcttgcggttgtttgggt

SEQ ID NO: 7003 - DNA, 660 bp, synthetic construct
  misc_feature 1..660: note = source = /note="Description of Artificial Sequence: Synthetic coding sequence"
  source 1..660: mol_type = other DNA
atggagcttggccttggggggttgtctacattgtctcactgcccctggccccgacaacaaccagccctttggccgactcttgcagctctggcattgctatcttcagtcgcagaggcgagcctcggaagtgcaccccgctcccctgcaccacgtgagggaccccctcctgttctggcaagcccagctggccacctgccagggggaagaactgcaagatggtgctctggaagggccagacggcctcctccacagccaagtagaccggcccctccacctcctgcaccacccagcgctttaccccggggtgggcgagcggcgcgtgcgggtgggcctgggagtcgagcgcgtgccgcgggcgcgcggggatgtcggctgcgatcccagctggttcccgtgcgggctctcggcctaggccacaggtccgacgaacttgtgcgtttccgcttctgtagtgggagttgtagaagggcccgcagcccgcatgacctgagcctcgccagcctgttaggcgccggagcgttgcgcccaccacctggaagccgaccagtgtctcaaccttgctgcaggcccacaagatatgaggccgtatcattcatggatgtgaactccacgtggcgcacagtcgacagactcagcgccactgcatgtgggtgcctggga

SEQ ID NO: 7004 - DNA, 660 bp, synthetic construct
  misc_feature 1..660: note = source = /note="Description of Artificial Sequence: Synthetic coding sequence"
  source 1..660: mol_type = other DNA
atggagctgggccttggcggactcagcacactcagtcactgtccatggccgcgacagcagcccgctctctggcccacactggctgctctggcactgctgtcctctgttgcagaagcttcccttggctcagccccacgcagccccgccccacgcgagggaccccctcctgtcctcgccagtccagcaggccacctccccggtggacgcaccgccaggtggtgcagcggaagggctcgcaggccgccacctcaaccctccagacccgcccccccaccacccgcacctccctctgcactgcccagaggcggccgggcggccagggctggtggaccaggctcccgcgcacgggcggcgggtgccaggggctgtcggctgagaagtcagttggtgcctgtacgcgcactcggcctcggacataggtcagatgaactggtcagattcagattctgttctggatcttgtaggagagccaggtcaccgcacgatctctccctcgcatccctgctgggcgcaggcgccctgcgccctccacctgggtcccggccagtttcacagccatgctgtaggcccacgcgctacgaagctgtgtcctttatggatgtcaactctacatggcggaccgtggacagactcagcgccacagcatgcggatgtctcggg

SEQ ID NO: 7005 - DNA, 660 bp, synthetic construct
  misc_feature 1..660: note = source = /note="Description of Artificial Sequence: Synthetic coding sequence"
  source 1..660: mol_type = other DNA
atggagctgggtcttggtggattgagcaccctcagccattgcccgtggcccagacaacagcctgcactgtggcctacgctggcagcactcgcccttttgtcatcggtggctgaggcatcgcttggtagcgcgccaagatcgcctgcaccgcgcgaaggccctccgccggtgctcgcctcgcctgccggacatcttcccggaggtagaactgcaagatggtgttctggtcgcgctagacgcccaccaccacagccaagcagacccgccccgccacctccggcacccccgtcggccctgcctcgaggaggccgtgctgcccgcgccggtggcccagggtcccgtgccagagcggcaggagcgagaggatgtagactgagatcgcaattggttccagtgcgggcactcgggctggggcaccggtccgatgaactggtccggtttcgattctgttcaggatcatgtagacgagcacgatctccccacgatctgagcctggcgtcccttcttggagcaggggcccttcgtccaccacctggttcccgcccggtgtcccaaccatgttgccgtcccaccaggtacgaagcagtgtcctttatggatgtcaactccacctggcggacggtcgaccggcttagcgccaccgcatgcggctgtcttgga

SEQ ID NO: 7006 - DNA, 660 bp, synthetic construct
  misc_feature 1..660: note = source = /note="Description of Artificial Sequence: Synthetic coding sequence"
  source 1..660: mol_type = other DNA
atggaacttggactcgggggtctttcgaccttgtcgcattgcccttggccacgccagcagcccgcactttggcctaccctggctgcactggcgctgctctctagcgtcgcagaagcctccctgggaagcgccccccgatcccctgcccctagggaaggacctccaccagtgcttgcatcaccagcaggccatctccccggcggacgaaccgccagatggtgcagcggaagagcgagacgacctccaccacaaccatcgcgcccggcccctcccccgcctgctccacctagcgcactcccccgaggaggaagagccgcaagggcaggaggtcccggatcacgggcaagagccgcaggtgcacgggggtgtcgtcttagatcgcaactggtgccagtccgtgctctgggcctgggtcatagatccgacgaattggtgaggtttcgtttttgcagcggttcgtgtcggcgggcgcggtcgcctcacgatctctcgctggcatccctcctgggcgcaggcgcccttcgacctccacctggttcccgccccgtgtcgcaaccctgctgtagaccaacgaggtacgaagctgtatcgtttatggatgtcaattcaacttggcggaccgtcgataggctgtcggcgaccgcctgcgggtgtctggga

SEQ ID NO: 7007 - DNA, 660 bp, synthetic construct
  misc_feature 1..660: note = source = /note="Description of Artificial Sequence: Synthetic coding sequence"
  source 1..660: mol_type = other DNA
atggaactaggtttaggtggtctatcgacgctatcgcattgtccgtggccgcgacaacaaccggcgctatggccgacgttagcggcgctagcgctactatcgtcggtagcggaagcgtcgttaggttcggcgccgcgatcgccggcgccgcgagaaggtccgccgccggttttagcgtcgccggcgggtcatttaccgggtggtcgtacggcgcgatggtgttcgggtcgagcgcgtcgaccgccgccgcaaccgtcgcgtccggcgccgccgccgccggcgccgccgtcggcgttaccgcgtggtggtcgagcggcgcgtgcgggtggtccgggttcgcgtgcgcgtgcggcgggtgcgcgaggttgtcgactacgttcgcaattagtaccggtacgtgcgctaggtttaggtcatcgatcggatgaactagtacgttttcgattttgttcgggttcgtgtcgtcgtgcgcgatcgccgcatgatctatcgttagcgtcgctactaggtgcgggtgcgctacgaccgccgccgggttcgcgaccggtatcgcaaccgtgttgtcgaccgacgcgatatgaagcggtttcgtttatggatgttaattcgacgtggcgtacggtagatcgtctatcggcgacggcgtgtggttgtttaggt

SEQ ID NO: 7008 - DNA, 660 bp, synthetic construct
  misc_feature 1..660: note = source = /note="Description of Artificial Sequence: Synthetic coding sequence"
  source 1..660: mol_type = other DNA
atggagctgggtctgggaggcctgtcaactctgtcccattgtccatggccacggcagcagcccgctctatggcccactctagccgcgctggccctactatcatcagtcgccgaggcttctctcggctctgcaccccgctctcctgctccgcgtgaaggccctccccctgtgctagcaagtcccgccggacacctgcctggcggacggacagcccgttggtgctccggtagagcccgtcgtccaccgccccagccgtctaggcccgctcctcccccacctgcgcccccttcagcgttgccccgcggaggcagagccgcccgagccggagggccaggatccagagcccgggccgcaggagcaagaggatgccgcctcaggtcacagctcgtgcccgttcgggcccttgggttaggccacaggagcgatgaacttgtgcggttccgtttctgcagcggtagttgtagaagagcaaggtccccgcacgacctctccttagcgtccctgctaggcgcaggcgcactgcggccgcctccaggcagccgacccgtgagtcagccttgttgccgcccgactagatacgaggccgtgagctttatggatgttaacagcacctggcggacagtcgatagactgtccgctacggcttgcggctgtctgggt

SEQ ID NO: 7009 - DNA, 660 bp, synthetic construct
  misc_feature 1..660: note = source = /note="Description of Artificial Sequence: Synthetic coding sequence"
  source 1..660: mol_type = other DNA
atggagctgggactcggtggcctgtccactctctcacattgcccatggccaagacaacagcccgcgctctggcctactctggccgcgctcgccctcctgtcgtcagtcgcggaagcgtccctgggcagcgcgccgagatccccggctccgcgcgaaggaccgccgcccgtgctggcctccccagcgggacatctccccggagggcggactgcacgatggtgctcgggaagagcgcggcgtccaccaccgcagccatcgaggccagcacctccgcctcccgccccgccgtcagcgttgccacggggaggtcgcgccgcgagagcgggagggcctggatcccgcgcccgcgcagcaggcgcccgcggatgcaggctgcggtcccaactcgttcctgtgcgggcactgggactcggacaccgctcggacgagctggtccgctttcgcttctgctccggaagctgccgccgcgctcggtccccgcatgacctgtcactggcttcgttgctgggcgccggagcactgcggccgccaccaggatcaaggccagtgtcccaaccttgctgtagacccacccgctacgaagccgtgtccttcatggacgtgaattcgacttggaggactgtcgatcgactgtccgccactgcttgcgggtgtttgggg

SEQ ID NO: 7010 - DNA, 660 bp, synthetic construct
  misc_feature 1..660: note = source = /note="Description of Artificial Sequence: Synthetic coding sequence"
  source 1..660: mol_type = other DNA
atggaactgggactggggggactgtcgactcttagccattgcccatggccaagacaacagccggcgctgtggcctaccctggcggcactcgccttgctgtcgtcagtcgccgaagcctcgctgggatccgctccgcggtcccccgcgccgcgcgaagggccgccgcccgtgctggcaagccctgccggacatctgccaggaggcagaaccgcacggtggtgttctgggagagcccgacggcctccgccgcaaccttcgcgtccggcccctccgccgccggccccgccttcggccctgccgcgtggtggacgcgccgcaagggctggaggaccagggtcaagggcgcgcgctgcgggagcacgcggatgccgcctgcggtcccagctcgtgccggtgagagcccttggactcgggcaccgcagcgatgagctggtgaggttcaggttctgctccggctcttgccgccgcgctcgctcaccacacgacctctcgctcgcgtcgcttcttggcgcgggagctctgcgcccaccaccgggatcccgcccagtgtcgcagccatgctgtcggcccactcggtacgaagctgtgagcttcatggatgtgaactccacttggcgcactgtggaccggctttctgcgactgcctgcggttgcctggga

SEQ ID NO: 7011 - DNA, 660 bp, synthetic construct
  misc_feature 1..660: note = source = /note="Description of Artificial Sequence: Synthetic coding sequence"
  source 1..660: mol_type = other DNA
atggaacttggtctcgggggcctgtctacactgagtcactgcccttggccaaggcagcagccagcgctatggccgaccctcgccgccctggccctgcttagctccgtcgctgaagccagtctcggatccgccccccgcagtccagctccacgagagggacccccccctgtgttggcctctcctgcaggccacctccccggcggtcgaacagctcggtggtgcagtggtcgtgcccgccgaccacccccgcagccatcacgaccagcccctccccctcccgcacccccaagtgctttgcccagagggggtcgagccgcgcgagccggcggccccgggtcccgcgcgcgggccgcaggagcgagggggtgtcggcttaggtcgcagctggtaccagtgagagcactgggactgggacataggagtgatgaactcgtgcgattccgcttttgtagcgggtcatgccggcgggctcgcagtccccatgatctcagtcttgcttcactccttggcgccggggccctcagaccaccacctggttcccgaccagtatctcagccttgttgccgccccacgaggtacgaggccgttagtttcatggatgtcaatagcacctggcgcaccgtcgaccggctgagcgccaccgcttgcggatgtcttgga

SEQ ID NO: 7012 - DNA, 660 bp, synthetic construct
  misc_feature 1..660: note = source = /note="Description of Artificial Sequence: Synthetic coding sequence"
  source 1..660: mol_type = other DNA
atggagctcggccttggcggtctttcaaccctgtcacactgtccgtggccgcggcaacagcctgcgctgtggccaacgctcgctgcactggcgctgctctcatccgtagcggaagcatcattgggatcggcaccacgaagtcccgcaccaagagagggacctccgcccgtgcttgcaagccccgccggtcatttgcctggtgggcgaacggcgagatggtgctccggcagggcacgcagacctccacctcagccaagcagacctgcccctccgccgccggctcctcctagcgcacttccgagaggagggcgcgccgcacgggcaggggggcctggatcgcgagctagagcagccggtgcacggggatgtcgtctgcgttcccaacttgtgcctgtgagagccctgggacttggacatcggtccgatgaactcgtcaggttcagattttgttcgggtagctgccgccgcgctcgctcaccacacgacctgtcccttgcctcgctccttggagccggtgcactgaggcccccgcctggctccaggccagtttcccaaccttgttgccgtcccactaggtacgaagctgtgtcgtttatggatgtgaactccacctggcgcactgtcgaccggcttagtgcaaccgcgtgcgggtgtctcggc

SEQ ID NO: 7013 - DNA, 660 bp, synthetic construct
  misc_feature 1..660: note = source = /note="Description of Artificial Sequence: Synthetic coding sequence"
  source 1..660: mol_type = other DNA
atggaactcgggctaggcggactcagcacattgtcgcactgtccttggccaaggcagcagcccgcgctgtggccaacactggcggccctagccctgctgtccagcgtggccgaggcatccctaggcagcgccccaagaagtccggctccccgggaagggcccccacccgtgctcgccagtccggccggccatttgcctggtggtcgaaccgccagatggtgcagcggccgggcccggagacctcccccacaacccagccggcccgcccctcccccacccgccccccccagtgcgttacccagagggggtcgggcggccagggctggagggcctggttcaagagcccgagccgctggtgctaggggctgtaggctgcgttcgcagttggtgcccgtccgggctctgggcctgggccaccggtccgacgagttggttcgatttcgcttctgtagtggctcttgtcgccgcgcacgttctccacacgacttgagcttagccagtctgttgggggcgggcgctcttcgtccaccgccagggtctcgccccgtatctcagccctgctgtcggcccaccaggtacgaagctgtctcgttcatggacgtaaacagtacctggagaacagtggacagattgtccgcaacagcctgcggatgcctggga

SEQ ID NO: 7014 - DNA, 660 bp, synthetic construct
  misc_feature 1..660: note = source = /note="Description of Artificial Sequence: Synthetic coding sequence"
  source 1..660: mol_type = other DNA
atggaacttggacttggtgggctttcgaccctgtcccattgtccgtggccccgacaacagccagcactttggcctactctggcagcactggctcttctttcctcagtggcggaggcatcgcttggatccgccccccgttccccggcccctcgggaggggcctccacctgtgcttgcatcccctgccggacatctcccaggaggccgcaccgcacgttggtgtagcggaagggctagacgtcctccaccgcaacccagccggcctgcccctccgccacctgcccctccctcagccctgccacgaggtgggagggccgcacgcgcaggtggtccaggcagccgagcaagggccgccggtgcaagaggttgtcgccttagaagccaactggtccctgttcgggccctgggactcggacaccggtcggatgaactcgtgagattccggttttgtagcggttcgtgtagaagagcgcgctcacctcatgacctgtcgctggcttcgcttctgggagctggagccttgcgccctccaccaggatcgcgcccagtgtcgcaaccgtgttgccgccctacgaggtacgaagccgtgtcgttcatggacgtgaactcgacttggcggactgtcgataggctgtccgccacggcgtgtggatgtcttggt

SEQ ID NO: 7015 - DNA, 660 bp, synthetic construct
  misc_feature 1..660: note = source = /note="Description of Artificial Sequence: Synthetic coding sequence"
  source 1..660: mol_type = other DNA
atggaactcgggctaggtggactgtccaccctttctcattgcccttggccccgccagcagcctgcactgtggcctaccctggctgctctcgcactcctctcttccgtggctgaagcgtccttagggagcgctcctaggtcaccggctccacgggaaggccccccacccgtcctcgctagcccagccggtcacctacccggaggaaggacagctcgatggtgctctggccgggcaaggagacctcctccgcagcccagcagacctgctccacctcctccagctccacccagcgccctccctcggggcgggcgggccgctagagcaggtggcccaggttcaagagcccgggctgctggcgcacgcggatgtagactgaggtcccaactagttcctgtacgtgcactggggcttggtcaccgctcagatgaactggttcggttcaggttttgctcggggtcatgtcgtagagcccgcagcccacacgacttgtctctagcctctcttcttggcgctggcgccctccggccccctcctggctcacgccccgtgtcacagccctgctgtaggccaactcgctatgaggccgtgtccttcatggatgtgaattccacatggcgcaccgtggaccgtctcagcgctaccgcatgcgggtgcttaggg

SEQ ID NO: 7016 - DNA, 660 bp, synthetic construct
  misc_feature 1..660: note = source = /note="Description of Artificial Sequence: Synthetic coding sequence"
  source 1..660: mol_type = other DNA
atggaactgggattgggaggtctaagcactctgtcacactgcccttggcctaggcaacagccggctttgtggcctacgctggctgcgctggcccttctgtcttcagtcgcagaggcctcgctgggaagcgcgccaaggtcccctgcgcctcgcgagggcccccccccagtgcttgcctctccagctggacatctgccgggcgggaggacagctaggtggtgctcagggagagcgcggagaccccccccccaaccatctaggccagccccacccccgcccgcgccgcccagtgcactaccacgcggaggaagggctgctagggctggcgggcctgggagtagggccagagctgctggcgcgcggggctgtcggcttaggtcccagctcgttccagtgagagccttgggcctgggtcaccgaagcgatgaattggtgaggtttaggttttgctccggctcctgcaggagggccaggtccccccacgacctgtcactagcctccctgttaggcgccggggctctgcggcctccccctgggtcccggccggtcagccagccctgttgtcggccaacaagatatgaagccgtcagcttcatggacgttaacagcacctggcgcaccgtggatcggttgtccgctactgcgtgcgggtgtttggga

SEQ ID NO: 7017 - DNA, 660 bp, synthetic construct
  misc_feature 1..660: note = source = /note="Description of Artificial Sequence: Synthetic coding sequence"
  source 1..660: mol_type = other DNA
atggaacttggcttgggaggactttctactctgtcgcactgtccctggccacgacagcagcctgcactgtggcccaccctggccgccctggcgctgctgagctcagtggcagaggcttccctgggttccgcccctagatcgcctgcgccgagagaaggtccccctcccgtgcttgcatcgccagccggccatctcccgggaggacggactgcaagatggtgttccggtagagctcgacggccgcctcctcaaccttcccgaccagcaccgcctcccccagcccctccttccgcacttcctagaggtggtagagcagcacgagctggaggtcccggatcgagagcaagagctgcaggtgcacgcggttgtcgcttgagaagccaactcgtcccagttagagccctcggccttggtcaccgttctgacgaactggtccgtttcagattctgttcggggtcctgtaggagagcgaggtccccacatgatctgagcctggcatctttgcttggagcaggagcactgcgacctcctcctggatcgcgccccgtgtcccaaccatgctgtcgcccaactagatacgaagcggtgtcatttatggatgtgaattccacctggagaactgtggataggctttcggcaaccgcgtgtgggtgtcttggt

SEQ ID NO: 7018 - DNA, 660 bp, synthetic construct
  misc_feature 1..660: note = source = /note="Description of Artificial Sequence: Synthetic coding sequence"
  source 1..660: mol_type = other DNA
atggagctcgggctggggggattgagcaccctgtctcattgcccttggcccaggcaacaaccggccctgtggccgaccttggctgccttggctcttctgtcaagcgtcgccgaagcatcactcggtagcgccccacggtccccagccccccgcgaagggcctccgccggtcctcgcaagtccggcgggccatctgcccggcggaaggaccgcgcgttggtgcagtggccgggctaggcggccccctccgcagccatcacggccggctcctccgcctccagcacccccatcggcgctgccgagaggcggaagagctgctcgtgcgggtggcccgggatccagagcacgggccgccggagcgcgcgggtgccggctccgctcccagctggtgcccgtgagagcgctgggattggggcaccgctccgacgagctggtgcgctttcgcttctgttcgggatcgtgccgccgggcccgctccccgcacgatctgtcgctggcctcgctgttgggcgcgggcgctttgcggccaccgcctggtagcagaccggttagccagccatgttgcagaccgacgagatacgaagctgtgtccttcatggacgtgaactcaacttggcgcactgtagatcgactgagcgccactgcatgcggatgtctgggg

SEQ ID NO: 7019 - DNA, 660 bp, synthetic construct
  misc_feature 1..660: note = source = /note="Description of Artificial Sequence: Synthetic coding sequence"
  source 1..660: mol_type = other DNA
atggagctgggcctgggagggcttagtaccctctcacactgtccctggcccagacagcagcccgctctctggccaacactggctgctctggccctactgtcatccgtagctgaggccagcttaggctctgccccaaggtctcccgctcctagagaaggaccgccacctgtcctggcttctcctgctggccacctgcccggggggcgcacagcacggtggtgtagcggtcgagcccggcgtcctccccctcaaccaagccgtccagccccgccaccacccgcccctccttcagccttacctcgcggtgggcgtgccgcacgtgccgggggcccagggtcaagggccagagcagccggcgcaaggggttgtcgcctacgctcccagttagtaccggtgagagcccttggcctgggccataggagcgacgagcttgtgagattccggttttgttctggctcttgtcggagggcgcgctccccccacgacctctctttggcatctctgctgggggctggcgcactaagaccgccccctggatccagaccagtgagtcagccgtgttgtcgcccaactcgatacgaggcagtctcattcatggatgtgaactcaacgtggagaacagtggatcggctgagcgcaacggcctgtggatgcctaggg

SEQ ID NO: 7020 - DNA, 660 bp, synthetic construct
  misc_feature 1..660: note = source = /note="Description of Artificial Sequence: Synthetic coding sequence"
  source 1..660: mol_type = other DNA
atggaattaggcctgggtggtctgagtactctttcacattgtccttggcctcgccaacagccagctctctggcccacacttgctgcactggcactgctatcctcagtggccgaagcctcactgggatccgcgccacggagccctgcaccacgggaaggcccaccgcctgttctcgcatcccccgccggccacctgcctggaggccgaaccgcccgctggtgtagcggtagagcgcggcggccgccccctcagccgagcaggccggcaccacctccacctgcgcctccctccgccctacctagaggcgggagggcggcccgggcagggggtcccggcagccgggccagggcggctggtgcgaggggctgtcggttacggagccagctcgtgcctgtgagggcccttggcttagggcatcggagtgacgaactggtacgatttagattttgctcgggatcttgtagacgggcacggtccccacacgatctaagtcttgcctccctgctgggggccggtgcccttcggccccctccaggcagtcgccccgtgtcccagccctgttgcaggcccacccgatacgaggctgttagctttatggacgtgaattcaacttggcggacagttgataggctctcagcgacagcatgcggctgcctcggc

SEQ ID NO: 7021 - DNA, 660 bp, synthetic construct
  misc_feature 1..660: note = source = /note="Description of Artificial Sequence: Synthetic coding sequence"
  source 1..660: mol_type = other DNA
atggagctcggcctcggaggactctccactctgagccattgtccctggccacggcagcagccagccctctggccgaccctggcggctttggctctgctttcatcggtggctgaggcttcgctcggaagcgcaccgagatcccctgccccgagagaagggccgccccctgtcctggccagcccggccggacacctgccgggaggcagaactgcgcgctggtgctccggtcgggcccggaggccgccgcctcaaccgtcccgccctgccccgccccctccagccccgccttccgcactgccgcgagggggtagagccgcacgggcaggtggaccgggaagccgcgcccgggccgccggggcgcgcggatgccgcttgcggtcacaactggtgccggttagagccttgggacttggacatcgcagcgacgaattggtgcggttccgtttttgctctggctcctgtcggcgcgctcgctcgccgcatgatctctccctggcttcgctgcttggtgcgggtgccttgaggccgccccccggttcgcgacccgtgagccagccttgctgccgcccgaccagatacgaggcagtctcgttcatggacgtgaacagcacttggagaaccgtggaccggctctccgccacggcctgcggctgcctggga

SEQ ID NO: 7022 - DNA, 660 bp, synthetic construct
  misc_feature 1..660: note = source = /note="Description of Artificial Sequence: Synthetic coding sequence"
  source 1..660: mol_type = other DNA
atggagctggggttaggtggactttccaccctctcgcactgtccctggcccaggcagcagcctgctctctggcccacactggcagccttggcactgctctcctccgtggccgaggcttctttggggtcggctccacgctccccggctccacgagagggccccccccccgtcctggcaagtcctgccgggcatctcccaggggggagaacagcccggtggtgcagcgggagggccagacgtcccccgcctcaaccttcgaggccagccccgcctccaccagcccccccgtccgctttgcctcggggtggtagggcagctagggcaggcggcccaggaagtcgagccagggccgcgggcgccagagggtgcaggttaaggagccaactggtgccagtgcgggctttaggcctggggcatagatctgatgagcttgtgagatttcgattttgctcaggttcttgccggcgcgctaggtcccctcacgatctgtcactggcctccctcttgggggccggagcactgagacccccccctggctcacgacccgtcagccagccctgctgtaggccgacccgatacgaagccgtgtccttcatggatgtgaactccacttggcgaacagtggatagactgagcgctaccgcgtgcggatgcttggga

SEQ ID NO: 7023 - DNA, 660 bp, synthetic construct
  misc_feature 1..660: note = source = /note="Description of Artificial Sequence: Synthetic coding sequence"
  source 1..660: mol_type = other DNA
atggaactgggactgggagggctgtcgacactgagtcactgcccctggccaagacagcagccggccttgtggcctacactggcagccctggcgctgttaagtagcgtggccgaagcatccctggggtctgccccccgttcacccgcaccacgggagggtccgcctccggtacttgcgtcaccagctgggcatctacccggcggcagaacggctcgctggtgttctggtcgtgccagacgccccccgccgcagccaagtcgccccgcgccacctccacctgccccaccgtctgccttgccacggggaggacgggccgcacgtgctggtggaccgggttcacgggcacgggctgccggtgctcgcggttgtcgtttgcgaagccagctcgttcccgtcagagccctcggtttgggccacagaagtgacgaactggttagattcaggttctgtagcggatcttgcaggcgggcccgtagtccacatgatctctctctggctagcctgttgggcgctggagcgctaagacctccgccaggtagccgtccagtatcacagccctgctgccggccgactagatatgaagccgtatcttttatggacgtgaactccacttggcggacagttgatcggctgtctgccacagcctgcggatgtcttgga

SEQ ID NO: 7024 - DNA, 660 bp, synthetic construct
  misc_feature 1..660: note = source = /note="Description of Artificial Sequence: Synthetic coding sequence"
  source 1..660: mol_type = other DNA
atggagttggggctggggggtctgtcgacccttagccactgcccctggccgcgccaacaaccagcgctgtggccaaccttggccgccctggctctcctctcctcggtcgcagaagcctcattgggatcggccccgagatctccggccccgcgcgagggtcccccacctgtcctggcctcccctgctggtcatttgccgggtggcaggaccgcgagatggtgctccggacgcgcgagacgcccgcctccacagccatcacgccctgcgcctccaccaccggcaccgccgtcagcgttgccgagaggcgggagagcagcacgggccggcggacccggatcgagggcacgagctgcgggggcgaggggatgccggctgcgctcccagctggtacccgtccgggcactgggcctgggacatagatcggacgaactggttcgctttagattctgtagcggatcgtgtcggcgcgcacgttccccacacgatctttcgctcgcctctctgctgggagccggagctctgcgaccacctccaggttcacggccagtctcgcagccgtgctgccgcccgactcgatacgaggctgtgagctttatggatgtgaacagcacttggcggactgtcgaccggctctccgccaccgcctgcggatgtttgggg

SEQ ID NO: 7025 - DNA, 660 bp, synthetic construct
  misc_feature 1..660: note = source = /note="Description of Artificial Sequence: Synthetic coding sequence"
  source 1..660: mol_type = other DNA
atggagttgggtctgggaggactttcgaccctgtcccactgcccctggcctcgacagcaaccagcgctttggcctacgctggcagcacttgccctgctgtcgtccgtcgcagaggccagcctgggatccgccccaagaagccccgcaccacgagaaggtcccccacctgtgctcgcgtcccccgccgggcatttgcctggaggacgtactgcccgctggtgttcaggcagggcacggcggcccccaccacagccatcacggcctgcaccccctcctccagctccaccaagcgcactccctcgcggagggagagccgccagagcgggaggaccgggaagccgcgcgcgagcagccggagcacgaggttgtagactgagaagccaactcgtgcctgttcgagcactgggtctgggtcatcggtcggatgaacttgtgcggtttcggttctgctccggctcatgtcggcgtgccagatccccacatgatttgtccttggctagccttctgggcgcaggggcgcttaggccacctcccggctcccgccctgtgtcccaaccttgttgtcgtcctacccgctacgaagccgtctcgttcatggacgtgaattcgacctggcgaaccgtcgatagactgagcgcaaccgcttgtggttgtctgggc

SEQ ID NO: 7026 - DNA, 660 bp, synthetic construct
  misc_feature 1..660: note = source = /note="Description of Artificial Sequence: Synthetic coding sequence"
  source 1..660: mol_type = other DNA
atggagcttggactgggtggcctgtctactttgtcccactgtccctggcctcggcaacagccggccctgtggccaactcttgccgccctggcactgctgagtagcgttgctgaggcctctctagggtccgcccctcgctcacccgcaccgagagaagggccacccccagtgctcgcgtcaccagccggtcacttgcccggcggccgaaccgccaggtggtgcagcgggagggcgagacgaccccctccacaaccatcccgcccagccccccccccaccggccccacccagcgcgctcccgaggggggggcgagccgcaagggcgggaggacctgggtctcgtgcgagagccgcgggtgcccgtggctgcagactgcgatcccagctggtgccggtgcgggcactgggactcggacataggtctgatgagcttgtccgattccgtttctgcagcgggagctgcagaagggcccgaagccctcatgatctgagtctggctagtctccttggagccggagcactgcgtcctcccccaggaagtaggcccgtatctcagccttgctgccgtccgacccgatacgaggctgtgtcattcatggacgtgaactccacttggcgaacggtggatagattgtcagcaacagcttgtgggtgtctcggc

SEQ ID NO: 7027 - DNA, 660 bp, synthetic construct
  misc_feature 1..660: note = source = /note="Description of Artificial Sequence: Synthetic coding sequence"
  source 1..660: mol_type = other DNA
atggaacttggtctgggtggactgtctaccctgtcgcactgtccctggccacgccaacaacccgcattgtggcccacccttgcagcactggcacttctgtcatcagtggccgaagcatccctgggttcggcacctagatctcctgccccacgggaggggccccctcctgtcctggcaagcccagcgggccatcttcctgggggccgcaccgctcggtggtgttccggtagagcgcgtagaccaccaccccaaccttccagaccagcacctcctccgcctgcaccaccttccgcccttcctcggggtggaagagcggctagggcaggtggtcccggtagcagggctcgagcggcgggcgcaagaggttgtaggttgagatcccagctggtgccggtccgggcgctgggactgggacatagatcggatgaactcgtgcggtttaggttttgtagcgggagctgtcgccgcgcaagatccccccatgatctttcccttgcaagcctgcttggagcaggggctctccgaccccctcctgggtccagacctgtgtcgcagccctgttgcagacccactagatacgaggcagtgagttttatggacgtgaatagcacttggcgcaccgtcgatcggctctccgcaactgcctgtggctgtctcggt

SEQ ID NO: 7028 - DNA, 660 bp, synthetic construct
  misc_feature 1..660: note = source = /note="Description of Artificial Sequence: Synthetic coding sequence"
  source 1..660: mol_type = other DNA
atggaattaggactcggaggactgagtactttatctcattgcccctggcctcggcagcaacctgccctgtggccgacgttggctgctctagctcttttaagtagtgtggctgaggcatcattagggtccgccccccgatctcctgcccccagggaggggcccccaccagtccttgcaagtcctgctggacatctgcccgggggaaggactgcccgctggtgtagtggaagggcacgcaggccacctccacagcccagtcgcccagcacctccaccaccagctcccccctcagctctgccccgaggagggagggctgcccgggcaggaggacctggatctagggctagagccgccggggcccgggggtgccgactcagaagtcagcttgtgccagtccgagctctgggactgggacatcggtccgatgaattagtgaggttcagattctgttccggatcttgtcggcgagcgcggtcccctcacgatttatcacttgcatccctgttaggggcaggggcattaagacctccccccggatcaaggcccgtttcccagccatgttgtaggcccacacgctacgaagctgtgtccttcatggacgtgaactcaacatggagaacagtggaccggctgtctgccacggcctgcggatgcctcgga

SEQ ID NO: 7029 - DNA, 660 bp, synthetic construct
  misc_feature 1..660: note = source = /note="Description of Artificial Sequence: Synthetic coding sequence"
  source 1..660: mol_type = other DNA
atggagctgggtctgggtggactttctacactgagccactgtccgtggccaaggcagcaaccagccctatggcccacgttggccgctctggcacttttgagctcagtggccgaggcttccctgggcagcgcgccccgaagccccgctccacgggaaggcccaccaccagttctggcctccccagccggtcatctgcctggaggacgtacagcaaggtggtgctctgggcgcgcacgaagacccccaccccagccatcacggcccgctcctcccccacctgccccccccagtgcccttccaagagggggacgcgccgcgagagccggcggtcccggtagccgagcccgtgccgccggtgcccggggatgtcgcctcaggtcgcaattggtgccagtaagggcccttgggctaggtcatcgctccgatgagctcgtcaggttccggttctgctcagggtcatgtagaagagcccgaagtcctcacgatctgtccctggccagtctcctaggcgcgggcgccctcagaccaccaccagggtcgagaccagtctcccagccatgctgcaggcccacacggtatgaagccgttagtttcatggatgtaaactccacatggcgaacagttgatcggctgtcagccaccgcctgcggttgtctcggt

SEQ ID NO: 7030 - DNA, 660 bp, synthetic construct
  misc_feature 1..660: note = source = /note="Description of Artificial Sequence: Synthetic coding sequence"
  source 1..660: mol_type = other DNA
atggaattgggattgggtggtctgtccaccctgagccattgtccatggcccagacagcagccagccctctggcccaccttggctgcgcttgctttgctgtcttccgtagccgaggctagcctggggtctgcaccacgctccccagccccgcgcgagggacctccccccgttcttgcttcacctgcggggcatctgccaggtgggcgaaccgctaggtggtgtagcgggagagcccggcgaccaccgcctcagccaagccgacccgctcctcccccccctgccccaccttcagccctcccccgcggggggagagccgcaagggctggcggccctggtagccgcgccagggccgccggggctcgcgggtgccggctgaggtctcagcttgtaccggtgcgggccctgggccttggacaccgctccgacgagctggtgcgctttcgcttttgtagtggctcatgcaggcgcgcgaggagccctcatgacctcagcctggcctccctgttgggcgcgggtgcattgagaccacccccaggctccaggcctgtttcccagccttgttgtaggcccacacggtatgaagcagtcagcttcatggatgtgaacagtacctggcgcacggtggatcggctcagtgccaccgcatgcggatgtctgggc

SEQ ID NO: 7031 - DNA, 660 bp, synthetic construct
  misc_feature 1..660: note = source = /note="Description of Artificial Sequence: Synthetic coding sequence"
  source 1..660: mol_type = other DNA
atggagctcggactgggagggttaagtactctctcccattgtccgtggcctaggcagcagcctgccctatggcctacccttgctgcattggcattattgtccagtgtcgcagaggcgtccttagggtcagcacctagatcaccagcacctcgagaaggacctccaccagtgctagcttcaccagctggacatcttccgggtggacgaacggcccgatggtgcagtggtagagcccgacgtccaccaccacagccaagtagaccagcaccaccaccaccagctccaccttctgcccttccgcggggaggaagagcagcgcgagcagggggaccaggctcacgtgcccgtgccgcaggtgctcggggatgccgactgcgttctcaattggttccggtacgagcgctaggattgggacatcggagcgatgaactggttcgcttcagattttgttctgggtcttgccgacgggcacgctcgccgcatgacctcagtcttgcttcattgttgggagccggagcattgcggcctcccccaggaagtcgtccagtgtcccaaccgtgttgccgaccgacgcgttatgaggccgttagcttcatggatgttaattcgacttggcggactgtggatcggctctccgctacggcatgtggttgcctggga

SEQ ID NO: 7032 - DNA, 660 bp, synthetic construct
  misc_feature 1..660: note = source = /note="Description of Artificial Sequence: Synthetic coding sequence"
  source 1..660: mol_type = other DNA
atggagctgggactcggcggactctcgactctctcacactgcccttggcctcgccaacagcctgctctgtggccaactcttgcagccctggcgcttctctcctcagttgcagaagcctcgttgggatcggccccgagaagcccggctccgcgcgagggaccaccccccgtgctggccagtcctgccggccacctgccgggcggaaggaccgcgcgctggtgttccggaagggcacgccgccctccgccgcagccgtcacggccagctcccccaccaccagccccaccgagcgcgctgccgcgaggtgggagagccgcgcgcgcaggagggccgggctcgagagcgagggctgctggggccagaggatgccggctccggtcacaactggtgcctgtcagagcgctggggctgggacatcgttcggacgaactggtgcgcttccgcttctgcagcggctcctgtcgccgggccagatccccgcatgatctgtcgttggcctccctcctcggtgcaggtgccttgcggcctccaccgggatcgcggcccgtgagccagccgtgttgccggccgacgaggtacgaagcagtcagctttatggatgtcaactccacttggcgcaccgtggaccggctgtctgcgaccgcctgcggatgcctgggc

SEQ ID NO: 7033 - DNA, 660 bp, synthetic construct
  misc_feature 1..660: note = source = /note="Description of Artificial Sequence: Synthetic coding sequence"
  source 1..660: mol_type = other DNA
atggagctgggcctgggcgggttgtcaacactgagccactgtccctggccacgacagcagcctgctctgtggcctacattggccgcactagcgcttttgtcttccgtggccgaggcctccctcggttctgctccacgctcgcccgcaccgcgtgagggtcctcctccagttctagcatcaccagccggccatctaccaggtggcagaacggcccgttggtgttctggtcgagcccgtcgacccccgcctcagccttctcgcccagctcctccacctccagctccaccatccgccctccctaggggaggcagagcggctcgggcaggaggtccaggcagcagggctcgcgcagcgggggcacgcggatgtaggttgcggtctcaacttgttccagtccgagcgcttggcttgggccaccgatcagatgaactcgtccgtttcagattctgctccggtagttgccggcgggctcgcagccctcatgatttatccctcgcttctctgttaggagccggagccctgcgaccaccacccggtagtaggccggtatcccagccatgctgcagaccaactcggtatgaagccgtctcctttatggacgtaaattcgacatggagaaccgttgatcggctcagtgcgactgcctgcgggtgtctcggg

SEQ ID NO: 7034 - DNA, 660 bp, synthetic construct
  misc_feature 1..660: note = source = /note="Description of Artificial Sequence: Synthetic coding sequence"
  source 1..660: mol_type = other DNA
atggaactgggcctgggagggctctccactctgtcccactgtccatggcctcgccagcagcctgcactgtggccgactctggccgccctggcgctcctgagctcagtggccgaagcttccctggggtccgcaccccgctcacccgctccccgggaggggcctccaccagttctcgcatctcccgctgggcacttgccaggtgggcgtaccgctagatggtgtagtggaagggcgaggcggccaccgccacagccgtcacggcccgcccctcccccaccagcccccccctctgctctgccgcgcggtggccgagctgcccgcgctggagggcctggcagcagagcacgcgcagcaggcgctaggggatgtagactccgatcacagctcgtgccagtgagagccctggggctgggccacaggagcgacgaactcgtgcgcttcagattttgtagtggaagctgtcgaagagccagaagcccccacgatttgagcctagccagcctgttgggcgcaggcgccctgaggccccctcctggcagtcgaccggtgtctcagccttgctgcagacctaccaggtatgaggccgtctcatttatggacgtcaactcaacctggcgaaccgtcgaccggctgagtgccaccgcatgcgggtgcctgggc

SEQ ID NO: 7035 - DNA, 660 bp, synthetic construct
  misc_feature 1..660: note = source = /note="Description of Artificial Sequence: Synthetic coding sequence"
  source 1..660: mol_type = other DNA
atggaactcggcttgggaggactctccaccctgtctcactgcccttggccgcggcagcagccagccctgtggccgacccttgcggcgttggctctgctgtcctccgtggccgaagcatctctgggatcggccccacgcagcccagctccacgggagggacctccgcctgtgctggcatcccccgcgggccacctgccgggaggacggactgccagatggtgtagcggaagagcccgcagaccaccaccgcagccgtcaagaccggcgcctcctccgccggccccgccgagcgcactcccacgagggggaagagccgcccgggctggaggtccgggttcaagggctcgcgcggccggcgcgagaggatgccgcctccgctcgcagctggtcccagtccgtgcactgggtctgggacataggagcgatgagcttgtgaggtttcggttctgctcgggatcatgcagaagggcacgcagcccacacgacctctcgttggcttcgttgctgggcgccggagccttgcgcccgccgccggggtcgcgccctgtgtctcagccatgttgccgcccgactcggtacgaggcagtgtcattcatggacgtgaattcaacttggcggacggtggaccgcctgtcggcaaccgcttgcgggtgtctgggc

SEQ ID NO: 7036 - DNA, 660 bp, synthetic construct
  misc_feature 1..660: note = source = /note="Description of Artificial Sequence: Synthetic coding sequence"
  source 1..660: mol_type = other DNA
atggagcttggcctcgggggtcttagcactctctcgcactgcccttggccacggcagcaacccgcattgtggcctaccctggcagccctggccctgctttctagcgtcgcagaagcatcattgggttccgcaccccgctcgccagcgcctagggagggaccacctcctgttctggcttccccggctggacatttgcctggtggtaggaccgcacggtggtgttcaggacgcgccaggcgcccacccccacaaccgtcacgtccagcaccgccgccaccggctcccccctcagcgctccctcgtggcggtagagccgcacgggcggggggaccagggtcacgagcaagagccgccggagcaaggggctgcaggctgagatcacaactggttcctgtgcgggccctcgggctcggacatagatccgatgaactcgtgcgatttcgcttctgttcggggtcgtgtagacgggcaagatcgcctcacgacttgtccctggcatcccttctgggggcaggagctctccgccctccaccaggttccagaccggtgtcgcagccctgttgtagacccactagatacgaagctgtgagctttatggacgtgaactctacttggagaaccgtcgatagactgtcggcaaccgcatgtggatgtcttggt

SEQ ID NO: 7037 - DNA, 660 bp, synthetic construct
  misc_feature 1..660: note = source = /note="Description of Artificial Sequence: Synthetic coding sequence"
  source 1..660: mol_type = other DNA
atggagctgggcctgggtggcctctcgaccctcagccattgtccttggccccgccagcaacctgcactttggcctactcttgcagccttggctcttctgtcatcagtggctgaggcgtccctcggatcggcaccgcggtcgccagccccccgcgaaggtccccctcctgtgcttgcaagcccagcgggacatcttccaggcggtagaactgcacgctggtgctccggaagggcacgacgtccacctccacaaccaagccggccagctccgccaccccccgctcccccttccgcccttcctcggggtggacgcgcggcaagagccggaggccccggtagccgggccagagcggcgggtgcccgtggatgtagactgcggtcgcaactggtgccagtccgtgccctgggactggggcatcgaagcgacgagctggtgcgctttcgcttttgttcagggtcgtgtcgcagagcaagaagcccacatgatctctccctggcatcgcttctgggagcaggagccctccggccgccaccaggatcccggcctgtgtcgcagccttgctgtagaccaacgcgttacgaggccgtgtccttcatggatgtcaattccacctggcggactgtggatagacttagcgcgactgcatgcgggtgccttggc

SEQ ID NO: 7038 - DNA, 660 bp, synthetic construct
  misc_feature 1..660: note = source = /note="Description of Artificial Sequence: Synthetic coding sequence"
  source 1..660: mol_type = other DNA
atggagctcggcctcggagggctgtcaacgctgagtcattgcccgtggccgcggcaacagcccgctctgtggccaactctcgctgccctggccctgctttcctcggtcgccgaagcaagcctgggttcagctccgagaagccctgctccgcgcgaaggccctcctcctgtccttgcctcccctgccggacacctgccgggcgggaggacggcgcggtggtgctcgggacgggctcgcaggccgcccccgcagccttcccggccagccccaccaccgcccgcgccgcctagcgcgctgccccgcggtgggcgcgctgcacgggcaggagggccaggatcacgagctagagcggccggagcgagaggttgtcggctgagaagccaactcgtgccggtgcgggcactgggactgggacacaggtctgacgaactcgttaggtttcggttctgctcgggaagctgcaggagggcacgcagcccgcatgacctgtcccttgcgtccctgttgggggccggggccctccgccctcctccgggttccagaccggttagccagccttgctgccggccgacccggtacgaggccgtgagcttcatggatgtgaactccacgtggcgcaccgtggataggctctcagcgaccgcatgtggatgcttgggc

SEQ ID NO: 7039 - DNA, 660 bp, synthetic construct
  misc_feature 1..660: note = source = /note="Description of Artificial Sequence: Synthetic coding sequence"
  source 1..660: mol_type = other DNA
atggagctgggtttgggcggcttaagtactttatcccactgtccatggcctagacaacagcctgctttatggccaactctggctgccctagcacttctatcatctgtggccgaggcttcactgggttctgctccaaggtcccccgctccaagagaaggtcccccccccgtgctcgcctcccccgcagggcatttaccgggcggcaggaccgcccgatggtgtagcggtcgcgcccgaaggccccctccacagccatctcgacccgctccccccccgcctgcaccaccaagcgcactgcctcgaggggggcgtgccgcaagagccggcggacccggcagtagggccagggccgctggggcccgcggttgccgtttacgctcacagctggtgcctgtccgcgccctaggactcggccatagatctgacgaattagtgcggttcagattctgttctgggtcctgccgcagagccagaagtccacacgacttgtctctggccagcctcctgggcgcaggggctttgagacctccccccggcagcaggccagtttcacagccatgctgcagacccacacggtacgaagctgtgagcttcatggatgtgaacagcacctggagaacagtggacaggctgtcagcaactgcctgtggatgcctgggg

SEQ ID NO: 7040 - DNA, 660 bp, synthetic construct
  misc_feature 1..660: note = source = /note="Description of Artificial Sequence: Synthetic coding sequence"
  source 1..660: mol_type = other DNA
atggaactgggactgggagggctttccactctgtcacactgcccatggccgagacagcaacctgcgctctggccaacccttgcagcgctggcgctgctgtcctcggtggccgaagcatctctcggtagcgcacctcgctcaccagccccaagagaaggaccaccacccgtgctcgcaagccccgctggtcacctccccggaggaagaaccgctcggtggtgttcaggaagagcccggcgcccaccacctcagccttcgcggcctgccccacctccacctgcaccaccctcagcattgccaagaggtggcagagccgcgagggctggcgggcctgggtcgagagcacgtgcagcaggcgcccgcggttgcagactgcgctcccagttggtgcccgtgagagcgctcggacttggacatcgatcggacgagttggtacggtttcgattctgttcgggaagctgtcgacgggcacggtcgcctcatgacctgtcccttgcatccctccttggagcaggagcgctccgcccaccacccgggtcacgccccgtctcgcaaccttgttgcagaccaacccgttacgaggcggtttcgtttatggatgtgaactcgacgtggcggactgtggatagactttccgctaccgcctgtggatgcctcggt

SEQ ID NO: 7041 - DNA, 660 bp, synthetic construct
  misc_feature 1..660: note = source = /note="Description of Artificial Sequence: Synthetic coding sequence"
  source 1..660: mol_type = other DNA
atggaactcggactcggaggattgagcaccctctcccactgcccatggccgaggcagcaaccagccctgtggccgaccctcgctgcattggccctgctgtcatccgtcgcagaggcttcacttggctcggcgcctcgctctcccgccccacgcgaaggaccaccgccggtgctggcctccccggctggacatctgcctggcggacgcaccgctagatggtgctccggaagagctaggcgcccgccaccgcagccgtcgcgcccggcccctccgcctcctgcaccgccgagcgctctgccacgcggaggcagagcggcccgcgccggaggaccaggctcgagggcccgggctgcaggagccagaggatgccgcctcaggtcgcagctcgtgccggtccgggccctgggtctgggtcaccggagcgatgaactggtgcgctttcggttctgcagcggatcatgccggcgcgcgagatcgccgcatgatctgtctctggcctcactgctgggagcaggagcattgcggccgcctccggggtcgcgccctgtgtcgcagccgtgctgccgcccaacgagatacgaggccgtgtcgttcatggatgtgaatagcacctggcgcaccgtggatcggctgagcgccactgcgtgtggctgccttgga

SEQ ID NO: 7042 - DNA, 660 bp, synthetic construct
  misc_feature 1..660: note = source = /note="Description of Artificial Sequence: Synthetic coding sequence"
  source 1..660: mol_type = other DNA
atggagctcgggcttggaggactctcgaccctgtcccattgtccttggcctcgacaacagcccgcattgtggcctactctcgccgcgttggcactcctgagctcggttgcagaagcaagcctgggctccgcaccacgctccccagcaccaagagaaggtccccctcccgtgctggcaagccctgccggacatctcccagggggtagaactgcaagatggtgctcagggagagccaggcgcccaccgcctcagccgtcgcggccggcgcctccaccacctgccccaccatcggcactcccacggggcggccgcgcagcgcgagctggagggcctggatcgagggcacgagcagccggagcacgtggttgtaggttgcggtcgcaacttgtgccagtgagagcattggggttgggacatcgcagcgacgaactggtccgttttcgattttgcagtgggtcatgtaggcgggcaagatcacctcatgatctttcacttgcatcccttttgggcgcaggcgcactcagacctccaccaggtagcagaccagtctcgcagccgtgttgccgcccgacccgatacgaagcagtgtcgttcatggatgtgaactcgacctggcggaccgtggacaggctttcggcgaccgcctgtggatgccttggt

SEQ ID NO: 7043 - DNA, 660 bp, synthetic construct
  misc_feature 1..660: note = source = /note="Description of Artificial Sequence: Synthetic coding sequence"
  source 1..660: mol_type = other DNA
atggaactgggattgggtgggctctccaccctgtcgcattgtccatggccccgtcagcagcccgcattgtggccgacccttgccgcactggccctgctgagctccgtggctgaagcgagcttgggaagcgccccacgatcacccgcccctagagagggtccgcctccagtgttggcatcgcctgcgggtcacctgccgggcggcagaactgccagatggtgttcagggagggcccgccgcccacccccgcagccttcaagaccagcgcctcctcctccagcgccaccttcagccctgcccaggggcggtcgagcagcgcgggctgggggtccaggaagccgcgcacgggcagcaggggcaagaggttgtagactccgttcccaactcgtgccagtgcgagcactcggcctgggacatagatcagatgaacttgtgcgcttccgtttctgctcaggaagctgtagacgcgctcgctcaccacatgatctttcgctggcctcgcttcttggagcaggagcactccgccccccacctggaagcagacctgtcagccaaccatgttgtcgtcccacccgttatgaagccgtgtcatttatggacgtcaacagcacttggcggaccgttgataggctttccgccaccgcctgtggttgcctcggg

SEQ ID NO: 7044 - DNA, 660 bp, synthetic construct
  misc_feature 1..660: note = source = /note="Description of Artificial Sequence: Synthetic coding sequence"
  source 1..660: mol_type = other DNA
atggagctgggtcttggcggactctctacgcttagccactgcccgtggccgcggcagcagcccgctctctggccgacacttgcggctttggcgctgctttcctctgtggcagaagcctcccttgggagtgcaccgcgttctccagcccctcgcgagggccccccccccgtcctcgcaagccccgccggccacctccccggtggtcggactgcccgctggtgctcgggccgtgcccgccgccctccgccccagccgtcccgacccgcgccgccccctcccgctccaccgtctgccctcccacgcggaggtcgagcggcgcgggcgggtgggcctggatcgcgtgctcgcgccgccggtgccagaggttgccgcctccggtctcaactggtcccggtcagagccctcggactcggccacagatctgatgaactggtccgcttccgtttttgcagcggtagctgccgccgagcccggtccccgcacgacctatcgctcgcttctctcttaggcgccggcgcccttaggcctccgcctggttcgaggcccgtttctcagccatgctgcagaccgacccgctacgaagcagtctctttcatggacgtgaacagcacgtggcgcacggtcgaccggctcagcgccactgcctgcggctgcctggga

SEQ ID NO: 7045 - DNA, 660 bp, synthetic construct
  misc_feature 1..660: note = source = /note="Description of Artificial Sequence: Synthetic coding sequence"
  source 1..660: mol_type = other DNA
atggaactgggtctgggcggattgagcacgctgtcccactgtccgtggccaaggcagcaacctgcgctgtggccgactctggccgcactggccctgctgagcagcgtggcggaggccagcctcggatcggcgccaagatcgccggcaccacgcgagggcccgccaccggtccttgcctcaccggcggggcacctgccgggcgggcggaccgcacgctggtgctccggccgcgcccggcggcctccaccgcaaccctcgcggccggccccgccaccgcctgcccctccgtccgctctcccgcgcggaggccgtgccgcaagagctggcggacctggatcccgcgccagggccgcaggtgcgcgagggtgtagactgagatcacagctcgtgccagtcagagcactgggcctgggtcacagatcggatgaactggtgagattcaggttctgctccggatcgtgtagaagagcaaggtccccgcatgatctgagcctggcctccttgctcggagccggtgcactccggccaccaccggggtcacgccccgtctcgcaaccttgttgtcgcccgacccgctacgaggcagtgtccttcatggacgtgaattcaacttggagaaccgtggaccggctcagcgcaaccgcctgcggatgccttggg

SEQ ID NO: 7046 - DNA, 660 bp, synthetic construct
  misc_feature 1..660: note = source = /note="Description of Artificial Sequence: Synthetic coding sequence"
  source 1..660: mol_type = other DNA
atggaactgggcttgggaggcctgagtacgctcagccattgcccttggcctcggcaacagcccgccctgtggccaacgttggctgcactagctctgctatcttctgtggccgaggcatccttggggtctgctccgaggagccccgccccgcgtgaaggtcctccacctgtcttagcaagccccgcgggccacctcccaggaggcaggaccgccaggtggtgctccggacgggcgcgacgtccaccaccccaaccctcccggcccgctcctcctcccccagccccgccatccgccttgccccgcggcgggagagcagcaagagccggcggccccgggtcgagggcccgggccgccggtgccagaggatgtcggcttaggtctcagctcgtgcccgtccgggccctcggcctgggccatcggagcgatgagctggtgaggtttcgattctgttcaggttcttgccggcgcgccaggtctcctcatgacctgagtctggctagtctgctgggggccggggctctgaggcctccacctggctcgcgacctgtatcccaaccttgttgtagaccaacccgctacgaggctgtgagctttatggacgtcaacagcacctggaggactgtcgatcggctgtctgcaactgcatgtggctgcctgggg

SEQ ID NO: 7047 - DNA, 660 bp, synthetic construct
  misc_feature 1..660: note = source = /note="Description of Artificial Sequence: Synthetic coding sequence"
  source 1..660: mol_type = other DNA
atggaactcggactgggcggcctctccacactttcacattgtccgtggccaaggcagcagcctgctctgtggccaacattggccgccctggcccttttgtctagcgtggccgaagcatctctgggttcagcaccacggagtcctgcgccgcgcgaaggccctcctccagtcctcgcgagccccgcaggccacttgcccggcgggagaactgccagatggtgttctggcagggcccgtcgcccccccccacaaccatcccgtcccgctccaccacccccagcccctccctctgccctcccccgcgggggtagagcagccagggctgggggccctggatccagggccagagctgctggcgcccgcggctgtcgcttgaggtcccagctggtgcccgtaagggcactaggccttgggcatcggtctgacgaactggtgagatttcgattctgttccgggtcctgccgccgcgctagatcgcctcacgatctcagtctcgcttcactcctaggagccggggcattgaggccgccgcccggatcccgaccagtgagtcagccatgctgcagacccacgcgatatgaagctgtaagcttcatggatgttaactctacgtggagaaccgttgacagactcagcgcaaccgcgtgtgggtgcctcggg

SEQ ID NO: 7048 - DNA, 660 bp, synthetic construct
  misc_feature 1..660: note = source = /note="Description of Artificial Sequence: Synthetic coding sequence"
  source 1..660: mol_type = other DNA
atggagctcggcttgggtggtctgagcacactttcacattgtccttggccgcggcaacaacccgcattgtggcctacgctcgccgctttggccctgctatcctctgtggccgaagcatccttgggcagtgccccccggtcgcctgccccccgcgagggccctccccctgtcttggcgtctccagccggccacctgcctggaggaagaaccgctcgctggtgctccgggagagcccggcgcccaccccctcagccaagcaggcctgcacctccacctcctgccccaccaagtgctttgccaagggggggacgagctgctcgagcgggagggcccggatctagggcgagggcagccggagctcgcggctgcaggctgcggtcccaactcgtacctgttcgggctttgggtctggggcacaggtctgatgaacttgtgcgctttcgtttttgctccggatcttgtcgacgcgccagatcaccccatgacctgtccctcgcatccttgcttggagccggagcactgaggccccctcccggctctagaccagtgtcccaaccgtgttgccggcctaccaggtacgaagctgtctcttttatggacgtaaattctacctggcggaccgtggaccgcttgtcagccaccgcctgcgggtgtctgggc

SEQ ID NO: 7049 - DNA, 660 bp, synthetic construct
  misc_feature 1..660: note = source = /note="Description of Artificial Sequence: Synthetic coding sequence"
  source 1..660: mol_type = other DNA
atggagctgggactcgggggactgtccactctgtcgcattgcccgtggcctcggcagcagcccgcactgtggccgaccctggccgccctcgccctgctgtcatcagtcgctgaggcgtcgcttgggtcagcgccgcgctcgccggcaccgcgcgaaggaccgccacctgtcctcgcgtcccctgcgggccacctgccgggagggaggaccgcccggtggtgctctggccgtgcccggcggccgccaccacagccttcgcggccagccccgccgccgccggcccctccatcggccctcccgcgcggcggtcgcgcggcgcgtgcggggggcccgggctcccgggcccgcgccgcaggagcaagaggatgccggttgcgctcgcaactggttccagtgcgcgcgttgggactggggcataggtcggacgagctggtgcggttccggttttgttctgggagctgccgccgcgcccgaagcccgcacgacctgtcgctggcctcgttgctgggagcgggcgcgctccgcccacccccgggtagcaggcccgtgtctcagccatgctgtagacctactcggtacgaagcagtctcctttatggacgtgaattcaacctggcggaccgtggatcggctctcagcgacggcttgtggatgcctgggt

SEQ ID NO: 7050 - DNA, 660 bp, synthetic construct
  misc_feature 1..660: note = source = /note="Description of Artificial Sequence: Synthetic coding sequence"
  source 1..660: mol_type = other DNA
atggaattgggtctgggcgggttgtccactctttcgcattgtccttggccccggcagcaacctgccctgtggccaaccctcgcagcattggcactcctgtcgtccgtcgcggaagcctcgctcggaagcgctccccgttcgcctgcacctcgcgaaggcccacctcctgtgctcgcatctcccgcaggacacctgccgggagggagaactgcgagatggtgttcgggaagggcaagacgacctcctccacagccaagccgtcccgctccaccgcctccagccccgccatccgcactgccaagaggcggcagagcagcacgagccggtggtcccgggtcgcgtgcccgcgcggctggtgcgcgtgggtgtcggctgaggtcccaactcgtgccagtgagagcactgggtcttggccatcgctccgatgagctggtcaggttcagattttgtagcgggtcatgtagaagggccagatctccacatgatctgtcgctggcatcgcttttgggagcaggtgcgctccgtcccccgcctggcagcaggcctgtctcgcaaccttgttgcaggcctaccaggtacgaagccgtgtcctttatggatgtgaattcgacctggcggaccgtggatagactttccgcaactgcatgcggttgtctgggt

SEQ ID NO: 7051 - DNA, 1599 bp, synthetic construct
  misc_feature 1..1599: note = source = /note="Description of Artificial Sequence: Synthetic coding sequence"
  source 1..1599: mol_type = other DNA
atgggaccaagaggagcagcatccctccctcgcggaccagggcctagacgacttttgctgcctgtcgtgctcccattgctcctgttgcttcttcttgcacctcctggttccggcgcaggcgcatcccggcccccacacctggtctttttgctcgcagacgacctgggatggaacgacgtgggatttcatggttcgcgcattcgcactcctcatctggacgctctcgcagcaggaggcgtgcttttggataactattacacccaacctctttgtacgccttctcgctcacaactgcttactgggagataccaaattcggactggactccaacaccagataatctggccgtgtcaaccctcgtgtgtgcccctggacgagaaacttcttccccaacttctgaaggaagctggatacactacgcatatggtcggtaagtggcatcttggaatgtataggaaggaatgccttcccacgcggaggggattcgatacttacttcggatacctgcttggatccgaagattactactcccatgagagatgtacccttatcgatgcattgaacgtgactagatgtgcacttgattttcgcgatggggaagaggtggcaaccggttataagaacatgtattcgacgaatatcttcaccaagcgagcaattgcactgatcaccaaccacccacccgaaaagcccctgttcctctaccttgcactgcaatcagtccacgaacctctccaggtgccagaagaatacctcaagccgtacgacttcatccaggataagaaccgacatcactacgcgggaatggtcagccttatggacgaagcggttggaaatgtgacggcggcactgaaaagctctggactgtggaacaacaccgtgtttatcttttcgaccgataacggcggtcagaccctcgcaggcggcaacaattggcctctgcgcgggcgtaagtggtcgctttgggagggaggagttcggggggtgggatttgtggcctcccctctcttgaaacaaaaaggggtgaagaacagagagcttattcacatttcagattggctgcccactctcgtgaagctggcacgtggacatactaatggaactaagcctcttgacggattcgatgtgtggaaaaccatctccgaaggttcgccttcccccagaattgagcttcttcacaatatcgatccgaactttgtggactcaagcccttgtcctagaaactcgatggcacctgcaaaagatgactcctcgctccctgagtactcggcattcaatactagcgtccatgcggcaattaggcacgggaactggaaacttttgactggctacccggggtgcggttactggttcccaccaccctcgcagtacaatgtgtcagaaataccttcatcggatccccccaccaagaccctgtggctttttgacattgaccgggacccagaggaaagacatgatctctctcgcgaatacccccacatcgtgaccaaacttttgagcagacttcaattctaccataagcactcggtccccgtgtacttccctgcacaggacccccgatgtgacccaaaggcgactggtgtctggggtccttggatg

SEQ ID NO: 7052 - DNA, 1599 bp, synthetic construct
  misc_feature 1..1599: note = source = /note="Description of Artificial Sequence: Synthetic coding sequence"
  source 1..1599: mol_type = other DNA
atggggccaagaggggccgcctccttgcctcgcggacccggacccaggcgcttgttgctgccagtggtcctgcctctccttctcctcctgctcctggcacccccagggtctggggccggggcctctcgcccaccccatcttgttttcctcttagctgatgatctagggtggaacgatgtcggatttcatgggagtcgaattaggacacctcatttagacgctctagccgctggaggagtcctgctggataattattatactcagcctctttgtactccctcccgctctcagctccttacagggaggtatcagattcggacagggctccagcatcagataatatggccttgtcagccaagttgcgtgcctctcgatgaaaaactgctcccccagttattaaaagaggccggatatacaactcacatggtagggaagtggcatcttggaatgtatcgcaaagaatgtctccccacaaggaggggattcgatacatatttcgggtacctactcgggtctgaagattattacagtcatgaacgctgtacattaatcgatgcccttaacgtaacaaggtgtgctctggatttccgagatggggaagaagtggccacagggtataagaacatgtattctacaaatatattcactaaacgagcaatcgcactcataactaaccacccccccgagaaacccctcttcctatacctggccctgcagagtgtacatgagcccctccaggtgcctgaagaatacctcaaaccctacgattttatacaggataagaacagacaccactacgctggaatggtgtcgctcatggatgaagccgtggggaatgtgacggccgctctaaaatcttccgggctgtggaacaatacagtcttcatattttctactgataacgggggacagacactcgccggggggaacaattggcctcttaggggacgaaagtggtcattatgggaagggggagtgcgaggagtagggtttgtggcatctccccttctaaaacaaaagggagtcaaaaatcgcgaacttatacacatctccgattggctgccaacactcgtcaaactcgcacgcgggcatactaatgggactaagccactcgatggattcgacgtatggaaaacaatctcagaaggatcccctagtccacgaatcgaactcctccacaacatagatcctaattttgtggattcctcaccatgccctcggaatagtatggctcccgcaaaagatgattcctcgttacccgaatattctgctttcaatacatcagttcacgccgccatcagacatggaaactggaaattgctcacaggatatccagggtgtgggtattggttcccccctccatcacagtacaatgtttctgaaatcccatctagtgatcctcccacaaaaactctctggctctttgacatcgaccgcgatcccgaagaacggcatgatctgtcccgcgaatatccccacatagtgactaaactactgtccaggctgcagttctaccacaaacactccgtacccgtgtattttccagctcaggatccccggtgtgatcccaaagctacaggagtatggggaccctggatg

SEQ ID NO: 7053 - DNA, 1599 bp, synthetic construct
  misc_feature 1..1599: note = source = /note="Description of Artificial Sequence: Synthetic coding sequence"
  source 1..1599: mol_type = other DNA
atggggccaaggggagccgcgtcgctgcctcgcgggccaggacctcgccggcttctgctgccggtggttctgcctctgctgctgctgcttctgctcgcacctccaggcagcggggcgggagcctcccgcccgccgcacctggtgttcctcttggcagacgacttggggtggaacgatgtgggatttcatggctccagaatccgcaccccacacctcgacgcgctggccgcggggggagtgctgctggacaactactacacgcagccgttgtgcactcctagccgaagccagctgctgacgggcagataccagatccgcactgggctgcaacaccaaatcatctggccatgccaacctagctgcgtcccgctggacgaaaagctcctgccccagctgctgaaagaggccggctacacgactcacatggtgggcaagtggcatctgggaatgtaccggaaggaatgccttcctacccgccgcggctttgatacctacttcggatacctgcttggaagcgaagattactatagccacgagcgctgcacgctcatcgatgccttgaacgtgacccggtgcgccctggatttcagagacggggaagaggtggctaccggatacaagaatatgtactcaactaacattttcacgaagagggcgatagcgctcattaccaatcatccgcctgaaaaacctctgttcctttacctcgcactgcagagcgtgcatgagccactgcaagtgccggaggaatacctgaagccgtacgactttatccaagacaagaatcgccatcattacgctggaatggtgtcccttatggacgaggcagtggggaacgtgaccgccgccctgaaatcctctggactttggaacaacactgtgttcatcttctccactgacaacggaggccagaccctggccggcggtaacaactggccattgcggggaagaaagtggtcgctctgggaaggaggagtccgaggtgtgggctttgtagcttccccgctgctcaagcaaaaaggggtgaaaaaccgtgagttgattcacatctccgattggctcccaactttggtcaagctcgcccgaggccataccaacgggaccaaacccctcgacgggttcgatgtgtggaaaactatctcagaagggtcgccttcgccgagaatcgaactcctgcacaacatcgatccaaatttcgtggactcgtcgccgtgtccgcggaactcgatggcgcccgccaaagatgactcctccctgcctgaatactccgcgttcaataccagcgtgcatgctgcaatccggcacgggaactggaagctcctgacgggctacccgggttgcgggtactggttcccccctccgagccaatacaacgtgtcagaaatcccgtcatcggaccccccaactaagaccctgtggctcttcgacattgaccgcgaccctgaggagagacacgacctctcgagagaatacccccacattgtcactaaactgctgtcgcgcctccaattctaccataagcactccgtgccggtgtacttcccagcccaagaccctcggtgcgatccaaaggccaccggagtgtggggaccatggatg

SEQ ID NO: 7054 - DNA, 1599 bp, synthetic construct
  misc_feature 1..1599: note = source = /note="Description of Artificial Sequence: Synthetic coding sequence"
  source 1..1599: mol_type = other DNA
atggggccgcggggagctgcgtccctgccgcggggccctggaccgcggaggctccttctcccagtcgtcctgcctctgctgctgctcctgctgctcgctcccccaggtagcggcgccggagcttccagaccgccgcacttggtgttcctcttggctgatgaccttgggtggaatgacgttgggtttcatggatcccggatccgcaccccacacctggacgctctcgccgctgggggcgtgctcctggacaactactatactcaacccctgtgcactccgtcaaggtcccagctcttgaccggacgctaccagatcaggaccggcctccagcaccagatcatctggccttgccagccgtcgtgtgtgccgctcgacgaaaagttgctgccacaactgctgaaggaggcaggatacaccactcacatggtgggaaagtggcatctgggaatgtaccggaaagagtgcctgcctactcgcagggggttcgatacctattttggatacctcctgggctcagaggactactactcacacgagcgctgtaccctgatcgacgctctgaacgtcactcggtgcgccctggacttccgcgacggggaggaggtcgccactgggtacaaaaacatgtacagcactaacatctttaccaagcgggctattgcgttgatcaccaaccacccacctgaaaagcctctcttcctgtacttggcgctgcagtcagttcacgaaccgcttcaggtgccagaggaatacctcaaaccgtacgactttatccaggataagaacagacatcactacgcggggatggtgagcctgatggacgaggccgtgggaaacgtgactgcagccctgaagagctctggtttgtggaacaataccgtgttcattttctcgaccgataatggtggacagaccctggccggaggtaataactggccgctgcggggacgcaagtggagcctgtgggaggggggagtgcgcggagtcggattcgtcgcatcccctctgctgaagcagaaaggagtcaagaaccgggaactgattcacatcagcgattggctgccgacccttgtgaaactcgctaggggacacacgaatggaaccaagcccctggacggattcgatgtctggaaaaccatctcggaaggatcgccgtcgcctcggatcgaattgttgcacaacatcgacccaaacttcgttgactcttctccttgcccgaggaactcaatggccccggccaaggatgactcgtcgcttccagagtacagcgcctttaacactagcgtgcacgcggcgatccggcacggaaactggaagctgctgactgggtacccgggctgcggatactggttcccaccgccgtcccagtacaatgtgtcagaaatcccgtcctcggatccaccgactaagacgctctggctcttcgatatcgaccgcgacccggaggagcggcatgacctgagccgggaatacccacatattgtcactaagctgctgtcacgcctccagttctaccataagcatagcgttccagtctacttcccggcccaggacccacgctgtgacccaaaagctaccggggtgtggggcccttggatg

SEQ ID NO: 7055 - DNA, 1599 bp, synthetic construct
  misc_feature 1..1599: note = source = /note="Description of Artificial Sequence: Synthetic coding sequence"
  source 1..1599: mol_type = other DNA
atgggacctagaggtgcggcctcactcccgcgaggcccggggccacgcaggctgctgctgcctgtcgtccttccattgctgctcttgttgctgctggcaccccccggaagcggcgccggagcttcgaggccgcctcacctggtgttcctgctggcagacgacttgggatggaatgatgtagggtttcatggaagccgtatccgaacgccccatctcgacgccctggccgccggcggggtgctgttggacaactactatactcagcctctgtgcacgccgagccggagccagcttttgacgggacgctatcaaatccgtaccggactccaacatcaaatcatatggccctgccagcctagctgcgtgccgctcgatgagaagctgcttcctcagctgctgaaagaggcgggatacactactcacatggtggggaagtggcatctgggtatgtacagaaaggaatgcttgccaaccagacgcggattcgacacctactttggatatctgctgggctccgaagattactactcgcacgagcgctgcaccctgatcgacgcactgaacgtgacgagatgtgctttggatttcagagatggcgaagaggtggctaccggatacaaaaacatgtacagtaccaacatcttcaccaaacgggcgatcgcactcatcaccaaccacccccctgagaagccactcttcctctacctggcactgcagtcagtgcacgagccactccaggtcccagaagaatacctgaagccgtacgatttcatccaggacaagaaccgccatcactacgcgggtatggtgtccctcatggacgaagcggttggaaatgtgacggccgcgctcaagagttccggtctgtggaacaacaccgtgttcattttctcaaccgacaatggagggcaaactttggccggaggaaataactggccgcttcgcggccggaagtggtcactttgggaagggggagtgaggggggtcggattcgtggcgtcaccactgctgaagcaaaaaggggtgaaaaatcgggaattgattcacattagcgactggctccctacgctggtgaaacttgcccggggacatactaacgggaccaagcctctggacggcttcgatgtttggaaaactatctcagaaggctccccgagcccgagaatcgaactgctccacaacattgatcctaacttcgtggattcgagcccctgcccgcggaattccatggcgccggctaaagacgattcgtctttgcctgaatactcggcctttaacacttcggtgcacgcggcaatcagacatggcaattggaagctcttgactggatacccaggctgcggctactggtttccgccgccatcccagtacaacgtcagcgaaatcccctcctcggacccgcccactaagaccctctggctgttcgatatcgatcgcgacccagaggagagacatgatctcagcagagagtaccctcacatcgtgactaagctgctgagccgcctgcagttctaccacaaacactccgtgccagtatactttcccgcccaagacccgagatgtgacccgaaggctaccggagtctggggaccgtggatg

SEQ ID NO: 7056 - DNA, 1599 bp, synthetic construct
  misc_feature 1..1599: note = source = /note="Description of Artificial Sequence: Synthetic coding sequence"
  source 1..1599: mol_type = other DNA
atgggaccacgaggcgccgcttcattgccgagaggcccgggtcctaggcgacttctgctgcccgtggtgctgcctctcctgctgctcctgctactcgcccccccaggctccggcgctggcgcaagccgccctccacaccttgtgttcctcctggccgatgacctgggatggaatgacgtcggctttcacggctcccggattaggaccccccaccttgacgctctggcagcagggggggttctgctggacaactattacacacagccactctgcaccccatcaagaagtcagctgttaactggacgatatcagatccggaccgggctccagcaccagattatctggccttgtcagccatcatgcgttcccctggacgagaaactgttgccacagctgctaaaagaagcagggtatactacccacatggtgggcaagtggcacctcgggatgtaccggaaggagtgcctgcctactaggcgcggattcgacacttactttggttatctcctaggatctgaagattactactcgcacgaacgttgcacactgattgacgcgctgaacgtcactcggtgtgccctggactttcgcgacggagaggaggtggctactggttacaagaatatgtatagcaccaacatcttcacgaagcgggctatcgcgttgatcacaaaccatcctcctgaaaagccactttttctgtacttggccctccagtctgtgcacgagccgttgcaggtgcctgaagagtacctgaagccatacgattttatccaggataagaatagacaccattatgcagggatggtgtccctcatggatgaagcagtaggcaacgtgacggctgcattgaagtcatccgggttgtggaataacacggtgtttatcttcagcaccgacaatggaggtcaaaccctcgctggcggcaacaactggcctctccgaggaaggaaatggtcactgtgggaggggggagttcgcggggtagggttcgtggctagtccgctgcttaagcagaagggagtcaaaaatagggaactgatccatatctccgattggcttcctacactcgtgaagctggcgcgcggccacacgaacgggacgaaacccctagatggtttcgacgtatggaagaccatctccgagggttctccctccccacgcattgagctattgcacaacattgaccctaatttcgtggattcgtccccttgtccgcgaaactcgatggcgcctgccaaagacgattcaagcctgccagaatattctgcttttaacacttctgtgcacgccgctatccggcatggtaactggaagctgctgacaggctatcccgggtgtggttactggtttcctcctcctagtcagtataatgtgagtgaaatcccaagcagtgatcctccgacgaagaccctttggttatttgatattgaccgagatcctgaagaacgtcacgatctttcaagggagtacccgcacatagtgacaaaacttctgtctcgcctgcaattttaccacaagcactccgttcccgtctatttccccgctcaggaccccagatgtgaccccaaggcaacaggcgtgtggggtccatggatg

SEQ ID NO: 7057 - DNA, 1599 bp, synthetic construct
  misc_feature 1..1599: note = source = /note="Description of Artificial Sequence: Synthetic coding sequence"
  source 1..1599: mol_type = other DNA
atgggtcctagaggagctgcctccttacctaggggacctggcccaaggagattgttacttccagttgttcttccgctattgttgttgctgcttctagccccccctgggtcaggcgcaggagctagtagaccacctcatttggttttcctcctcgctgacgatcttggatggaacgacgttggttttcatggttctcggatcagaactccacatttggacgcccttgctgctggaggagtattgctggacaactactatactcaacctctttgcactcctagtcgtagtcaactgttgacaggtagataccaaattcgaacgggtcttcagcatcagattatatggccttgtcagcctagttgcgtgcctttggatgagaaacttcttcctcagctgcttaaggaggccggttatactactcatatggtgggaaaatggcatctgggaatgtataggaaagaatgtcttccaacgagacgaggatttgacacttattttgggtatttgcttggctcggaagactactattctcacgaaagatgcaccttgatagacgccttgaacgttactagatgcgctcttgatttccgtgatggagaagaagttgcgacaggttataagaatatgtattcaacgaacatttttactaagcgtgccattgctcttattaccaaccatcctcctgaaaaaccactctttttgtatcttgctctccagtcggttcacgagccactacaggttccggaagagtatcttaaaccatatgactttattcaggataagaacagacatcactacgctggaatggtttctcttatggatgaggctgtcggtaatgttacagcagctcttaaatcaagtggtttatggaataacactgtcttcattttctccactgataacggtggtcagactcttgcaggtggaaataattggccactgaggggaaggaagtggtctctttgggagggaggcgttaggggtgtaggtttcgttgcttctccacttttaaagcagaagggagtcaagaacagagaactgattcatataagcgactggcttccaactctagttaaactggccaggggccacacaaacggaacaaagcctttggacggtttcgatgtgtggaagacaatttccgagggttccccaagccctcgtatcgagcttttgcataacatagatcccaactttgttgacagctcaccatgcccgcgaaactcaatggcccccgctaaggatgattcatcactgccagaatattcagcttttaatacgtcagttcacgccgcaattcgacacggaaattggaagctcttaacaggctatccaggttgcgggtactggttcccacctcctagtcagtataacgtctcggagattccctcgtccgatcctccaaccaagaccctgtggttatttgatatcgatcgtgatcctgaagaacgccatgatctctcaagggaatacccacacatcgtgactaagttgcttagccgtcttcaattttatcacaaacattccgtgccagtgtattttcccgctcaggaccctagatgcgacccaaaggctactggcgtttggggtccctggatg

SEQ ID NO: 7058 - DNA, 1599 bp, synthetic construct
  misc_feature 1..1599: note = source = /note="Description of Artificial Sequence: Synthetic coding sequence"
  source 1..1599: mol_type = other DNA
atgggccctcgaggcgcggcgtcgcttcccaggggcccgggaccgcgccggttgctgctcccggtagttctgccgctgcttcttctccttctcctggccccgccagggtctggagccggggcgtctcgtcctccgcatctcgtttttctgttagccgatgatctaggatggaacgatgtaggcttccatggttctcgtattcgcacgccacatcttgacgccttggccgctggtggcgtcttgctagataattattatacgcagcccctatgtacgccgtcaagatctcaactacttacaggcagatatcaaataagaacaggcctgcagcatcaaattatctggccatgccaaccgtcttgtgtgccgctcgatgagaagttactaccacagttgctgaaagaagccggatacaccacacatatggtagggaagtggcatctcggtatgtacagaaaagaatgcttaccgacgagaagaggatttgacacttacttcgggtacttacttggttccgaagattattattcacacgaacgttgcacgctaattgatgctttaaacgttactcgatgtgcattagattttagggacggcgaagaagtagcgacaggttacaaaaatatgtattcgacaaatattttcacgaaacgtgctatcgcgctgattacgaaccaccccccagaaaagccgttatttctctatcttgcactgcaaagtgttcacgaaccgcttcaagtgccggaagaatatcttaaaccttacgatttcattcaagataaaaaccgtcatcattatgcggggatggtctctttgatggatgaggcggtcggaaatgtcacagcggcactgaaatctagcggtctctggaacaacacagttttcatatttagcacagacaatggaggacaaaccctggccggaggaaacaactggcctttgcgtgggaggaaatggagcctgtgggagggtggcgtacgcggggtcggattcgtagcgagtccattgttgaaacaaaaaggggttaaaaatcgagaacttattcatatcagcgactggcttccgactcttgtaaaacttgcccgtggacatactaacggcacgaaaccgttggatggttttgacgtttggaaaacaatttctgaaggctcgccgagtcctaggattgaactgttgcacaacattgatcctaactttgtcgattcgtctccatgtcctcgcaattccatggctcctgcaaaggatgattccagtctgccagagtactcagcgtttaatacgtctgtgcatgcggcaattcgacatggcaattggaagttgttaacaggctatccgggttgcggatattggtttccaccaccgtcacagtataatgtatcagaaataccgagcagcgatccgccgacaaagacactttggctgtttgacatcgatcgtgatccagaagaaaggcacgacttgtcgcgtgaatatccacacatcgtgacgaaattattaagcagacttcagttttatcacaagcatagcgttcctgtttattttccggcacaggatccgcgctgcgatcctaaagcaaccggtgtctggggtccgtggatg

SEQ ID NO: 7059 - DNA, 1599 bp, synthetic construct
  misc_feature 1..1599: note = source = /note="Description of Artificial Sequence: Synthetic coding sequence"
  source 1..1599: mol_type = other DNA
atgggtccacgcggcgccgccagccttccgagaggaccgggcccacggagactgctgctgccggtcgtcctgccactgcttctcctgctgctcctggcacctccgggctcgggagctggcgcatcccggccaccgcatctcgtctttcttctggctgacgaccttgggtggaacgatgtggggttccatggctcgcggatccgcaccccacatctcgacgcgctggccgcaggaggcgtgcttctcgacaactattacactcagcccttgtgcactccaagccgctctcagttgctcactggacgctaccagatccgcaccggcctgcagcatcagatcatctggccgtgtcagccgtcatgcgtgcctcttgacgagaagctgctgcctcagcttctgaaagaggcaggatacaccacccacatggtgggaaaatggcatctgggaatgtaccgcaaggaatgcttgccgactagacgcggatttgatacctactttggatacctgctcggctcggaggactactacagccacgagcgctgtactctcattgatgcgctgaacgtgacccggtgcgctctggattttcgagatggagaagaggtcgcgaccggatacaaaaacatgtacagcaccaatatcttcaccaagcgcgctatagccctcattactaaccacccaccagagaaaccgctgtttctctacctggcccttcaatcagtccacgagccactccaggtgcccgaagaatacctgaagccgtacgacttcatccaggacaagaatcggcatcactacgcgggaatggtgtctctgatggacgaagccgtgggaaacgtgactgcggcactcaaatcctccggactgtggaacaacaccgttttcatcttcagcactgacaacgggggccaaactcttgccggaggaaacaattggcctctgcggggccggaaatggtccctgtgggagggaggggtgagaggagtggggtttgtggcgtccccactgctgaaacagaagggagtgaaaaacagggaactcatccatattagcgactggctgccaactctggtgaagctcgctagaggacacacgaacgggactaagcctctggacggtttcgacgtgtggaaaaccatctcggagggatccccgagtccgcgaatcgaactgttgcacaacatcgatcccaatttcgtggactcgagcccttgtccgagaaactcgatggctccggccaaggacgattcctcgctcccagaatacagcgcgttcaacacttcggtgcacgcggcgatccgacatggaaactggaagctgctgactgggtaccctggctgcggatactggtttcccccaccgtcccaatacaacgtgagcgagatccccagcagcgacccgccgaccaagaccctgtggctgttcgacatcgaccgcgaccccgaagagcggcacgacttgtcccgcgaatacccacacatcgtgactaagctgctctctcggctgcagttctatcacaagcattcggtgccggtgtactttcccgcacaggatcctcgctgcgaccctaaagctaccggagtgtggggcccatggatg

SEQ ID NO: 7060 - DNA, 1599 bp, synthetic construct
  misc_feature 1..1599: note = source = /note="Description of Artificial Sequence: Synthetic coding sequence"
  source 1..1599: mol_type = other DNA
atgggcccgaggggtgccgcctcactcccacggggccctggacctaggagactcctgctgccagtggtgctgcctctgttgctcttgctcctcctggccccacctggaagcggcgcaggagcgagtagacctccgcatctggtgttcctgttagccgatgatctgggctggaacgatgttggattccatggcagtcgcattcggacaccacatcttgacgcattagccgccggcggggtgcttctggataattattatactcaaccactctgtacacctagtagatcacaactgcttacaggcagatatcaaattaggaccggacttcagcatcagataatttggccttgccagccaagctgcgttccactcgacgaaaagttgctgcctcagctgctgaaggaggctggttataccacacacatggttgggaagtggcacctcggcatgtacaggaaggagtgcctgccgacaaggcggggatttgatacctactttggctatctactggggtccgaagactactatagccatgagagatgcacgttgatcgacgcgctcaacgtgacacgctgcgctctggactttagagacggcgaagaggtcgcaactggctataagaacatgtactccaccaacatatttacaaagagggctatcgccttaattaccaaccacccaccagagaagcccctgttcttgtacctggcactgcagagcgtccacgaaccacttcaggttcccgaagagtacctgaagccttacgattttatacaagataagaatagacaccattatgcaggcatggtctccctcatggatgaggcagtaggcaatgtgacagccgcactgaagtctagcggtctttggaataacaccgtcttcatcttctcaaccgataatggcgggcagacacttgctggcgggaacaattggcccctcaggggtagaaaatggtctctgtgggagggcggggtgaggggagttggattcgtggccagtccccttctaaagcagaagggcgtgaaaaacagagaactgatccatatatccgattggttgcctactctggtcaaactcgccaggggacatacaaacgggactaagccattggatggattcgatgtttggaagacaatctctgaaggctctccttccccaaggattgaactcttgcataatatcgaccccaattttgtcgacagctctccgtgcccaaggaattccatggcaccagccaaagacgacagcagtctccctgagtactctgccttcaatacttcagtgcacgctgcaattcgacacggcaactggaaacttctgaccgggtaccccgggtgcggctattggtttccacccccatcccaatataacgttagcgaaatcccctcctccgacccaccaaccaaaaccctgtggttgtttgatatagatcgcgatcctgaagagaggcacgacttgtctcgcgaatatcctcacattgtcactaaactcctctctcgcctacagttctaccacaagcactccgtgcctgtgtattttccagcacaggaccccaggtgtgatccaaaagcaacaggagtctggggtccatggatg

SEQ ID NO: 7061 - DNA, 1599 bp, synthetic construct
  misc_feature 1..1599: note = source = /note="Description of Artificial Sequence: Synthetic coding sequence"
  source 1..1599: mol_type = other DNA
atgggaccgagaggagcagcctcactgcctagaggaccgggaccgaggagactgctcctgccagtcgtgctgcctctgctgctgctcctcttgctggccccgcccggaagcggagcgggcgcctcgcggcctccacacctggtgttcctgctcgctgacgatctgggctggaacgacgttgggtttcacggaagccgcatccggaccccgcatctcgacgcactggcggcaggcggagtcctgctcgacaactactatactcaaccgctctgtaccccatctcgctcccaactcctgactgggcgttaccaaattagaaccggattgcaacaccagatcatctggccttgtcagccaagctgcgtgccgttggacgaaaagctcctgccacagctgcttaaggaggcgggatacactacgcatatggtgggtaagtggcacctcggaatgtaccggaaggaatgtctcccaactcggcgcgggtttgacacgtacttcggctacctgctggggtcagaagattactactctcacgagcgctgtaccctgattgacgcgcttaacgtgactcgctgcgcgcttgacttcagggatggagaagaagtcgccactggctacaagaatatgtactcgaccaacatcttcactaaacgcgccatcgccctgatcactaatcacccgccggagaaacccctgtttctctacctggcgctgcagtccgtccacgagccactccaggtgccggaagagtacctcaagccatacgactttattcaggacaagaatcggcaccattatgccggaatggtttcgctgatggacgaagctgtcggaaacgtgactgcggctcttaaatctagtggactgtggaacaataccgtctttatcttttcaaccgataatggagggcagaccttggcaggaggcaataactggcctctgagaggcaggaagtggtcgctgtgggaaggaggagtgcggggcgtcggattcgtcgcctcgcccctcttgaaacagaagggggtgaagaacagagagctgatccatatctccgattggctgccgacgctggtcaagctggcacggggacacactaacggcacgaaacccctggatggattcgacgtgtggaaaaccatcagcgagggtagcccatcccctcggatcgaacttctccataacatcgaccccaacttcgtggattcgagcccgtgtccgagaaattccatggcgccggcaaaggatgacagctcactcccggagtatagcgcgtttaacacctcggtgcacgccgcaatccgccacggaaactggaagctgctgactggatatccgggatgcgggtactggttcccgccgccttcacaatacaatgtctccgaaattccctcttcggacccaccgaccaagaccctgtggctcttcgatatcgaccgagatccagaggaacggcatgacctgtcgcgggagtacccgcacatcgtcaccaaactgctgtctcgcctccagttctaccataagcactcggtgccggtgtacttcccagcgcaggacccgcggtgcgatccaaaagcgaccggcgtgtggggcccgtggatg

SEQ ID NO: 7062 - DNA, 1599 bp, synthetic construct
  misc_feature 1..1599: note = source = /note="Description of Artificial Sequence: Synthetic coding sequence"
  source 1..1599: mol_type = other DNA
atgggaccgcggggtgccgcctcgctgccgagaggacctggccctcgccgcctgctcctgcccgtggttcttccgctgctgctgctccttctgctggccccgccaggaagcggcgcgggggcttcccgcccgccacacctggtgttcctcctcgctgacgacttgggatggaacgatgtcggcttccacggatcaagaatccgcactccacatctcgatgccctggcggccgggggagtgttgctcgacaactactatacgcaaccgctttgcactccgtcccggtcccaactgctgaccggacgataccagatcagaaccggcctgcagcaccagatcatctggccctgccagccgtcgtgtgttccgctcgacgaaaagctcttgccgcaacttctgaaggaagccggctacactactcacatggtcggtaagtggcatcttggaatgtaccgcaaggaatgcctgccgactcggaggggcttcgacacctacttcggatacctcttgggttcagaggactattactcgcacgaaagatgtactttgatcgatgctctgaacgtcactcggtgcgccctggattttcgggacggcgaagaggtggcgacgggatacaagaacatgtactcgaccaatatcttcaccaagcgcgcaatcgctctgatcaccaatcacccgccagagaaaccactcttcctctacctcgcactgcagtccgtccacgagcctctgcaggtgccagaggagtacctcaagccttatgattttatccaggataagaacaggcaccattacgccggtatggtgagccttatggatgaagcagtgggcaatgtcaccgcagccctgaaatccagcggactgtggaataacaccgtgttcattttttctactgacaacggcggtcagactctcgcaggagggaacaattggccgctgcggggccggaagtggagcttgtgggaaggaggagtccgtggagtgggattcgtggcctccccgctccttaagcaaaagggggtgaagaatagggaactgatccatatttcggattggctgccgaccctggtgaagctggcgagagggcacacgaacgggaccaaaccgctggatggattcgatgtgtggaaaaccatttcggaaggatccccttcgcctcgcatcgagttgctccacaacattgacccgaatttcgtcgactcatcaccttgcccccggaatagcatggcccccgcgaaggacgattcgtccctgccagaatactctgcctttaacacttcggtgcatgctgcaatcagacacggaaactggaagctcctgaccggctacccgggttgcgggtactggtttcctccgccatcacaatacaacgtgagcgaaatcccctcctcagaccccccaactaaaaccctgtggctcttcgacatcgaccgcgatcctgaagagcgccatgacctgtcgagggagtacccacatatcgtcaccaaactgttgagccggctgcagttctaccataagcacagtgtgcccgtgtacttcccggcgcaagacccacgctgtgacccaaaagcgactggagtgtggggaccgtggatg

SEQ ID NO: 7063 - DNA, 1599 bp, synthetic construct
  misc_feature 1..1599: note = source = /note="Description of Artificial Sequence: Synthetic coding sequence"
  source 1..1599: mol_type = other DNA
atgggaccaaggggagcagctagcctgcctcgggggccgggtcctcgccgacttctactgccagtggttctccccttactgctcctgctcttattagcccctcctggctcaggagccggcgccagcaggccccctcatctggtgtttctcctggccgatgacctgggatggaacgacgtggggttccatggatcccgaatccgaactccgcatctcgatgctctggctgcaggtggcgttctgctggacaattactatactcagccgctgtgtacaccctcccgttctcagctgctgaccggaagatatcaaattaggacggggctgcagcatcaaattatctggccttgccaaccctcttgtgtgcccctggacgaaaaacttttaccccagctgctcaaggaagctggatacacgacccatatggtgggtaagtggcacttagggatgtatcgaaaagaatgcctccccacgaggcgaggcttcgacacttatttcggctacctactgggatccgaagactattactctcatgaaagatgcacgctcatcgatgccctcaatgtgacaagatgcgcactcgacttcagagacggagaggaagttgcgaccgggtataagaacatgtactcaacgaatatcttcacgaagcgtgccatcgcacttattaccaaccaccctccagagaagcctctgtttttgtatctagccttgcagtccgtgcacgagcccctgcaggtgccagaagagtatctgaaaccttatgactttattcaggacaaaaacaggcaccactatgcaggtatggtttccctgatggacgaggcagtggggaacgtaaccgccgctcttaagtcaagtggactgtggaacaataccgtgttcatttttagtacagacaatggtggccagacattggcaggcggcaataactggcctctacgaggccgaaaatggtctctttgggaaggaggcgtgaggggggtcgggtttgtggcttcccctctcctaaaacaaaagggagtcaaaaacagagagctgatccacatctctgactggttaccgactctcgtgaagttggccaggggccataccaatggaacaaaaccccttgacggatttgatgtgtggaagactatcagtgaaggaagcccttctcccagaatcgagctgctacataacattgacccaaactttgtggactcctccccttgcccccgaaacagcatggcccccgcaaaggatgattccagcctccctgagtacagtgcatttaatacatcggtccatgcagcgatccgacatggcaactggaagctgcttactggctatcccggatgcgggtattggttccctccgccatctcagtataacgtgtcggagattccgtcctccgaccctccaacaaaaaccctttggctatttgatattgatagagatcctgaagaacgacacgatctgagccgagaatacccccacatcgtgaccaagttgctcagcaggctccagttctaccacaagcattcggtccccgtttatttccctgcccaggatcccaggtgtgaccccaaggcaactggcgtgtggggaccatggatg

SEQ ID NO: 7064 - DNA, 1599 bp, synthetic construct
  misc_feature 1..1599: note = source = /note="Description of Artificial Sequence: Synthetic coding sequence"
  source 1..1599: mol_type = other DNA
atgggcccacgtggcgctgcttccctacccagaggccccggcccacgacgcttactgcttccagtggtgttacccctactactgctgctgctgctggccccacccggatctggagcaggcgccagcagacccccacacctggtgttcctcctggccgacgaccttggctggaacgacgttgggttccacggcagcagaattcgaactccccatctggatgccctcgccgccggaggtgtgctactggataattactacacccagccactgtgcactcccagccgatctcagctcctgaccggcagataccagatccgcactgggcttcagcaccagattatttggccttgccagcctagctgtgtacctttggacgaaaaactgcttccccagctgctcaaggaagccggctatactactcatatggtgggaaagtggcacctagggatgtacagaaaggaatgcttaccaactagacgcggctttgatacttacttcggctacctgctgggatcagaagattactactctcatgagcgatgtactctgatcgatgctctgaacgtgactaggtgtgccctggattttcgagatggcgaagaggttgctactgggtataagaacatgtatagtaccaatatttttacaaaaagagctatagcattgataaccaaccacccccctgagaagcccctgtttctgtatctggctctgcagagtgtgcatgagcctctgcaggtgcccgaggagtacttgaagccatacgactttattcaggataaaaaccgccatcactatgccggaatggtctctctgatggacgaggcagtgggtaatgtgaccgccgccctcaagtccagtggactgtggaataacaccgtttttattttctccaccgataatgggggccagactctcgccggaggcaacaattggcccctgcgcggccgaaagtggtccctgtgggagggcggcgtgcgcggtgtcggttttgtcgcttcccccctgctgaagcagaagggcgtgaaaaaccgcgagttgatccatattagtgactggctgcctacattagtgaagctggctaggggccatacaaacggcacaaagcccctggacggtttcgacgtttggaaaaccatatccgagggcagcccatctccccgcatagaactgctgcacaatatagaccccaacttcgtggattcttcaccctgccctagaaattctatggcacctgcaaaagacgacagttccctgcccgaatactcagccttcaacacatccgtacacgcagcaatccgccacggtaactggaagctgctgactggctacccaggatgcgggtattggttcccacctcccagtcagtataatgtgtccgaaataccatcctccgacccccccaccaaaacactgtggctgtttgacatcgatcgcgatcccgaagagcggcatgatctgtcccgggagtatccacacatagtcaccaaactactgtccagacttcagttctatcacaagcatagtgtgcctgtgtacttcccagctcaggatccccgatgcgatcccaaagccacaggcgtgtggggcccttggatg

SEQ ID NO: 7065 - DNA, 1599 bp, synthetic construct
  misc_feature 1..1599: note = source = /note="Description of Artificial Sequence: Synthetic coding sequence"
  source 1..1599: mol_type = other DNA
atgggaccaagaggagctgccagcctgccgaggggaccgggaccacggcggctgctcctgccggtcgttctcccgctgctgctgcttctgctgctggcccctcctggatccggcgcgggggcatctcgcccaccacacctggtgttcctgctggcggacgatctcggatggaacgacgtggggtttcatggctcccgcatccgcaccccacatctcgacgccctcgctgcgggaggagtgctgctggataactattacacgcaaccactttgtaccccgtcacggtcgcaactgctcactggtagataccagattaggaccggactgcagcatcaaatcatatggccgtgccagccatcctgcgttccactggatgaaaagctcctgcctcagttgctcaaagaagccggatacactacccatatggttggcaagtggcacctcggaatgtaccggaaggaatgtctgccgaccaggagagggttcgacacgtacttcggatatctgttgggaagcgaagattactacagccacgaacgctgcaccctgatcgacgcccttaacgtgacccgctgtgcgttggatttccgggacggagaggaagtggcgactggatacaagaacatgtacagcaccaatatcttcaccaaaagagcaatcgccctcataaccaaccaccctccggaaaagccgttgttcctttacttggccctgcagtcggtgcacgaacctctccaagtcccggaggagtacctcaagccctacgatttcatccaggacaagaatcggcatcattacgccggcatggtcagccttatggacgaagctgtgggaaatgtgactgccgcacttaaatcgtcaggactctggaataacactgtctttatcttctcgacggacaacggagggcagaccctggccggagggaataactggccgctgagaggacggaagtggtcactgtgggaaggaggtgtgcggggagtcggatttgtcgcgtccccgctccttaagcagaagggagtgaagaaccgcgagctgatccacatctcggattggctccccaccctggtgaagctggctcgcggccacactaacggtaccaagcccctcgatggattcgacgtgtggaaaaccatcagcgagggatcgccgtcaccgagaattgaactgctgcacaacatcgacccaaacttcgtcgatagctcgccctgtccgcggaactcaatggccccggcaaaggacgattcgtccttgcctgagtactccgcgtttaacacctcggtgcatgcagcaatccggcacggcaattggaagctccttactggttacccgggctgcgggtactggttcccaccaccgtcgcaatacaatgtgagcgaaatcccgtcctctgacccgccaaccaagaccctgtggctcttcgacattgaccgggatccggaagagcgccacgacctcagcagggaatacccgcatatcgtgactaagttgctctcaagactccagttttaccataagcattccgtcccagtgtacttccccgctcaggaccctcggtgcgatccgaaagcgactggagtttggggcccttggatg

SEQ ID NO: 7066 - DNA, 1599 bp, synthetic construct
  misc_feature 1..1599: note = source = /note="Description of Artificial Sequence: Synthetic coding sequence"
  source 1..1599: mol_type = other DNA
atgggacccaggggagccgcctcattgcctagggggccagggccccgccggcttttactccctgttgtccttcctctcctgttactccttttacttgccccccctgggtcgggagctggagcttccagacctccacatctcgtttttttacttgctgatgatctcggatggaatgatgtagggtttcacggatctagaatcagaactccccatctagatgccttggccgccgggggggtgcttctagataactactatacacagcccctctgcacaccaagtcggtcacagctgcttacaggacgctatcagattagaacagggctacagcaccagattatttggccatgtcagccttcttgcgtgcccctggatgaaaaactcctgccacagctccttaaagaagcaggatatactactcatatggtggggaaatggcacctcgggatgtatcgcaaagaatgcttaccaactcggcgcgggtttgatacttatttcgggtatcttctcgggtctgaggattattattctcatgagcgctgtacactcatcgatgctcttaatgtgacaagatgtgcactcgacttcagagatggggaagaagtagcaacaggatataagaatatgtattccactaatatctttactaaacgggctatcgctctgataactaaccaccctccagaaaaacccttgtttctatatctggcgctacagtctgtgcatgaacccctccaggtgcccgaagagtatcttaaaccttatgatttcatacaggataaaaatcgtcatcactatgcagggatggtgtccctcatggatgaggcagtcgggaacgtgacagccgctcttaaatcatctggactatggaacaacacagtgtttatattctcgacagataacggagggcagacactggctggaggaaacaattggcccttgagggggcgtaaatggtccctgtgggaagggggggtgaggggggtgggatttgtggcttcccctcttctaaagcagaagggagtaaaaaatcgtgaactgatacacatctctgattggctccctacattagtcaaactggcccgcggacacactaatgggacaaaaccactggatggattcgatgtgtggaagacaattagtgaaggaagtccttcacctcggatcgaactcctacacaacatcgatcccaatttcgtcgattctagtccttgtccacggaactccatggcaccagctaaagatgatagttcgctccccgagtatagtgcattcaacacatcggtacatgcggccatcaggcatgggaactggaagttactcacgggatatccagggtgcgggtactggtttccaccccccagtcaatataacgtatctgagatcccctcatctgatccccccacaaaaactctttggctctttgatatcgatagggatcccgaagagcggcacgacctctctagagaatatcctcacatcgtcactaaactactctcaaggttacagttttaccacaaacattcagtccccgtttatttcccagcccaggaccctcgctgcgatcccaaagccacaggagtatgggggccatggatg

SEQ ID NO: 7067 - DNA, 1599 bp, synthetic construct
  misc_feature 1..1599: note = source = /note="Description of Artificial Sequence: Synthetic coding sequence"
  source 1..1599: mol_type = other DNA
atgggtccgaggggtgcggcttccttgcctcgtggccctggtcctcgacggctgttgttgcctgttgtgcttcctcttcttttgctgctcctgctcgcaccaccgggcagcggcgctggcgcatccagaccaccccatctcgtgttccttcttgcggacgatctggggtggaacgatgtgggctttcatggatcgaggataagaactccgcaccttgacgccctcgcagccggaggagtgctgcttgacaattactacacccaacctctttgtacccctagcagaagccagcttctgaccggacgataccaaatacgcactggtctgcaacatcaaatcatctggccctgtcagccatcgtgtgtgcctcttgatgaaaagctgcttccccaacttctgaaggaagcaggatacactacccacatggtggggaaatggcatcttggaatgtacaggaaggagtgccttcccactagacgcggctttgatacgtactttgggtacctgctgggaagcgaggactactactcgcatgaacgctgtaccctgattgatgcactgaacgtgaccaggtgtgctcttgacttccgcgacggagaagaagtggcaaccggatacaagaatatgtactcgacgaatatctttacgaagcgcgccattgcgctgatcaccaaccatcctccagaaaagcccctgttcctgtaccttgcgttgcagtccgtgcatgaaccacttcaggtgccggaagaatatctgaagccctacgacttcatccaggataagaacaggcaccattacgcaggaatggtgagcctgatggacgaggcagtgggaaacgtcactgcagccctgaaatcgtcgggcctctggaacaacactgtctttatcttttcgactgataacggaggtcagactttggctggcgggaacaattggcctcttagaggacgaaagtggtcgctctgggaaggaggagtgcgtggtgtggggttcgtcgcatcgccactccttaagcaaaagggggtcaagaaccgcgaactcattcatatttcggactggctgccaacccttgtgaagctggctagaggccataccaatggaaccaagcccctggacggattcgacgtctggaaaaccatttcggaaggttcgccaagcccccggatcgaactccttcacaacattgatccgaacttcgtcgatagctcaccttgtcctcgtaactctatggcacctgccaaagatgattcctccctgcctgaatactctgcatttaacacctccgtccatgcagcaattagacatggaaattggaaacttcttaccgggtatccaggatgtggatattggtttcctccgcctagccaatacaatgtgtcggaaataccaagctcagatccccctaccaagaccctttggctttttgatattgaccgggatccagaagagcgccatgacctctcgagggaataccctcatattgtcactaagctgctgagccgcctccagttttaccacaaacattcagtgccagtgtactttcccgcccaggatccccggtgcgatccaaaggccacgggagtgtggggcccgtggatg

SEQ ID NO: 7068 - DNA, 1599 bp, synthetic construct
  misc_feature 1..1599: note = source = /note="Description of Artificial Sequence: Synthetic coding sequence"
  source 1..1599: mol_type = other DNA
atggggcccaggggagctgcctccctgccacgtggacccggaccgcgcagactcttgcttccggtagtgcttccattactcctgctgctgctcctggcacctcctgggtcaggagccggggcctcacgccccccccacctcgtctttcttctcgcggacgacctggggtggaatgatgtcggattccacggatcgcgaattaggacccctcatctggatgccctggctgctggcggcgtgttgctcgataactactatacccagcctctttgcaccccgtccaggtcacagctacttaccgggaggtaccagataagaacgggtctgcagcaccagattatttggccttgccagccctcttgtgttccactggatgagaagctgcttccgcagctcctgaaggaagccgggtacactacacacatggtggggaagtggcatctcgggatgtataggaaggaatgcctgcccacaaggcgggggttcgacacttatttcggctacctgttgggatcagaggactactactcgcacgagaggtgtaccttaatcgatgctctcaacgtcacgcggtgcgcgctagatttccgggatggtgaggaagtggctaccggttacaaaaacatgtacagtacgaatattttcaccaagcgcgcaatagctttgattactaatcatccgcccgaaaaacctttatttctgtatttagccctgcagtcagtgcatgagccccttcaggtgcctgaggaatatctgaaaccgtacgacttcatccaagacaagaatagacaccattacgctgggatggttagcctgatggacgaggccgtgggcaacgttactgcagcgctgaagagctcgggtctgtggaacaataccgtgttcatcttttccacagacaatggtggacaaacgctagctggaggaaataattggcccctgcgtggtcgcaaatggtctctctgggaaggaggagtgcgtggggtgggctttgtagccagccctttgttaaagcaaaagggagtcaaaaatagagagctcatccatataagtgattggctacctactctcgttaagctggcccgggggcataccaacggcacaaaacctctcgacgggtttgacgtgtggaaaactatttcagagggatccccttcacctagaattgagctccttcacaatatcgatcccaatttcgtggattccagtccatgcccccggaattctatggccccagccaaggacgattccagtcttccagagtactctgctttcaacacgagtgtccatgcagctattcgacatggaaattggaagctgcttaccggctaccctggatgtggatactggttcccacctccatcccagtataacgtctccgagattccaagttccgaccccccaaccaagacgctgtggctgtttgacattgatcgcgaccctgaggagcggcacgatctgtccagggaatacccacacatcgtgaccaagctgctctctagattgcagttctaccataagcactctgtgccagtttatttccctgcccaggaccccaggtgcgatccaaaagctaccggcgtgtggggaccgtggatg

SEQ ID NO: 7069 - DNA, 1599 bp, synthetic construct
  misc_feature 1..1599: note = source = /note="Description of Artificial Sequence: Synthetic coding sequence"
  source 1..1599: mol_type = other DNA
atgggtcctcgtggtgctgcaagtcttccccggggccccgggcctcgccgcctgctcttacctgtggtactcccactgcttctccttctcctgctagcgccgcccggtagcggagcgggtgcgtctcgcccaccccatcttgttttcctcttagcggacgacctcggctggaatgatgttggcttccatgggtcgcgtatccgtaccccacacctcgatgctcttgcggcgggtggtgtgctccttgataactattacacccaacccctgtgtaccccgtctcgttctcagttgttgactggacggtaccagatccgtaccggtttgcagcatcagattatctggccgtgccagccctcgtgcgtaccactcgatgaaaagctcctgccacagctgctgaaggaggccggttataccacccacatggtcggtaagtggcacctcggtatgtatcgtaaggaatgtctcccgacccgccggggcttcgatacatacttcggttacctcctgggtagcgaggactactactcccacgagcgctgcacgttgatcgatgcgcttaatgtgacacgctgcgcgctggattttagagatggtgaggaggtggcgacgggctataagaacatgtactccactaacattttcacaaagcgtgccattgcgctgattaccaaccatcctcccgaaaaacccctgttcctctacctggctctccaatccgttcatgaacctctgcaggtccccgaggagtaccttaagccttacgacttcatccaggataagaaccgccaccattacgcgggcatggtctccctgatggatgaggccgtgggtaacgtaaccgccgctctgaaatccagcggactttggaacaacaccgttttcatctttagtacagataacggtggtcagactctggccggtggaaacaattggcccctccggggacgtaagtggtcgctgtgggagggaggagttcgaggtgttggcttcgtcgctagcccccttctcaagcagaagggcgtgaagaacagagagcttattcatatctccgactggcttcccaccttggtcaagctggcgcgtggtcacaccaacgggaccaagcccctcgatggatttgacgtttggaagactatcagcgagggcagcccgagccctcgcatcgagctcctgcataacatcgatccgaacttcgtcgattcgagcccgtgtcctcgtaactcaatggcccctgcgaaagatgactcctctctccccgagtacagcgcctttaacaccagcgttcacgccgcaatccgtcacggcaactggaagcttctgactggataccccggctgcggttactggtttcccccgccctcgcaatataacgtcagtgaaattccctcgagcgacccccctacaaagacgctctggctgttcgatatcgacagagatccagaggagcgacatgatctttcccgggagtacccacacatcgtcacgaagctgttgtctcgtctccagttctaccacaagcacagtgtacccgtctactttcccgcacaggacccacgctgcgatcccaaggcaaccggcgtctggggtccttggatg

SEQ ID NO: 7070 - DNA, 1599 bp, synthetic construct
  misc_feature 1..1599: note = source = /note="Description of Artificial Sequence: Synthetic coding sequence"
  source 1..1599: mol_type = other DNA
atgggtcctagaggcgcagctagccttccaaggggccctggtccacggcgattgctccttcccgtcgttctgcctctgcttcttctgctccttctggccccaccgggaagcggagcaggtgcctccaggcccccgcacctggtgttcctcctcgcagatgacctggggtggaatgatgtgggatttcacggttcccggattaggactccgcatcttgatgcgctcgccgcgggaggagtgctgcttgacaattactacacccaacctctttgcaccccctcgcgttcccaacttcttactggccgttaccagattcgtacgggcttgcaacaccagatcatatggccttgtcagccctcctgcgtgcctcttgatgaaaaactgctcccacagctgctgaaggaggccggttacaccacccatatggtcggaaagtggcaccttggtatgtatagaaaggaatgtctgccaaccagacgaggttttgatacctactttggataccttctgggttccgaggattactactcacatgaacgctgcactctgatagatgccctcaatgtgacccgatgcgccctggatttcagagatggagaagaggtggcaactgggtacaagaacatgtactcaaccaacattttcacgaagcgggccattgccttgatcacgaatcatcctcctgaaaagcctcttttcctgtaccttgcccttcagagcgtgcatgagccgctgcaagtgcccgaagaatatctgaaaccttacgactttattcaagataagaacagacatcattatgcaggaatggtgtcacttatggatgaagcagtggggaatgtcaccgcagctctgaagtcgtccggcctgtggaacaacactgtgttcattttctccactgataatgggggacaaactctggccggtggtaacaattggcctctgagagggaggaagtggtccctgtgggaaggcggtgtgcgaggagtcggcttcgtcgcatctccactgcttaaacaaaaaggagtgaagaatcgagagttgatccatatctcggattggctccctacgcttgtgaaactggcaagaggacacactaatggaaccaagcctctggatggcttcgacgtatggaaaaccatttcggaggggtcaccatcaccacgtattgaactgcttcacaacattgatccaaacttcgttgattcatcgccctgcccccgtaattcgatggcaccagcgaaggacgacagctccttgcccgaatattcagcattcaatactagcgtccatgcggccattcggcatggcaattggaagctccttaccgggtaccctggttgtggatactggttcccaccaccctcccagtacaacgtcagcgaaattccttcctccgatccacccaccaagaccctttggctgtttgatattgatcgggatcctgaagaacgccatgatctttcaagagagtacccccatattgtgactaagctgctttcgagattgcagttctaccacaaacattcagtcccagtgtactttcctgcgcaagatccacggtgtgaccccaaggcaactggcgtgtggggcccgtggatg

SEQ ID NO: 7071 - DNA, 1599 bp, synthetic construct
  misc_feature 1..1599: note = source = /note="Description of Artificial Sequence: Synthetic coding sequence"
  source 1..1599: mol_type = other DNA
atggggcctaggggggctgctagccttccacggggcccaggtccccggcgcctgcttctgcctgttgtgctccccttgcttctcttgctgttgctcgcgcctccgggctctggcgcgggagcgagccgccccccacacctggtttttctgctggcagacgatctcgggtggaacgacgtgggctttcatgggtctagaatacggactccacatctggatgcccttgctgcaggaggagtgcttctcgacaactattacactcagcccctgtgcacaccttctaggagtcagctcttgacagggaggtaccagattaggacaggtctccagcaccagatcatatggccttgccaaccctcttgcgtcccacttgatgagaagctgcttcctcagttgcttaaggaagccggttacactacccacatggtagggaagtggcacctgggcatgtatcggaaggaatgcctgcctacacggcgggggtttgacacctattttggatacctgctgggctccgaagattactactcccatgagagatgcacactgatcgatgccctgaacgtcacacgctgcgcactcgacttcagagatggagaggaggtggccacggggtacaagaacatgtacagtaccaacatctttacgaagagggcaatcgccctcattaccaatcacccccccgaaaagcctctttttctgtacctcgctctgcagtctgtgcacgagcctctccaggtccccgaggaatatctcaagccgtacgactttatccaggataagaacagacaccactatgcgggtatggtctcactcatggatgaggctgttggaaacgtgacggcagccctcaaatcctcaggtctgtggaataatacagttttcatattcagcacagacaatggaggacaaacgctggccggaggaaacaactggcctctgcgcgggagaaagtggagcctgtgggagggaggtgtgcgcggggtaggattcgttgccagccctctcctcaaacagaagggagtgaagaaccgagagctgatccacatctctgattggctcccgacccttgtaaaactggcgagaggccacacgaacggcactaagcctctcgatgggttcgacgtttggaagacgatcagcgagggaagccccagcccacggatcgagctcctgcacaatattgacccaaattttgtggactcttctccctgccctagaaacagcatggccccggctaaggatgattccagtcttcctgagtattctgcattcaacactagcgtgcacgcagcaattcggcacggtaactggaagctcctcaccggttatcctggctgtgggtattggttccctccccctagccagtataacgtctcagagattccttcctctgacccgcccactaaaaccctctggcttttcgacattgaccgggatcccgaggaacggcacgacctgagtagggagtatccgcacatagttactaagctgcttagcagactgcagttttaccacaaacactccgtgcccgtatatttcccagcgcaagatcccaggtgcgatcccaaagccactggtgtctggggcccctggatg

SEQ ID NO: 7072 - DNA, 1599 bp, synthetic construct
  misc_feature 1..1599: note = source = /note="Description of Artificial Sequence: Synthetic coding sequence"
  source 1..1599: mol_type = other DNA
atgggacctcgtggagctgcgtcattgccccgaggaccgggaccccgccgccttctactacccgttgtactgccactcctcttgttgctgttacttgcaccaccaggaagcggagccggtgcaagccgtcccccgcatttagtctttttgttggctgacgatcttggctggaatgatgttggatttcatggtagcagaattagaaccccgcatttggatgcattagccgctggaggagttctacttgataattattatactcagcctttatgtactccatcccgttcacaacttctgactggacgttatcaaattcgtactggactgcaacaccagatcatttggccatgtcaacctagctgcgtgccgctcgatgagaaactcttgcctcaattgctgaaggaggcgggatacactacacatatggtgggtaaatggcacctaggaatgtatagaaaagaatgtttgccaacaagacggggatttgatacctattttggatatttgttaggatccgaagattactacagtcacgaaagatgtactttaatagatgctctgaatgtgacgcggtgtgctcttgattttagagatggagaggaagtggctacaggatataagaacatgtattctacgaatatctttactaaaagagctattgctctgatcacaaaccacccaccggaaaaaccattattcttgtatttggccctgcagtcagttcatgagccactgcaagttcctgaggagtacttaaagccttatgactttatccaagataagaacagacatcactacgctgggatggtttcacttatggatgaggcggttgggaatgttactgccgcacttaagtcatcaggactctggaataatacggtattcattttctcaacagataatggaggacaaactctggctggcggtaataattggccattacgtggtcgtaaatggtccctttgggaaggaggagtacgaggggttgggttcgtcgcaagtccgctgttaaagcagaagggagtgaaaaatagggaacttattcacatctccgattggttgccaactttagttaagttggctagaggtcatactaacggaactaaaccgcttgatggcttcgacgtctggaagactatttccgaaggatcaccctcgccgagaattgaactattgcacaacattgatcctaattttgtagactccagcccttgccctcgaaattcaatggccccagctaaggatgactcatcactcccagaatattcagccttcaatactagcgtgcacgcggcaatccgacatggaaactggaagctgcttactggttacccaggatgcggatattggtttccgccgccgtctcaatataatgtttcagaaatcccgtccagtgatccacctacaaagacactctggcttttcgacatcgatagagatccagaggagagacatgatttgtctcgagaatatccacatattgttacaaaacttctgtcgcgccttcaattttatcataaacattctgtgccagtctatttcccggctcaggatccacgatgtgatcctaaagcaacgggagtttggggaccatggatg

SEQ ID NO: 7073 - DNA, 1599 bp, synthetic construct
  misc_feature 1..1599: note = source = /note="Description of Artificial Sequence: Synthetic coding sequence"
  source 1..1599: mol_type = other DNA
atgggtccgaggggggccgcctccttgccccgcggaccagggcctcgccgccttctgttgccggtagtcctgccactcttgctgctcttattgctcgctccacctgggtcaggagctggagcgtctcgccccccacatctcgttttcttgctggccgatgacttaggctggaatgatgtcggcttccacggaagcagaataaggacccctcacctcgatgcgctcgcagccggcggagtcctgctcgacaactactacactcagcccctttgtactccttctcgatcgcagctgctcacaggaaggtaccagattcgaactggactccagcaccagattatatggccatgccagcctagttgcgttcctctagacgaaaaactgctcccccaattgctgaaagaggccggatataccacccacatggtggggaaatggcatctagggatgtacagaaaagaatgcctgcctactaggcggggatttgatacctattttggctacttacttggctccgaagactactactcccacgagcgttgtacgctgatagatgctttgaatgtgacacgctgtgccctggattttcgggatggcgaagaagttgctaccgggtataaaaatatgtacagcactaacatttttacaaagagggcaattgccctcatcactaatcatcctccagaaaagccactgttcctctacctcgcattgcagtctgttcatgagccactccaggtgcccgaagagtaccttaaaccttatgacttcatccaggacaaaaacaggcaccattacgcagggatggtaagcctcatggatgaagccgtcggaaacgtaaccgcagctctgaagagctctggcctttggaacaatacagtcttcatcttctcaacggacaatggagggcaaacccttgcaggcgggaataactggccccttcgcggcaggaagtggtccctttgggaagggggagtacgaggggtgggctttgtggcttctccactgctcaaacaaaagggggtgaagaaccgcgaacttatacatatatcggattggcttccgactttggtgaaactggcacggggccacaccaacgggactaagcccttggatgggttcgacgtgtggaaaacgatatccgagggaagccccagcccacgcatcgaactgctgcacaacatagacccgaatttcgttgattctagcccttgccccaggaacagcatggctccagcaaaggacgacagctcactaccggaatattcagcctttaatacgtcagtccacgctgcaattcgtcatgggaattggaagctcctaacagggtatccaggatgtggatattggtttcctccaccctctcaatataatgtgagcgaaattccatcttccgatccgccaacaaagacattgtggctcttcgatatcgacagggaccctgaggagagacacgacctgagccgcgaatatccacacatcgtgaccaaacttctctcaagactccagttttaccataagcactcagttccagtgtactttccagctcaggacccccgatgcgacccaaaagccaccggggtttgggggccttggatg

SEQ ID NO: 7074 - DNA, 1599 bp, synthetic construct
  misc_feature 1..1599: note = source = /note="Description of Artificial Sequence: Synthetic coding sequence"
  source 1..1599: mol_type = other DNA
atgggtccaaggggcgctgctagcctgcccagaggaccagggccaagaaggcttctactgccagttgtgctgcctctgctactactgctcctattggccccccccggatcaggcgccggggcaagtcggcctcctcacctcgtctttctacttgccgacgatttggggtggaatgacgtagggttccacgggtcccgcatcaggactccgcaccttgacgcccttgcagcaggcggtgtcctgcttgataattactacacacagcccttatgtaccccctcacgcagtcagctcctgacaggcaggtatcagataaggaccggcctacagcatcagatcatttggccgtgtcagccttcatgtgtgccccttgatgagaagctgcttcctcagttgctgaaagaagccgggtacacgacccacatggtggggaaatggcatctggggatgtataggaaagaatgtctccccactagaagaggatttgacacatactttggatacctcttgggctcagaggattattattcacacgagcgctgcaccctgatcgacgctttgaacgtgacgaggtgtgccctcgatttccgcgacggggaggaggtagcaacgggatacaagaacatgtacagtaccaatatctttacaaagcgggccatcgccttaataaccaaccatccacctgagaagcccttgtttctctatctggcactgcaaagcgtacacgagccattacaggtccctgaggagtatctgaaaccttacgatttcatccaagacaagaacagacatcattacgctggcatggtaagtctcatggacgaggctgtcgggaatgttactgctgccctcaagagcagtggcctttggaacaacactgtgttcatcttctccacagacaacggaggacagactctcgccgggggtaataattggccactcaggggacgtaaatggagcctgtgggaaggcggagtccgcggggtcggattcgtggcatcacccctcctgaagcagaagggcgtaaaaaatcgggagttgattcatatatcagattggctgcccacactggttaaactggccagggggcacaccaacggcacaaagcccctcgatggctttgacgtctggaaaactatctctgagggcagccctagcccaaggattgaattactccataatatcgatccaaacttcgtggactcaagcccatgccccagaaacagcatggctcccgcgaaagacgacagctccctgcctgagtactccgcatttaatacttcagtccacgctgctatcaggcacggtaactggaaactcctcaccggatacccaggatgtggatactggtttcctccaccatcccagtataatgtctctgagatcccttcttcagatcctccgacaaaaacactgtggctcttcgatattgatcgggacccagaggagcggcacgatttgtctcgcgagtacccccacattgtgaccaagctgttgtctcgccttcagttctaccacaagcacagcgtgcccgtttatttccccgctcaggacccgcgctgtgatccaaaggccacgggggtgtggggtccctggatg

SEQ ID NO: 7075 - DNA, 1599 bp, synthetic construct
  misc_feature 1..1599: note = source = /note="Description of Artificial Sequence: Synthetic coding sequence"
  source 1..1599: mol_type = other DNA
atgggtccgaggggtgcggccagcttgccccgaggtccgggcccacgacgccttctactacccgtggttctgcccttactactgttgttactactcgccccaccgggctccggagcgggggcatccagacctccgcaccttgtttttcttctggctgatgacctcggatggaatgatgtcggattccatggaagtcggatacgaaccccgcatctcgacgcccttgctgcgggtggtgttctcctcgataattactatacccagccgctctgcaccccttctagatcccagcttcttacaggcaggtaccaaattcggaccggcctgcagcatcagattatttggccatgccagccctcctgtgttccgttagatgaaaagctcctcccgcaacttcttaaggaggcgggatacactacgcatatggtgggtaagtggcatcttgggatgtaccggaaggaatgtcttccaacgcgtcggggcttcgatacttatttcgggtacttattgggatctgaggactattattctcacgaacgttgcacgctgatcgatgctttgaacgtcactcgttgtgccctggattttcgtgatggtgaggaagtcgcgacaggctataaaaacatgtactctactaatatatttaccaagcgtgcaatcgctctgataacgaaccacccacctgagaagcctctgttcttgtacttggctctgcaatcagtacatgaaccactgcaggtgcccgaggagtatctcaaaccttacgattttatacaagacaaaaatcgacaccattacgcggggatggtatctcttatggatgaggcggtgggaaatgtgacggcggctctcaagagttccgggttgtggaataataccgttttcatttttagtactgacaacggaggtcaaacgctggcaggtggcaacaactggcctcttcgcgggcgaaagtggtcactttgggagggcggtgttcgcggagttggttttgtcgcaagcccactactgaaacaaaagggcgttaaaaaccgtgaacttatacatatatccgattggcttccgactctcgttaagctagccagaggccatactaatggaaccaaacctcttgatggtttcgatgtctggaagacaatcagtgaggggagtccgtctcccaggattgaattgctccataacatcgatccgaactttgtggatagctctccatgtccgaggaactcaatggcgccagcgaaagacgacagttctttgccggaatactcggcatttaacacctctgtgcacgccgccattcgtcatgggaattggaagctactgacaggttaccccggctgtggctactggttcccaccgcccagccagtataatgttagtgagatcccctcaagcgatccaccgacaaagacactgtggctcttcgacatagatagggacccggaggagcgccacgatttgagccgagagtacccgcacatcgttactaagctgctgagtagactccaattttatcacaagcacagcgtgccagtctatttcccggcgcaagatccccgctgtgatcctaaggctacgggtgtgtgggggccgtggatg

SEQ ID NO: 7076 - DNA, 1599 bp, synthetic construct
  misc_feature 1..1599: note = source = /note="Description of Artificial Sequence: Synthetic coding sequence"
  source 1..1599: mol_type = other DNA
atgggccctcggggtgctgcctcactgccgcggggacccgggccccgacgtctgctcttaccagtggtgttgccattgctattgcttcttctgctggccccacccggctctggagccggcgcgagccgccccccacacctagtgtttctgttggctgatgatcttggctggaacgatgtgggctttcacggaagccggatccgcacgccacacctcgacgccttggcagctgggggcgtgctcctcgacaactactacactcaacctctttgcaccccatcgaggtcacagctactcacgggtcgctatcagatcaggacagggcttcagcaccagataatttggccctgtcaaccctcatgcgtgccgctcgatgaaaagttactgccacagctacttaaagaggccggttatactacccacatggtggggaagtggcacctcgggatgtataggaaagaatgtctgccaaccaggcgaggatttgatacatatttcgggtatttgttgggctccgaggactactatagtcatgaacggtgcacattaatcgacgccctgaatgttactcgttgcgctttggattttagagacggggaagaagtcgctactggctacaagaacatgtacagcacaaatatcttcacaaaacgcgccattgccttgataacgaatcaccctcctgagaagcctcttttcttgtatctcgcattgcagtctgtgcatgagccattgcaggttcctgaggaatatctgaagccgtacgactttatccaggataagaatcggcatcattacgccggtatggtgagccttatggatgaggccgttgggaatgtaacagcagccctaaagagttcaggactgtggaataacaccgtgtttattttcagcaccgataatgggggacagacattggctggcggaaataactggcccctgcgcggccgcaaatggtcattatgggaaggtggcgtgaggggagtcggctttgtcgcatctccactcttgaaacagaagggtgtaaagaaccgtgagcttattcatatcagcgactggctcccaaccttggtgaagctggcaaggggccacaccaacgggaccaaaccactggatggtttcgacgtgtggaagacgatttccgagggtagcccatctcctagaatcgaattgctgcataatatagatccaaactttgtcgatagctcaccttgccccaggaattcaatggcaccagccaaggatgactctagcctacccgaatattcagccttcaatacttctgttcacgctgctattcggcatgggaattggaagttgctgaccggctatcctggatgtggatattggtttccaccaccgagtcagtacaacgtcagcgagatcccgtcatcagatcctccaacgaaaacactttggctcttcgacatcgacagagatcctgaggagcggcacgatctatctcgtgaatacccccacatcgttaccaaattgctgtctagactgcaattttaccataagcactcagttcccgtgtactttcccgcacaggatccccgctgtgaccctaaagctaccggagtatgggggccttggatg

SEQ ID NO: 7077 - DNA, 1599 bp, synthetic construct
  misc_feature 1..1599: note = source = /note="Description of Artificial Sequence: Synthetic coding sequence"
  source 1..1599: mol_type = other DNA
atgggtccaagaggtgccgcatcgctccccagaggacctggtccacgcagactgctgcttccggtggtgctgcccctgcttttgctgcttctgttggcaccacccggttccggcgcaggtgcatcgcgcccaccccatctcgtgtttcttctcgcggatgacctgggatggaatgatgtcggatttcacggttcaaggatccgcactcctcatttggatgccctggccgcaggtggagtgttgctggacaactactacacccaacccctgtgtactccatcgaggtcacaactgcttactggcaggtaccaaatacggacgggcttgcagcatcagattatctggccatgccaaccatcatgtgtccctcttgatgaaaagctcctgccccaactgctgaaggaagccgggtatactacccacatggtgggtaagtggcacctgggaatgtaccggaaggaatgtctgccaacgcgacgaggttttgacacttacttcggctacctgctcggctcggaagattactactcacatgagcgctgtacccttatcgacgcactcaacgtcacgcggtgtgcacttgatttcagagacggcgaggaagtggcgaccggatacaagaacatgtacagcaccaacattttcactaagcgggctattgcactcatcaccaaccacccccctgagaagcccctgttcttgtacctggcgctgcaatccgtgcacgaacctctgcaagtgcccgaagaatacctgaagccgtacgatttcattcaagataagaacagacatcattacgccggaatggtgtcgcttatggatgaggcagtcgggaacgttaccgcagcactgaaatcgagcggactttggaacaacaccgtgttcatcttttccactgataatggcggacaaaccctggcaggcggtaacaattggcccttgaggggaagaaagtggtcgctgtgggagggcggtgtgaggggcgtgggttttgtggcatcacctctgttgaagcagaaaggggtgaagaatcgggaacttatacatattagcgattggcttcccacccttgtcaaactggccagaggtcacactaatgggaccaagccgttggatggctttgacgtgtggaaaactatttccgaaggttccccttcacctcgtattgaacttcttcacaacattgatccaaactttgtcgattcatccccttgtccaagaaactccatggcccctgcaaaagatgattcctcactccccgaatactcggcatttaacacttccgtgcatgcagcaattaggcatggtaactggaaacttttgactgggtaccccggatgtggatactggtttcctcctccatcgcagtacaacgtgtcggagatcccatcctccgatccccccaccaaaactctttggctgtttgacatcgatcgcgaccctgaagaacgccatgacctgagccgggaatatcctcatattgtgacgaaacttctgtcgcggctccagttttaccataagcattccgtgcccgtctattttcctgcacaagacccaagatgtgaccctaaagctactggagtctggggtccatggatg

SEQ ID NO: 7078 - DNA, 1599 bp, synthetic construct
  misc_feature 1..1599: note = source = /note="Description of Artificial Sequence: Synthetic coding sequence"
  source 1..1599: mol_type = other DNA
atggggccccgcggcgctgcatcccttcccagaggaccaggcccacggagactactgctgcccgtggtgttgcctttgctccttctgttgctcctcgctccgccaggaagtggggcaggagcctcccgaccgccgcaccttgtgttcttgctggctgacgatctggggtggaacgacgtggggttccacggatcacgaatccgtacaccccacctagacgccctcgcggccggaggggtgttactggacaattattacacccagccactgtgcacgccctcaaggtcccagctgttgaccggcagataccagatccggacgggcttacaacaccaaatcatatggccctgccagccttcttgcgttccgctggacgagaagttattgcctcagctgttgaaagaggccgggtatactacacatatggtggggaagtggcatctgggaatgtaccgcaaagagtgccttcccactcgaagggggttcgacacctactttggatacctcctgggtagtgaagattactattctcacgaacgatgcacgttgattgacgctctgaacgtgacacggtgtgctctggacttcagggacggggaggaggtcgctaccggttacaagaacatgtatagtactaatatcttcacaaaacgagctattgctctgataaccaaccatccacccgagaaaccccttttcctttatctggccctgcagtccgtgcacgaaccattgcaagttcccgaggaatatctcaagccatatgacttcatacaggacaagaacagacaccactacgccggaatggtgtcgctcatggatgaagctgtgggcaacgtgactgctgctctgaagagctctggcttgtggaataatacagtatttatattctccaccgataatggtggccagactctcgccgggggaaataactggccattgagggggcggaagtggagcctgtgggagggaggggttcggggcgtgggtttcgtagccagtccccttctgaagcagaagggtgtcaaaaaccgtgaactaattcatatcagcgactggttgcccaccctcgtcaaactagctcgtggccacactaacgggaccaagcctctggatggattcgacgtgtggaagacgatctcagagggatctcccagtcccaggatcgagctcctccataacatagacccaaactttgtggatagtagcccgtgtccacggaattctatggctcccgctaaggatgatagttcactgccagaatacagtgcctttaataccagcgtgcacgccgctattcgacacggaaattggaagctgcttaccgggtaccctgggtgcggctactggttccctcccccttctcaatataacgtatcagaaatccccagctctgaccctcccacaaagacactgtggctattcgatatagaccgcgatcccgaagaacgccacgacctatcacgagagtacccacacatcgtgaccaagctactgagccgccttcagttttaccataagcacagcgtgccagtatatttccctgcccaggacccgcggtgtgaccccaaagccaccggtgtgtggggcccctggatg

SEQ ID NO: 7079 - DNA, 1599 bp, synthetic construct
  misc_feature 1..1599: note = source = /note="Description of Artificial Sequence: Synthetic coding sequence"
  source 1..1599: mol_type = other DNA
atgggcccccggggcgcagcttcactgcctaggggtccagggccccgacgcttactactgccagttgtacttcctctcctgttgctcctgctgctcgccccgcctggctctggcgctggagccagtagacctccgcatctggtgttcctcctggcggatgacttgggctggaatgacgtaggattccatgggtctcggattcgcactccccatctcgacgcgctcgctgctggtggcgtgctgctggacaattactacacacagccgctatgcaccccttcaaggtctcaattgctcaccggacgctatcaaatccggaccggactccagcatcagatcatatggccatgtcagccgagctgcgttcctttggatgagaagctcttaccccagctgctcaaggaagccggatacacgacacacatggtcgggaaatggcaccttggcatgtaccggaaagaatgccttcctactaggaggggattcgatacatatttcggatatctgttaggatccgaagattattatagtcatgaacgctgcactctgatcgatgctctgaatgtgacccggtgcgctcttgatttccgagacggtgaggaggtagccaccggttataagaacatgtactccactaacatatttactaaacgcgccatcgcactcataacaaaccacccccccgaaaagcctctttttctgtacctggcattgcagtctgtgcacgaacccctgcaggtacctgaggaatatctgaaaccttatgacttcattcaggacaagaatagacaccactacgctggaatggtgagtttgatggatgaggccgtgggtaatgtgacagcagccttgaagtcgagtggtctctggaacaacaccgtgtttatattctccaccgacaatgggggtcagactttggcaggggggaacaactggccactgagagggcgaaaatggagcttgtgggaagggggcgtccgaggcgttggatttgtggcgtccccactcctaaagcagaaaggggtgaagaatcgcgagctgatccacatctccgactggttgcccactctggtgaagctagcgagaggtcacactaatggcacgaagccactggatggctttgacgtatggaagacaatcagcgagggctctcccagccctcggattgagctgctgcacaacatcgaccccaatttcgtagattcaagtccatgtccccgcaattctatggcccctgcaaaggatgattcctcactgcccgaatactccgcgttcaataccagtgtccacgccgccattcgacacggcaactggaagctcctgactggctacccaggatgcggctactggtttccaccccctagccagtacaacgtgtcagagattccttcgtcagatccccctacaaaaacactctggctattcgatatcgacagagatccagaagaaagacacgatctctctagagagtatccccacatcgttacaaaactgctatcaaggttgcagttctaccataagcattcggtccctgtgtatttcccagctcaggaccctaggtgtgacccaaaggccacaggagtgtggggcccgtggatg

SEQ ID NO: 7080 - DNA, 1599 bp, synthetic construct
  misc_feature 1..1599: note = source = /note="Description of Artificial Sequence: Synthetic coding sequence"
  source 1..1599: mol_type = other DNA
atgggtccccggggagctgcatctttgccgcgaggcccaggacccagacggttgctcctcccagtcgtcctgccactcttgctgctcctgttgcttgcaccccccggatctggagctggggcctctcgcccacctcatctggtctttttgctggccgatgatctcggctggaacgatgtgggcttccacggctcccgtatcaggaccccccatctggatgcgctcgccgccggtggagtcttgctggataattactatactcaaccgctttgcacgccatctaggagtcaattactaactggacggtaccaaatccgtactggcctgcaacatcagatcatttggccctgtcagccttcgtgcgtgccactggacgagaagctgctcccacagctcctgaaggaagccggatatacgacacatatggtcgggaagtggcatcttgggatgtacaggaaagaatgtctccctaccagacgggggttcgacacctacttcggatatctattgggtagtgaggactactacagtcatgaaaggtgcactctgatcgacgccctgaatgtgacacggtgcgcactcgacttcagagacggagaagaggtcgctacaggctacaaaaatatgtactccaccaatatttttaccaagcgggccatcgcactgattactaaccacccgcccgagaaacctctctttctgtacctggccctgcaaagtgtgcatgaaccactacaagtgccggaagagtatctaaaaccctatgactttatacaggataagaaccgacaccactatgcaggcatggtctcgttaatggacgaagcagtgggcaacgttactgcggctctgaaaagctccggtctatggaataatactgtcttcattttctctactgataatggagggcagacacttgcaggcggaaacaattggcccctgagggggagaaagtggtccttgtgggagggcggcgttaggggagtggggttcgtcgcatccccactcctcaaacaaaaaggagttaaaaaccgggagctgatccatatttcggactggctccctaccctggtgaagttagctcgcggacacaccaacggcacgaagccgctggatggattcgatgtctggaagactatcagcgagggctccccttcaccccgcatcgagctcctccacaacatcgatccaaacttcgttgatagctccccatgtccaaggaactcaatggctccagcaaaagacgatagctcccttcccgagtactccgcctttaacacatccgttcacgctgcaattagacatggaaactggaagcttctgaccggctaccctggctgtggctactggtttccgccaccgagccagtacaatgtgtccgagatcccatcttctgatccccctaccaagacgctctggctgttcgatatcgatagggatccggaagagaggcacgacttatctagggagtatccccacattgtcacaaaactgctgtcccgtcttcagttttaccacaaacatagtgtccccgtatattttcccgctcaagaccctcgttgtgatccaaaagctaccggggtgtggggcccatggatg

SEQ ID NO: 7081 - DNA, 1599 bp, synthetic construct
  misc_feature 1..1599: note = source = /note="Description of Artificial Sequence: Synthetic coding sequence"
  source 1..1599: mol_type = other DNA
atgggaccccgcggagccgcgagcctgccgcgcggacccggaccaagacgtctgctgctcccggtcgtgctccccctcctgctgttgctcctgctggcaccgccgggtagcggagccggagcctcccgcccgccccatttggtgttcctgctggctgatgatctgggatggaacgacgtgggtttccatggatcgaggatcagaaccccgcacctggacgccctcgcagccgggggagtgctgttggataactattacacccaaccgctctgcaccccttcccgctcccagctccttaccggacgctatcagatccggaccggtctgcagcaccagatcatttggccgtgccagccgagctgcgtgccgctcgacgagaagctgctgcctcaattgctgaaggaagccggctatacgacccacatggtgggcaagtggcacctcggcatgtacaggaaggaatgtctccccacccgtcgagggttcgatacctacttcggatacctcctcggttcggaggactactattcacacgaacggtgtaccctgattgatgcacttaatgtcacccggtgcgcgctggatttccgcgatggggaagaggtggccacggggtacaaaaacatgtactccaccaacatctttaccaagcgcgctatcgctctgattactaaccacccacctgagaagcccttgttcctgtacctcgcactccaaagcgtgcacgagccgctgcaggtgccagaagagtaccttaagccgtacgactttatccaggacaagaatcgccatcactacgcgggcatggtatctctcatggacgaagctgtgggcaacgtgactgccgctttgaagtcaagcgggctctggaacaatacggtgttcatattctcgactgacaacggcggacagactttggctggagggaacaattggccgctccgcggacggaagtggtcgctgtgggaaggcggagtgcgaggcgtcgggttcgttgcctcgcctcttctgaaacagaaaggcgtgaagaatagagaattgatccacatctccgactggttgcctacgctcgtgaagctggctcggggtcacactaacgggactaagcctctggatggatttgacgtctggaaaactatcagcgagggatctccgtcgcctcgaatagaactgctgcacaatatcgacccgaacttcgtcgatagcagtccgtgccctcgcaactcgatggcgcccgctaaagacgactcgtccctgccagaatacagcgctttcaatactagcgtccatgcggcgatcagacatggaaattggaagctcctgactggataccctggatgcggttactggttcccgccgccatcacagtacaacgtctcagagatcccatcgagcgacccaccgaccaagacgctctggctgtttgacatcgatcgcgatcctgaagagaggcacgacctcagccgggaatatccacacatcgtcactaaactgctgtcacggctccagttctaccacaagcactcagtcccagtctactttcccgctcaagatccaagatgtgatccaaaagctactggtgtttggggaccgtggatg

SEQ ID NO: 7082 - DNA, 1599 bp, synthetic construct
  misc_feature 1..1599: note = source = /note="Description of Artificial Sequence: Synthetic coding sequence"
  source 1..1599: mol_type = other DNA
atgggcccgagaggtgccgcatccctgcctcgtggacctggccctaggcgactccttttgcccgttgtgcttcccctgttgctactgctccttctagcgcctcctggaagcggtgcgggagcaagtcgtcccccccatttagtgttcctccttgccgatgatttaggctggaacgatgtgggatttcacggttctaggatacgcaccccccacctggatgccctggcagccggcggcgtccttctggacaactactatacccagccactgtgtacaccaagcagaagccagctcctgaccggcagatatcagattcgcacgggactgcagcatcagattatctggccctgtcaaccctcatgcgtgccactggatgagaaacttcttccacagctgttgaaggaagcaggctataccacacatatggttggcaagtggcacctgggtatgtaccgcaaggagtgtctcccgacaaggagaggcttcgatacttactttgggtacttactcgggtcagaggattattacagccacgagcgctgcaccttgattgacgccctcaatgtcacacgatgcgcgcttgatttccgagatggcgaagaggtcgctactgggtacaagaatatgtattcaacgaatatatttactaaacgtgccatcgcgctaatcaccaaccatcctcccgagaaacctctattcctatacctagccctccagtcagtgcatgaacctcttcaggttcccgaagagtatttgaagccctacgacttcatccaggacaaaaataggcatcactacgctggcatggtgagcctgatggatgaggcagtaggtaacgtgaccgccgcgctgaaatctagcgggctgtggaacaataccgtatttatattctctaccgacaatgggggacagacattggctggcggcaacaactggccacttagagggcggaaatggtccttgtgggaaggaggagtgaggggagtgggcttcgtcgcctcaccactcctgaagcagaaaggggttaagaacagggaactgattcacatctctgattggctcccgacccttgtgaagctggcacggggtcacactaacggcaccaaacctctggatgggttcgacgtttggaaaacgataagtgaagggtccccaagccccagaattgagttgctccacaacattgaccctaacttcgtggactcgtctccgtgcccccggaattccatggcgccagccaaagatgacagcagcctgccggagtatagcgcctttaacacatcggtgcacgcagccatcaggcacggcaattggaagctcctgacaggttatcccggctgcggatactggtttccgccgcccagccagtataatgtaagcgagattccttcctccgatccgcctactaaaactctgtggttgtttgacattgatcgcgacccagaggaaaggcatgacttatcccgagaataccctcacatagtgacgaagctcctgtcacgcctgcaattctaccacaaacactctgtgcctgtgtactttcccgctcaagaccctcgttgcgatccaaaggcgactggggtatggggaccatggatg

SEQ ID NO: 7083 - DNA, 1599 bp, synthetic construct
  misc_feature 1..1599: note = source = /note="Description of Artificial Sequence: Synthetic coding sequence"
  source 1..1599: mol_type = other DNA
atgggaccacgcggggcggcgagcctgcccaggggccctgggcccagacgtcttctcttgcccgtagtcctgccactactgttattattgctcctagcaccgcccggctccggcgccggcgctagccgaccacctcatctagttttcctgcttgccgatgacctgggatggaatgacgtcggcttccatggatctcgtatccgtacacctcaccttgatgcattggcagcaggcggggttctgctcgataattactatactcaacctctgtgcacgccttctcggagccagctgttgacaggccgataccaaatccgcactgggctgcagcaccagattatttggccatgccagccaagctgcgtccccctggacgaaaaactgctgcctcagttgcttaaagaggccggatatacgacccatatggtggggaaatggcacctgggtatgtatcggaaggaatgccttcccactaggcgcggattcgatacatactttggttacctgttgggttcggaggactactactctcacgaacgatgtacattgatcgatgctctgaacgtgacccggtgtgctctcgactttcgcgacggtgaggaggtagcaacaggatataagaatatgtacagcacaaatatctttacaaaacgagcaatagctcttatcactaaccaccctccggagaagccactgttcttataccttgccttgcagagcgtgcatgagcctctgcaagtgcccgaggagtacctgaaaccgtacgactttatacaagacaagaacagacaccactatgccgggatggtgagcttaatggacgaggcggtgggcaatgtgactgcagctctcaagtcctcaggcctatggaacaataccgtgttcatattcagtactgacaacgggggccagaccctcgcgggtgggaacaattggcccttacggggaagaaagtggagcttgtgggaggggggagtacgcggtgtgggctttgttgcttctccgctactcaaacaaaagggcgttaagaaccgggagctcatccatatctcggactggttaccgactttggtgaaactagccagaggccacactaatggtaccaaaccactggatggatttgatgtgtggaagacaatctcagaggggtcacctagcccccgaatcgagctgttgcacaacattgaccctaattttgttgattcaagtccctgtcctcggaacagcatggcccccgctaaggacgatagctcacttccagagtatagcgctttcaatacatccgtacatgcagccattcgccacgggaactggaagctgctgaccggatatcctggttgtggatattggttcccaccaccttcccagtataacgtatctgagattccttctagtgatcctccaacaaaaacactatggctgtttgacatcgacagagaccccgaagagcgccacgacttgtctcgagagtacccacacattgtaaccaaactgctgagccgactacaattttatcataaacatagcgtgcccgtgtatttccccgcacaggacccgcgatgtgaccctaaagcaactggcgtgtggggaccttggatg

SEQ ID NO: 7084 - DNA, 1599 bp, synthetic construct
  misc_feature 1..1599: note = source = /note="Description of Artificial Sequence: Synthetic coding sequence"
  source 1..1599: mol_type = other DNA
atgggccctaggggtgccgcgtcactcccccgcggccccggcccccgccggctcctcctgcccgtggtgctgccgctcttgctactgttgctgctggccccccccgggagcggggccggagccagtaggccccctcatctcgtgtttctgttggcagacgatctcggatggaacgatgtcggcttccacggttcccggatccgaacacctcacctggacgcattagccgccgggggggtgctgctcgataactattacacccagccactgtgtacaccgtcaaggtcgcagttactgaccgggagataccagattcggacaggcctgcagcaccagatcatctggccgtgtcagccctcatgcgtccctttagatgaaaagttgctaccgcagctgttaaaggaggccggttacactacacacatggtgggaaaatggcatttggggatgtatagaaaggaatgcttgccaacacggcggggctttgatacttatttcgggtatcttctcggtagtgaagattactactcacatgagagatgtactctcatagacgccctgaatgttactcgatgcgccttggactttagggatggagaggaggtggccaccggctataaaaatatgtattctaccaacatcttcaccaagagggccatcgctctcattacaaaccaccccccggagaagcccctgttcctgtaccttgccctccaatctgttcatgagccactgcaggttcctgaagaatatctgaagccatatgactttatccaggacaagaatcgccatcactacgcaggcatggtctccctaatggacgaggctgtgggtaatgtgacggctgccctgaagtccagcggcctctggaacaacactgtattcatcttctcgaccgataacggcggacaaactttggccggtggcaacaattggcctctgcgcgggcggaaatggtcattgtgggagggcggtgtacgaggggtgggtttcgtggcatcgcccctgctgaaacagaagggagtgaaaaacagagaactgattcacatctctgattggcttcccaccttggtgaagttagcaaggggccacaccaacggcactaaacccttggatgggtttgatgtttggaagacaatcagcgagggcagcccttctcctcggatcgaactgctgcacaatatagacccaaactttgttgacagtagcccatgcccgaggaacagcatggcccccgccaaggacgacagcagcctgccagagtatagcgccttcaatacgtccgtccatgccgcgatcagacatggtaattggaaactcttgaccggatatcccggctgcggatattggttcccccctccatcacaatataacgtaagcgaaattccaagcagcgacccgccaacgaagaccctttggttgttcgatatcgaccgggacccggaagagagacacgacctgtcgagggaatacccacacatcgtcacaaagttactctcgcgattgcagttttatcataaacattccgtcccagtctactttcccgcccaggacccaagatgcgaccccaaggctacgggggtgtggggcccttggatg

SEQ ID NO: 7085 - DNA, 1599 bp, synthetic construct
  misc_feature 1..1599: note = source = /note="Description of Artificial Sequence: Synthetic coding sequence"
  source 1..1599: mol_type = other DNA
atgggcccccggggggcggccagcctgccgcggggaccgggccctcgccgcctgctgctgccggtggtgctcccgcttctcctgttgcttttgcttgccccaccgggaagtggcgctggagcctcgcgccctccgcatctggtgttccttctggccgacgacctcggctggaatgatgtggggtttcacggaagccgtatccggactccgcatcttgacgcgctcgccgccggcggtgtcctcctggacaactactacacccagccactgtgcaccccttccagatcccagctgctcactggacggtaccaaatcagaaccggactgcagcaccagattatctggccatgtcaaccgtcctgcgtcccactggatgagaaactcctcccgcagctgttgaaagaggccggttacacgacccatatggtgggtaagtggcacctgggtatgtaccggaaggaatgcctgccgactagacgcggatttgacacctacttcggatatctcctcggctcagaggactactactcccacgagcgctgtaccctgatcgatgcactgaatgtgactcggtgtgcgctggattttagagacggagaagaagtggccaccggatacaagaacatgtactcgacgaatatctttacgaagcgggcaatcgcgctcattactaatcacccgccggaaaagccactgttcctgtacctggccctccagagcgtgcacgaaccgctccaggtgcccgaggagtacctgaaaccgtacgacttcatacaggacaagaatcggcaccattacgcgggcatggtgtcactcatggatgaggcggtcggcaacgtgactgcggcgctgaagagctcgggactgtggaacaacactgttttcatcttctcgaccgacaacgggggacagactctggcaggcgggaacaattggccgctgagaggccggaagtggtccctgtgggaaggaggagtgcggggagtcggattcgtggcttccccacttctgaagcaaaagggggtcaagaatcgcgagttgatccacatttccgattggctgcctaccctggtgaagctggcacggggccacaccaacggaactaaaccgcttgacggatttgacgtgtggaaaacgatctcagagggctcccctagcccgaggatcgagctgctgcacaatatcgatcccaacttcgtggattcatctccgtgcccgcggaacagcatggcaccggcgaaggacgattcctcacttccagagtactccgcgtttaacaccagcgtgcatgcggcaatcaggcacggaaattggaagttgctcactggatacccaggctgtggctactggtttccaccaccatcgcaatacaatgtgtcagaaatcccaagctcagacccgccaaccaagaccctctggctgtttgacattgatcgagatccggaagagcggcacgacttgagccgggaatacccgcacatcgtcactaaacttctgtctcgcctccagttctaccacaagcactcggtgcctgtttacttcccagcccaggatccacgatgtgatcccaaagccacgggggtgtggggaccatggatg

SEQ ID NO: 7086 - DNA, 1599 bp, synthetic construct
  misc_feature 1..1599: note = source = /note="Description of Artificial Sequence: Synthetic coding sequence"
  source 1..1599: mol_type = other DNA
atgggaccgcgaggagccgcctcgctcccacgcggaccgggaccccgcagactcctgctgcccgtggtgctccctctcctgttgctgttgcttctggctccaccgggaagcggtgccggagcctcacggcctccgcaccttgtctttctgctggctgacgacctgggatggaacgatgtgggcttccacggatcgcgcatccggacccctcatctcgacgcgctggctgcaggaggtgtgctgctcgacaactactacactcagcctctgtgcactccatcgcgatcccaattgctcactggaagataccaaatcagaaccggcctccagcatcaaatcatttggccttgccagccgtcgtgcgtcccactcgatgagaagctgcttccacagctgctgaaggaagcaggatacaccacccacatggtgggaaagtggcatctcggtatgtacaggaaggaatgcctgcctactcgtcgcgggtttgatacttacttcggctacctgctgggctcggaggactattactcgcatgagaggtgcacgctgatcgatgccctgaacgtgactagatgcgcgctggatttcagggacggagaagaggtcgccaccggatacaagaatatgtattcaaccaacatcttcactaagagggcaatcgcgctgattaccaaccacccaccagagaagcctttgtttctctaccttgcactgcaatcagtgcatgaaccgctgcaggtgccggaagaatacctgaaaccgtacgatttcatccaggacaagaatcgccatcattacgcgggaatggtgagcctgatggacgaggcagtgggaaatgtgactgcggcactcaagtccagtggactgtggaataacactgttttcatcttctcaaccgacaacggggggcagaccctggcgggaggcaacaactggccgttgagaggacggaagtggtcgctctgggaaggaggagtccgcggtgtgggatttgtggcgtcgccactgcttaagcaaaagggcgtgaagaaccgcgagctgatccatatttccgactggctgcccaccttggtgaagctcgcgagggggcataccaatggaactaagccgctcgacggattcgatgtctggaaaaccatttccgaaggctccccgtcgccacggatcgaactgctccataacatcgacccgaatttcgtggactcgtccccctgccctcggaacagcatggcaccggccaaagatgactccagcctcccagagtactccgccttcaacacgtccgtgcatgccgcgatcagacatggcaattggaaactgttgactggctacccaggctgcggttactggttcccgcctccgtcccagtacaatgtgagcgaaatcccttccagcgatccgcctactaagactctttggttgttcgacatcgaccgagatccagaggaacggcatgacctctcacgcgagtacccccacattgtcaccaagttgctgagccgcctgcagttctatcacaaacacagcgtgcctgtgtatttcccagctcaggatccaagatgcgatcctaaggccacgggcgtttgggggccttggatg

SEQ ID NO: 7087 - DNA, 1599 bp, synthetic construct
  misc_feature 1..1599: note = source = /note="Description of Artificial Sequence: Synthetic coding sequence"
  source 1..1599: mol_type = other DNA
atgggacctcgaggtgcagcaagcttacctagggggcctggtcccagaagactgttgctaccggtggtactcccattgctgctcctgcttcttttggcccctccagggtcgggcgccggagcaagcagacctcctcacctcgtgtttctgttggcagacgacctcggctggaatgacgtgggtttccatggctctcgtatccgaactccacacttggatgccctggcagcagggggggtcctgctggataactattatactcagccactgtgtaccccatcccgatcccagctgcttacagggagatatcagatccgcactgggctgcaacatcagataatttggccatgccagccctcttgtgtgcccctcgatgaaaagctcctcccccagctgctgaaggaggcaggctacacaactcacatggtgggtaaatggcatctcgggatgtacaggaaggagtgcttgcccactcgtagagggttcgacacttactttgggtatctgcttggcagcgaagattattactctcatgagaggtgtaccctaatcgatgccttgaatgtcaccagatgtgcccttgacttcagagatggggaagaggtcgctactggatataagaacatgtactccacgaacattttcactaaacgggccatagcgctgattacaaaccaccctcctgaaaagcccctctttctatatctagccctgcagtccgtgcatgaaccactgcaagttccagaggagtacctgaagccctacgattttatacaggacaaaaacaggcatcactacgcgggcatggtttctctgatggacgaggcagtagggaacgttactgctgcccttaaaagctcgggcctctggaataacactgtgttcatttttagtacagacaacggaggccagactcttgcaggtggaaataattggcccctaaggggcaggaagtggagcctctgggagggtggtgttcgcggtgtgggattcgtcgcttcaccactactcaaacaaaagggagtgaaaaacagagagctgatccacatatcggattggcttcctacacttgtaaagctcgcccggggacacaccaacggtacaaaaccgctagacggcttcgatgtctggaaaacaatcagtgaagggtctcccagccctagaatagaactcctccataatattgaccctaacttcgtcgactcaagcccctgtcccagaaatagcatggctcctgcaaaggatgactctagtctgccggaatatagtgctttcaatacatccgtccacgcggcgatcagacacggcaactggaaattgctgacaggctatccaggctgcggctattggtttcctcccccttcacaatacaatgtgagtgagattccttcctcggaccctcctaccaaaacactatggctgttcgacatcgaccgagatccagaagaaaggcacgacctgtctcgggaatacccacacattgtaaccaagctactgtcccgtctgcagttttaccacaagcattcagtgccggtgtactttcctgcgcaggatcccaggtgcgatcctaaggccaccggcgtatggggtccatggatg

SEQ ID NO: 7088 - DNA, 1599 bp, synthetic construct
  misc_feature 1..1599: note = source = /note="Description of Artificial Sequence: Synthetic coding sequence"
  source 1..1599: mol_type = other DNA
atgggcccacggggcgcagcctctcttcctcggggaccggggccaagaagactgctccttcctgtagtgcttccattgttgcttttgctcttgctggccccaccagggtcaggcgcaggagctagccgccccccacatctggtgttccttctcgcggacgacctgggctggaatgacgtgggattccacggctcacgcatccgcactcctcacctggatgccctggccgcaggcggggtgctgctggataactattatacacaaccactgtgcacaccttcccgcagccaacttctcaccggccggtaccagattcgaacggggttgcagcaccaaatcatttggccatgtcagccttcctgtgtgcccctggacgaaaaactgctcccccaactcctcaaggaggctggatacacaacacatatggtgggaaaatggcatctgggaatgtatcgaaaggaatgtctgcctacccggagaggcttcgatacctactttggttaccttctgggcagcgaagactattatagccatgagcggtgcaccctgatcgacgccctgaacgtcactcgatgtgcactggactttcgcgacggagaggaggtcgctacaggatacaagaacatgtacagcacgaacatcttcacaaaacgcgcgatagcgcttataaccaatcaccccccagagaaaccgctgtttctctacctcgccctgcaaagtgtgcatgagccattgcaggtcccagaggagtatctgaagccatacgactttatccaggacaagaatagacaccattacgcgggcatggtgagcctgatggatgaagccgtcggaaacgttacggccgctcttaagtctagtggtttgtggaataatacagtgtttatcttttctactgacaacggtggccagaccttggctggcggtaacaattggcccctgcgcgggcggaagtggtccctgtgggaaggaggggtccggggtgtcggttttgtggctagcccacttctgaagcagaaaggagttaaaaacagggagcttatccacatctcagattggttgccaaccttggtcaaactggctcgggggcacactaatggcactaagccactggacggctttgatgtatggaagaccataagcgaaggttctcctagcccccgaatcgagcttctgcataatattgatcctaattttgtggacagttcaccctgcccgcgaaactcaatggctcccgccaaagacgactcaagtcttcccgagtattcagcgttcaatacaagcgtacacgccgctatccggcacggcaactggaagcttctcactggctatccgggctgtgggtactggtttccaccaccaagtcagtataacgtttctgagataccatccagcgatccccctacgaaaaccctgtggctgttcgacatcgaccgcgatcctgaggagagacacgacctgagtcgagagtacccccatatcgttacaaagcttctgtctcgccttcagttttatcacaaacacagtgtgcccgtgtattttcctgctcaagaccctcggtgtgatcccaaagcaaccggagtatggggaccctggatg

SEQ ID NO: 7089 - DNA, 1599 bp, synthetic construct
  misc_feature 1..1599: note = source = /note="Description of Artificial Sequence: Synthetic coding sequence"
  source 1..1599: mol_type = other DNA
atgggacctcgcggcgcagcatcgctccctcggggacctggcccacgtcggctccttttgcctgtcgtgcttcctctgcttcttctgctgctgcttgcaccgcccggaagcggcgcgggtgcctcaagaccacctcaccttgtgtttctccttgcagatgatctcggatggaatgacgtcggatttcatggatcccgcattagaaccccacatcttgatgccctggcggccggcggtgtgcttctggacaactactacactcaaccactctgcaccccctcccgctcccagctccttacgggtcggtaccaaattcggactggtctgcaacaccaaatcatatggccatgtcagccttcctgtgtccctcttgatgagaagttgcttccccagcttctcaaagaagcaggttacactacccatatggtgggtaagtggcatctgggaatgtaccgtaaggaatgccttccgactaggcgcggatttgacacctattttggttaccttctcggatcggaagattactactcgcatgaacgctgcaccctcattgatgcacttaatgtcaccaggtgtgccctcgacttcagagatggggaggaggtggcaactgggtacaagaacatgtactcgaccaacattttcaccaagagggccattgcactgattactaatcatcctccggaaaagcccttgttcctgtacctcgcactccaaagtgtgcatgaacctctccaagtgcctgaggaatacctcaagccatacgatttcatacaagacaagaacaggcatcactacgcaggaatggtatcccttatggacgaagctgtcgggaatgttacggcggcacttaagtccagcggcctgtggaataacaccgtctttatcttttcgaccgacaatggtggtcagaccctggcaggcggaaataactggcctcttcgcgggagaaaatggtcgctctgggaggggggagtgcggggcgtgggattcgtagcttcaccactcttgaaacaaaagggggttaagaaccgtgaacttatccacatctcggattggcttccgaccctcgtcaagctcgcacggggtcatactaacggcaccaaacctctcgatggttttgatgtctggaaaactatcagcgaaggatcaccttcaccaagaattgaacttctgcataacattgatcccaactttgtggatagctcgccctgtcctcgtaactcgatggcacccgccaaagacgattcgagtctgcccgaatattcagcatttaacactagcgtccatgccgctattaggcacgggaattggaaactgttgactggataccctggatgtggatactggttccctccaccatctcaatacaatgtgtcagaaattccatcctctgaccctccaaccaagactctgtggctcttcgatattgaccgggaccctgaagagcggcacgacctgtcccgcgaatatcctcacatcgtgactaaacttcttagccgactccagttctaccataagcactctgttcccgtgtactttcccgcgcaggatccgagatgcgatcccaaggcaactggtgtgtggggaccgtggatg

SEQ ID NO: 7090 - DNA, 1599 bp, synthetic construct
  misc_feature 1..1599: note = source = /note="Description of Artificial Sequence: Synthetic coding sequence"
  source 1..1599: mol_type = other DNA
atgggtccgcgaggagcggcctcacttcctcggggacccggcccacggcgattgctgttgccggtggtgcttccgctcctcctgttgttgctcctcgccccgccaggatcaggagctggggctagtagaccgccgcacctcgtgttcttgctggctgatgatttgggatggaacgacgtcggcttccatggctcgcggatccgcactccgcatctggacgcgctcgccgcgggaggagtcttgctggataactactacacccagccgctgtgcacgccgagcagatcacagctccttaccggtcgttaccaaatcagaactggactccagcaccagatcatttggccatgtcaaccgagctgcgtgccactggacgaaaagctccttccacagctcctgaaggaagctgggtacaccacccacatggtgggtaagtggcatctgggcatgtaccgcaaggaatgccttccgaccaggagaggcttcgacacttacttcggctacctgctcggaagcgaggattactactcccatgaacggtgcactctgatcgacgcgctgaacgtgacccggtgcgcattggatttccgggatggcgaggaagtggcaaccggatacaagaacatgtactcgaccaacattttcacgaagcgcgcaatcgccctgatcaccaaccacccgcctgaaaagcctttgttcctctacttggctctccagagcgtgcacgagccgctccaggtgccggaagagtacctcaagccgtacgatttcatccaagataagaatcgccatcactacgcggggatggtgtcactgatggacgaagccgtgggaaatgtgacggcagccctgaaatccagcggactgtggaacaacaccgtgttcatcttctcgaccgacaatgggggccagaccctcgctggaggcaacaattggcccctgcgcggacggaaatggtcgctctgggaaggaggagtgagaggagtgggcttcgtggcctcaccactgctcaagcagaaaggagtgaagaaccgggaactgatccacatctcggactggctgcctaccctggtcaagctggctagaggacacaccaacggaactaagcccctggatgggttcgacgtctggaaaactatctccgaaggctcgccatcgcctcgtattgagctgctgcataacatcgacccgaatttcgtcgattccagcccttgcccaagaaactcaatggcaccggccaaagatgattcgagcctgccggaatactcggccttcaatacgtcagttcacgccgcgatcagacatggcaattggaagctgcttaccggctatcctggttgcggatactggttcccgcctccgtcccaatacaatgtctcggagatcccttccagcgacccgccaacgaaaaccctgtggctgttcgacattgatcgggacccagaagaacgccacgacctctcacgagaatacccacatatcgtgaccaagctcctgagccgcctgcagttctaccacaagcactcagtcccagtgtactttcccgcgcaagacccccgctgcgacccaaaggctaccggggtgtggggtccatggatg

SEQ ID NO: 7091 - DNA, 1599 bp, synthetic construct
  misc_feature 1..1599: note = source = /note="Description of Artificial Sequence: Synthetic coding sequence"
  source 1..1599: mol_type = other DNA
atgggacctcgcggcgctgcgtcgctccccagaggacctggacctcgaaggcttttgctgcccgttgttctgcctctcctgctgctgttgctgctggcgccaccgggatctggggctggggcctccagaccaccccatctcgtgtttctgctggcagatgacctggggtggaatgatgtgggattccacggctcgcggatcaggacccctcaccttgacgcgctcgctgctggtggcgtactgctggataattactacacacagcctttgtgtaccccctccaggtcccagctgttgacaggaaggtaccaaattcgcacagggttgcagcatcagatcatttggccctgccagccctcttgcgtgcccctggatgaaaagctcctcccgcagctacttaaagaggcaggttacactacacacatggtaggcaaatggcatctgggaatgtatagaaaggagtgtttacccaccagaagggggttcgacacctatttcggctatttactgggctcggaggactactactctcacgagagatgcacactgattgatgcattaaacgtcactcgctgcgccctcgattttcgggacggggaagaggttgctaccggatataaaaacatgtatagtaccaacatcttcacgaaacgcgccattgcacttatcacaaatcatcctcccgagaaacctttattcctttacctggctctgcagagtgtgcatgaacccttgcaggtccctgaggaatacttgaagccctacgacttcattcaagataaaaatagacatcactatgccggaatggtttctttaatggacgaggctgtcgggaacgtgacagctgctctgaagagctctgggctctggaataacaccgtttttatcttcagtacagacaacggaggtcaaacactggctggtgggaataactggcccctgcgaggcagaaaatggtcactgtgggaaggtggcgtgaggggagtggggttcgtagcctcgcctctactgaaacagaagggcgtgaaaaatcgcgagcttatccatattagcgactggctcccgacattagtaaaactggcgagaggacataccaacggcaccaagcctctggacgggttcgacgtgtggaagacaatctccgaagggtccccaagtcctagaatcgaactgttgcataacatagaccccaatttcgtggactcttcaccatgcccacgaaattccatggctcccgctaaagatgactccagtctacctgaatactctgcatttaatacatcagtgcatgctgcgatccggcacgggaattggaagctgctgactggctatcccggatgcggctactggttcccgcctccatcgcaatacaatgtgagcgagatacccagttccgatccgccaacgaagactctttggcttttcgatattgacagagatcctgaagagagacatgacctgagcagagagtatccgcatatcgtgacaaagttgttgagtcgactacagttctatcacaaacactccgtcccagtctatttccctgcacaggacccaaggtgcgacccaaaggcgactggggtttgggggccttggatg

SEQ ID NO: 7092 - DNA, 1599 bp, synthetic construct
  misc_feature 1..1599: note = source = /note="Description of Artificial Sequence: Synthetic coding sequence"
  source 1..1599: mol_type = other DNA
atgggaccgcgcggagcggcgagcctgccgagaggacctggccctcgcaggctgctgcttcctgtggtgctgccgttgctgctgctcctcctgctggcccctccaggatccggagccggtgcctcgcggcccccacacctggttttcctgctcgccgacgacctggggtggaatgatgtcggattccacggttctcggatccggaccccccatctggacgccctcgcggccggcggagtgctgctggacaattactacactcaaccgctctgcactccgtcccgcagccagctgctgaccggtcgctaccaaatccgaaccggcctccagcatcagatcatatggccttgccagccatcgtgcgtcccactggacgagaagttgttgccacagttgctcaaagaggcgggatacaccacccacatggtcggaaagtggcatctggggatgtacaggaaggagtgtctgccgacccggaggggtttcgacacttacttcgggtatctcctgggatccgaagattactactcacatgaacgctgcaccctgatcgacgccctgaatgtgactagatgcgcactcgatttcagagacggagaagaagtggctactggatacaagaacatgtactccaccaacattttcaccaaaagagctatcgcgctcattacgaatcaccctccagagaaacccctcttcctgtacctcgcgctgcaaagcgtccacgagccgctgcaggtgcctgaagagtacctgaaaccttacgatttcatccaggataagaacagacaccattacgcgggaatggtttcgttgatggacgaagctgttggcaatgtgaccgccgccctgaagagttcgggcctgtggaataacaccgtgttcatcttctcaaccgataatggcggacaaacgctggccggaggaaacaattggccactccggggccggaagtggagtctttgggagggaggggttcggggggtgggttttgtggcatcccccctgctgaagcagaagggtgttaagaacagagaattgattcatatctctgactggctgccgactcttgtgaagctcgctcggggacacaccaatggtactaaaccgctggacggcttcgatgtgtggaaaactatttcagaaggttcgccgtcaccgcggatcgagctgctccataacatcgacccaaacttcgtggactcatcaccgtgtcctagaaactccatggcccctgccaaggatgattcctcactgccagagtactcggcattcaacacctccgtgcacgctgccatccgtcacggtaactggaaactcctcactgggtaccccggatgcggctactggttcccgccaccgtcacaatacaacgtgtctgagatcccgagctcggatccacccactaagaccctttggctgttcgacatcgatcgggaccctgaagaaaggcacgatctgtcgcgggagtaccctcacatcgtgactaagctgctgtcccggctgcaattctaccacaagcattcagtgccagtgtactttccggctcaggacccgcgctgtgacccgaaggcgactggagtgtggggaccgtggatg

SEQ ID NO: 7093 - DNA, 1599 bp, synthetic construct
  misc_feature 1..1599: note = source = /note="Description of Artificial Sequence: Synthetic coding sequence"
  source 1..1599: mol_type = other DNA
atgggacctcggggggccgccagcctgccccggggcccgggaccccgtaggctgcttctgcccgtcgtcctgccactgctactgttattattgcttgctcctcctggctcgggagccggtgctagccgtccaccccatctggtgttcctcctcgccgacgatctcggttggaatgatgtcggtttccatggctctaggattaggacaccccatctggacgcacttgccgctggaggcgtgctgctggataattactacacccagcccttgtgtacccccagcagaagccagctactgaccggaaggtaccaaattcggaccggcctgcagcatcagattatctggccctgtcagcctagctgcgtaccactggatgaaaaactcctgcctcagctgctaaaggaagcaggctacactactcatatggttggcaagtggcacttggggatgtacaggaaagagtgtttgcctacccgccgtggttttgatacatactttgggtacctgctgggatcggaagactactactcccatgagcgatgcactttaatagacgccctcaacgtgaccaggtgtgcactcgacttccgcgatggtgaagaggtggcgactggatacaagaatatgtactccaccaacatatttaccaagcgtgctatcgccctgatcacgaatcacccacccgagaaacctttgtttctttatctggcactgcagagcgtccatgaacctctccaggtccctgaggaataccttaaaccctatgactttatacaggataaaaatagacaccattatgctggtatggtgtctctgatggatgaggctgtgggcaatgtgacagccgccctcaagtctagcggcctctggaataacactgtgttcatcttttcaacagataatgggggccagactctcgctgggggaaataattggccacttcgcggcaggaaatggagtctttgggaagggggggtgaggggcgtgggattcgtggctagtccgctcctcaaacagaaaggtgtcaagaaccgggaactaattcatatatctgactggctgcccacactggttaaactcgcccggggccatacaaatggcaccaagcctctggatggatttgatgtttggaagaccatctctgaggggtcgccatctccccgtattgaactgctgcacaatattgatcctaattttgtagactcatccccatgtccacggaattctatggcccctgccaaagacgattcttccttgccagaatatagcgcattcaatacaagcgtgcacgccgctatcaggcacgggaactggaagctgctaacagggtacccaggctgtggctattggttccctcctccctcgcagtacaacgttagtgagatcccctcttcagaccccccaacaaagaccctttggctgttcgacatcgaccgggaccctgaagaacgacacgacctcagtcgtgagtatccccacattgtgacgaaactgttgagtaggctacagttttaccataagcactcagtgcctgtatactttcccgcgcaggatcctaggtgcgacccaaaggccacaggggtgtggggcccttggatg

SEQ ID NO: 7094 - DNA, 1599 bp, synthetic construct
  misc_feature 1..1599: note = source = /note="Description of Artificial Sequence: Synthetic coding sequence"
  source 1..1599: mol_type = other DNA
atgggtcctcgcggcgcggcatccctgccacgcgggccagggcctagacgtctgctgctgccggtggtcttgccacttctgcttcttctgcttctggcaccaccggggtcaggcgctggcgcatctcggcctccacatctggtgttccttcttgcagatgatctgggatggaacgacgtgggctttcatggatcacggattcgaaccccacatctggacgcacttgccgccgggggtgtgctccttgataactattacactcaacccctttgtactcctagccggtcgcagctcctcaccggaaggtaccaaattagaaccggccttcaacatcagatcatttggccatgtcaaccttcgtgtgtgccccttgatgagaaacttttgccacaactcctgaaagaagccggatacaccactcacatggtcggtaagtggcatctgggtatgtaccgaaaagaatgcctgcctacccgccgaggctttgatacgtactttggttaccttcttggtagcgaggactactactcacatgagcgctgtaccttgattgatgccctgaatgttacgagatgtgcacttgattttcgagatggcgaggaagttgccactgggtacaagaatatgtactccactaacatctttactaagcgcgcaatcgcacttattacgaaccatccccctgagaagcctcttttcctgtacttggccctgcaatccgtgcatgagccactgcaggttccagaggaatacctgaagccttatgactttatccaagataagaatcgacaccattatgcagggatggtcagcctgatggatgaggccgtgggaaacgtcaccgcagcccttaaatcttccggcctttggaacaataccgttttcatcttttccactgataacggtggccagaccttggcaggaggaaacaattggccacttaggggacgcaaatggagcctgtgggaaggaggagtgcgaggtgtgggttttgtggcttcgcctcttctcaaacagaagggggttaagaatcgcgaactgattcatatttccgattggctgccaactctggtcaaactggcaagaggacatactaacgggactaagccactcgatggtttcgatgtgtggaaaacgatttccgaaggaagcccttcgcctagaattgaacttcttcacaacattgacccaaactttgtggattcaagcccctgccctcggaactcgatggcaccagctaaggacgattcgtccctgccggagtactcagcttttaacacttccgtccacgcggcaatccgccatggtaattggaaacttctcactggttaccctggttgtgggtactggtttccccctccatcccagtacaacgtgagcgaaatcccgagctccgatcctccgactaagacgctttggctgtttgacattgaccgtgatcccgaggagaggcatgacctgagccgtgaataccctcatatcgtgactaagctcctctcgagactccagttttaccataagcattcggtgcctgtgtatttccccgcacaagacccgaggtgtgacccaaaggcaactggagtgtggggaccttggatg

SEQ ID NO: 7095 - DNA, 1599 bp, synthetic construct
  misc_feature 1..1599: note = source = /note="Description of Artificial Sequence: Synthetic coding sequence"
  source 1..1599: mol_type = other DNA
atgggtccgcggggtgcagcatctctcccacgggggccaggcccgcggcggttgctgcttcccgtcgtgctaccattgttactgttgctgctgctggctccacccggctcgggggcgggggcatccagacctccccaccttgtttttctgctggccgacgacctcgggtggaatgatgtggggttccacggaagcaggatacgcactccccacctggatgcacttgccgcagggggcgtgttgctggacaactattacacacaacctctgtgtacaccttctaggtctcaacttcttactggccgctaccagattaggacaggcctgcagcaccagatcatttggccgtgtcaaccctcctgcgtgcccctcgacgagaagttgctgcctcagctgctaaaggaggccgggtatacgactcacatggtaggcaagtggcacctaggcatgtacaggaaggagtgtttgcctacccgcagggggttcgacacttacttcggatacctattagggtctgaggactactatagtcatgaaaggtgcacgctcatagacgctctgaatgtgacgagatgtgcccttgatttccgcgacggtgaggaggtggctaccggctacaagaacatgtattctactaacatctttacgaagagggccattgccctgattacgaaccatccccctgagaagccactgttcctgtatctcgccctgcagtcggtccatgaaccactccaagtcccggaggaatacctaaaaccatacgatttcattcaagacaaaaataggcaccactatgccgggatggtgtcattgatggacgaagctgtcggtaatgttaccgccgctctgaagtctagcggcctgtggaataataccgtattcatcttttctacggacaacggcgggcagactttagctggaggcaacaattggccattgcgtggtcgcaagtggtccttatgggaaggaggtgttaggggggtggggttcgtggcctcacccctcctcaaacagaaaggcgtgaagaatcgtgagctaattcacatctcagactggcttccgactctggtgaagctcgctcgtgggcacactaatggcactaagcccctggatggcttcgacgtttggaagaccatcagcgaaggatcccctagtccccgcatcgagctactccataatattgaccccaactttgtggacagtagcccttgtccgcggaactccatggcccccgctaaagacgacagcagtctgccagagtactcagcgttcaacacttcggtgcacgcagccatccgccacggcaattggaagttactcaccggctatcctggctgcggttattggttccctccgccaagccagtacaacgtgagcgagattccaagtagtgatcctccgacgaagacgttgtggctgttcgatattgatagggaccccgaggagagacacgatctgagtagggagtatccacatatcgttaccaagctgctgtcaaggctgcagttttatcacaaacactctgtccctgtgtacttcccagcacaagatccgcggtgcgatccgaaagccaccggcgtctggggcccgtggatg

SEQ ID NO: 7096 - DNA, 1599 bp, synthetic construct
  misc_feature 1..1599: note = source = /note="Description of Artificial Sequence: Synthetic coding sequence"
  source 1..1599: mol_type = other DNA
atgggcccgcgcggagcagcgagcctcccacgggggcctggacctcgcagacttctgctgccggttgtgcttccgctcctcctcctgctcctcctggcgccgcctggtagcggagccggagcctcgcgcccgccacacctcgtctttctgctggcggacgacctcggctggaatgacgtgggatttcatgggtccagaatccgcaccccacacctcgatgccctggctgcgggaggagtgctgctggacaactactatacccagccgctctgcactccttcgcgcagccagcttttgactggacggtaccagatcagaaccgggcttcagcaccaaatcatttggccttgccagccgagctgcgttccactcgatgaaaaactcttgcctcaactcctgaaggaggctggctacaccactcatatggtggggaaatggcatctcggaatgtaccgcaaagaatgcctcccgacccgccgaggtttcgacacttacttcggataccttttgggatccgaggactactactcccacgaacgctgcactctgattgatgctctcaatgtgacgcgctgtgcgctcgactttcgcgatggtgaggaggtggcaacgggatataagaacatgtactccaccaatatcttcaccaagcgggccatcgccctgatcacgaaccacccaccagaaaagccgctgttcctgtacctcgcactgcagtcggtgcacgagcccctgcaggtgcctgaggaatatctgaagccgtacgatttcattcaggataagaaccggcaccattatgcgggcatggtgtctctgatggacgaagccgtggggaacgtgactgccgcactgaaatcatcaggattgtggaacaataccgtgtttatcttcagcaccgacaacggaggccagactctcgctgggggaaataactggccgctgcggggcagaaagtggtccctgtgggagggcggagtgcgcggggtgggattcgtggcttcccctctgctcaagcagaagggcgtgaaaaacagggagctgatccatatctccgactggttgcccaccttggtgaaacttgcccggggacataccaacggaaccaagccgctggatggctttgacgtgtggaaaactatctccgaagggtcaccgtcaccgcggatcgaactgctgcacaatatcgacccaaacttcgtggactcatcgccatgcccacgcaattcaatggctcccgccaaggacgattcttcgctgccagagtactccgccttcaacacgtccgtgcacgccgcaatcagacatggaaattggaagctgcttaccgggtaccctgggtgcggatactggttcccaccgccgtcccagtacaacgtcagcgagatcccgagctccgatccaccgaccaagaccctgtggctgttcgacatcgacagggaccctgaggaaaggcatgacctgtcccgggaatacccccacattgtgactaagctgttgtcacggcttcagttctaccataagcattccgtcccggtctacttccccgcccaggacccccgttgcgatcctaaggccactggagtgtggggaccatggatg

SEQ ID NO: 7097 - DNA, 1599 bp, synthetic construct
  misc_feature 1..1599: note = source = /note="Description of Artificial Sequence: Synthetic coding sequence"
  source 1..1599: mol_type = other DNA
atggggcctcggggtgcagcatccctgcctcggggacccgggccaagacgcctcctgctccctgtggtgttgccgctcctcctccttcttctgcttgcaccaccaggttcaggtgcaggggcctcccgacctccccacttggtgttcctgctggcagacgatctgggctggaacgatgtgggatttcatggcagccgcattagaaccccccatctcgacgcactggcagcaggaggtgtgcttctggataactactacacccaacccctgtgtacccctagccggtcgcagcttctgactggacggtaccaaattcgcactggactgcagcaccagataatctggccatgtcaaccatcgtgtgtccctcttgacgaaaagttgctgcctcagctgctgaaagaagccggttacacgactcacatggtgggaaagtggcaccttggaatgtacagaaaggagtgccttcctactcgcagaggttttgacacctacttcggttaccttctcggatcggaggactactacagccatgaaaggtgcacccttatagatgcgctgaatgtgaccaggtgcgcactcgattttcgggatggggaagaagtggcaactggctacaagaacatgtactccacgaacatcttcaccaagcgagcgattgcccttattaccaatcatcccccggaaaaacccctttttctgtacctggctcttcagtccgtccacgagcctctccaggtgcctgaagaatacctgaagccctacgatttcattcaggacaaaaacagacatcattacgcaggaatggtgagcttgatggatgaagccgtcgggaacgtgaccgcagccctgaagagctcaggtctgtggaataacaccgtgttcatattctccaccgataacggcggacaaactctcgcaggtggaaataactggccacttcggggcagaaagtggtcgttgtgggagggcggcgtgcggggagtcggtttcgtggcctcgcctctccttaagcagaagggagttaagaaccgcgaactgattcatatctccgactggctgccaaccctggtcaagttggcccggggtcataccaatggtaccaagccactggacggtttcgatgtttggaaaacgatcagcgagggcagcccatcccctagaattgagctgctgcataacatcgacccaaactttgtcgactccagcccctgtccacggaattccatggctccagcaaaggatgactctagcctgcctgaatattcggcttttaacacttcagtgcacgctgccattcggcacggaaactggaagctgttgaccggatacccgggttgtggatattggtttccacctccctcgcaatacaacgtgtccgaaataccatcgtccgatccaccgaccaaaactctgtggctgtttgatatagaccgcgaccctgaggagaggcacgacctgtcccgagagtacccacacatcgtcaccaaacttctgtcacggcttcagttttaccacaaacattccgtcccggtctacttccccgcacaagatccacgctgtgaccccaaagccaccggagtctggggcccatggatg

SEQ ID NO: 7098 - DNA, 1599 bp, synthetic construct
  misc_feature 1..1599: note = source = /note="Description of Artificial Sequence: Synthetic coding sequence"
  source 1..1599: mol_type = other DNA
atgggaccacggggagccgccagcctgccacggggaccgggaccacgccgccttctgttgccagtggtcctccctcttctgcttctgctgcttcttgcacctcctggttcaggggcaggtgcgagcagaccacctcatctcgtctttctgctggcggacgacctgggttggaacgacgtcggatttcatggaagcaggataagaactcctcaccttgatgcgctcgcagcaggaggagtgcttttggataactactatactcagcccttgtgcactccgtcgaggtcccagcttctgaccggaagataccaaattcgcactggattgcagcatcagatcatatggccctgtcaaccttcgtgcgtgcccctcgatgagaagctcctcccgcagctgcttaaggaggcaggctacaccacccacatggtcggaaaatggcacttgggcatgtaccggaaggagtgtctgcccacccgccgaggttttgacacgtacttcggatacctgctgggtagcgaagattactactcccatgagcgttgcactcttatcgatgccctgaatgtgactcgatgtgcattggattttagggacggtgaggaagtcgctaccggttacaagaacatgtactcgacgaacattttcaccaagcgggcaattgctctgatcaccaatcatcctcctgaaaagccacttttcctttacctggccctgcagtccgtccatgaaccactgcaggtgcccgaagaatatctcaagccgtacgactttatccaggacaagaatcggcaccactacgccggaatggtgtccttgatggatgaagcagtgggcaatgtgactgcagcgttgaagagcagcggcctgtggaacaacactgtattcatattctcgacggataacggtggacaaactttggccggagggaacaactggcctttgagggggagaaagtggtcgctttgggaggggggcgtcaggggtgtgggttttgtggcctccccactgctgaagcagaaaggtgtcaagaatagagaactgattcatatctcagattggctcccaacgctcgtgaaacttgcacggggtcataccaacggcactaagcctctcgatggatttgacgtctggaaaaccataagcgaaggaagcccttctccacgtatcgaattgcttcataacatcgacccaaactttgttgattcctcgccctgtcctcgaaactccatggcgcccgcaaaggacgactcatcgcttcccgagtacagcgcgttcaatacttcggttcacgcagcaatcaggcatggaaattggaagctgcttaccggatacccaggatgtggctactggtttccgcctcccagccagtataatgtgtccgagataccaagtagcgatcctccaaccaagaccctttggctttttgatattgatagagatccggaggaaagacacgacctctcacgggaatacccccatattgtgaccaaactgctttcacgcttgcagttctaccataaacattcagtccccgtgtactttcctgcccaggatccccggtgtgacccgaaggcaactggtgtgtggggtccttggatg

SEQ ID NO: 7099 - DNA, 1599 bp, synthetic construct
  misc_feature 1..1599: note = source = /note="Description of Artificial Sequence: Synthetic coding sequence"
  source 1..1599: mol_type = other DNA
atgggtccgcggggcgccgcctcgctgcctcgaggtccaggcccacgcaggcttcttctccctgtggttctgcctcttctgctgcttctgctgctcgcccctccaggctcgggtgccggagcatctcggcctccccatctggttttccttctggcagatgatcttggttggaacgacgtgggttttcacggctcgagaatccgcaccccgcatctcgacgctttggccgccggaggtgtgctgctggataactactacacgcagccactctgtactccaagccgtagccagcttctgactggcagataccaaattcgcactggacttcagcatcagatcatttggccgtgccagcctagctgtgtgcctctggatgagaagctcctgcctcagcttctgaaggaagcgggctacacgacccacatggtcggaaagtggcatctgggtatgtaccggaaggaatgcctgccaacgagaaggggatttgatacttacttcggctacctcctgggttcagaggattactactcacatgaaaggtgtaccctgattgacgcactcaacgtgactcggtgtgcactggatttcagagatggggaagaagtggcaactggttacaagaacatgtactcaaccaacattttcactaagcgcgccatcgcacttattaccaaccatcctccagaaaagccactttttctttacctggccctccaaagcgtccacgagccacttcaagtaccagaagagtatcttaagccgtacgactttatccaagataagaaccgtcatcactacgctggtatggtgtcattgatggacgaagccgtgggaaatgtgaccgcggcacttaagtcgagcggactgtggaacaacaccgtgtttatcttttcgaccgacaacggaggtcaaactctggcaggagggaacaactggcccttgcggggaagaaagtggagcctgtgggagggaggtgtgcggggtgtgggattcgtggcaagcccgcttctgaaacagaagggggtgaaaaacagagaacttatccatatttccgactggcttccaacgcttgtgaagctcgcaaggggacacaccaatggaaccaagcccctggacgggttcgatgtgtggaaaactatttccgaagggagcccttccccacgaattgaactgctgcacaacattgaccccaactttgtcgattcatccccatgtccacgaaactcgatggcgccagcaaaggatgattcgagcctgcctgaatactccgcattcaacacgagcgtgcatgcagcaattcggcatgggaactggaaactgctcactggatacccaggctgtggctactggtttccaccaccatcgcaatacaatgtgtcggagatcccttcgagcgatccacctactaagactctgtggctgtttgatatcgatcgagatcccgaagaacgacatgatctgtcccgcgaatacccccatatcgtgactaaacttctgtcccggcttcagttttatcataagcattccgtgcctgtgtacttcccagctcaagatcctagatgtgatcctaaagccaccggagtctggggtccatggatg

SEQ ID NO: 7100 - DNA, 1599 bp, synthetic construct
  misc_feature 1..1599: note = source = /note="Description of Artificial Sequence: Synthetic coding sequence"
  source 1..1599: mol_type = other DNA
atgggcccgcggggagcggcctcgctcccgcgcggacctggaccgcgccggctgctgctgccagtggtgctccccctgctgctgctgcttctgctggctccgccgggaagcggagcgggagccagccgaccgcctcacctggtctttctcctggcagacgatttgggatggaacgacgtgggtttccatggttcccggatccggactcctcatctcgacgcgctggccgcgggcggagtgctgctggacaactattacactcagccgctttgcaccccttccagaagccaacttctcactggaaggtaccagatccggacggggctccagcatcaaatcatctggccatgccagccatcctgcgttcctctggatgagaagctgctgccgcaattgttgaaagaagcaggatacaccacccatatggtgggaaaatggcacctcggaatgtacagaaaggaatgcttgcctactcgcagagggtttgatacctactttggatacctgctgggatccgaggactattactcccatgaacgctgcacgctcattgacgcacttaatgtgactcgatgtgcacttgacttcagggacggagaagaggttgcgactggttacaagaacatgtactcaaccaacatcttcaccaaaagagcaatagcccttattactaaccacccccctgagaaaccactcttcctctacctcgccttgcagtcagtccacgagccactgcaagtgcccgaagagtacctgaagccttacgacttcattcaggataagaacagacaccactacgcgggtatggtgtcactgatggacgaagcagtgggaaacgtcactgccgcccttaagagctcggggctgtggaataacactgtgttcatcttttccaccgacaacggaggacagaccctggctggaggcaacaactggccgcttcggggacggaagtggtcactgtgggaaggaggagtgcggggagtgggctttgtcgcctcaccacttctgaagcagaagggagtgaagaacagagagctgatacatatctccgattggctgccaaccttggtcaaactggccagaggccacaccaacggaactaaacctctggacggcttcgacgtctggaaaaccatttcagaaggctcaccttcaccccgcatcgagctcctgcacaatatcgacccgaatttcgtggactcgtcgccgtgcccgcgcaactccatggcaccggcaaaggacgactcgtccctgcccgaatactccgccttcaatacctccgtgcacgccgcaattcggcatgggaactggaagctgctcactggctaccctgggtgcggatactggtttccaccaccaagccagtataatgtgtcagagatcccgtcatccgatccaccgacgaaaactctttggcttttcgatattgaccgggaccctgaggaaagacacgacctctcgcgggagtacccgcacattgtgactaagctcctctcgcgcctccaattctaccacaaacactcggtcccagtgtacttcccggcccaggatcccaggtgcgatcccaaggcgactggggtctggggcccctggatg

SEQ ID NO: 7101 - DNA, 1599 bp, synthetic construct
  misc_feature 1..1599: note = source = /note="Description of Artificial Sequence: Synthetic coding sequence"
  source 1..1599: mol_type = other DNA
atgggacctcgaggagcagcatcgctccccagagggcctggtccacggcggcttctgctaccagttgttctcccactgctgctgctccttctgttggccccaccgggcagcggcgccggcgccagcaggccaccccacttggtgttcttgctggctgacgatctcggctggaacgacgtgggcttccacgggtcaaggatacgtacaccgcacctcgacgcactagctgccggcggagtgctgctggacaactactacacccagcccctctgtacaccaagcagatcccagctcctgactggacgataccagattcggactgggcttcagcaccagataatttggccttgtcaacctagctgtgtgccactggacgagaaactactgcctcagctcctgaaagaagcaggatacactacacacatggtcgggaagtggcacctgggtatgtacagaaaggaatgtctccccacaagacgtgggtttgatacgtatttcggctatctgttagggtccgaggactattacagccacgagcgatgtactctcattgacgcgctgaacgtcactagatgtgccttagattttcgagatggcgaggaagttgcaaccggttataagaacatgtatagcaccaatatctttacaaagcgggccatagctctcataacaaatcaccctccagagaagccgcttttcctgtaccttgcgttgcagagcgtccacgagccccttcaggtgcctgaggaatatctgaagccatacgactttatacaggacaaaaacagacaccattacgcaggcatggtgtctctcatggatgaggcagtgggaaacgtcacagctgcactgaagagttcgggactatggaataataccgtcttcatatttagtacagataatgggggccagactctcgccggcggcaataattggcctcttagaggacgcaaatggagtctttgggaagggggcgtgcgcggggtgggcttcgtagcctcccccctccttaagcagaagggggtgaaaaaccgcgaactcatccacatcagtgattggttaccaaccttggtgaaacttgcaagaggacataccaacggtaccaaacccctcgatggtttcgatgtctggaagacgatcagcgaggggagcccctcacctcgaatagaactgctccacaatatagatccaaatttcgtcgacagttcaccttgccccagaaacagtatggctcccgccaaagacgactcctccttgcccgagtatagtgcgttcaacacgtcagtccacgcagcgatacgacacgggaattggaagctgttaacaggatacccgggctgcgggtactggtttcctccaccaagccagtacaatgtttcggagattcccagctctgatccaccaacaaagacgctttggctttttgatattgacagagaccccgaagaaagacatgatctatcaagggagtaccctcacatcgtaaccaaactgctctctcggctgcaattctaccacaagcactccgtgcccgtctactttcctgcccaggaccctaggtgtgatccaaaagccaccggagtctggggcccatggatg

SEQ ID NO: 7102 - DNA, 1599 bp, synthetic construct
  misc_feature 1..1599: note = source = /note="Description of Artificial Sequence: Synthetic coding sequence"
  source 1..1599: mol_type = other DNA
atgggtccaagaggagcagcatctttaccaagaggaccaggacctcgaagattgttacttcctgttgtcttaccattacttttacttttattacttgctcctccaggttctggtgcaggagcttcaagacctcctcatcttgtttttttattagcagacgatttaggatggaatgatgttggattccatggttcacgtattagaacaccacatcttgatgcattagctgcaggtggtgttttattagataactactatacacaaccattatgtactccatcaaggtctcaattattgacaggaagataccaaattcgaacaggtttacaacatcaaattatttggccttgtcaaccatcatgtgtacctttagatgaaaaacttttaccacaattattaaaggaagcaggttatactactcatatggtaggaaaatggcatttaggaatgtatcgtaaagaatgtttaccaactagaagaggatttgatacttattttggatatttgcttggaagtgaagactattactcacatgaaagatgtaccttaattgatgccttaaacgtaacaagatgtgcattggatttccgtgatggagaagaagttgctacaggatataaaaacatgtattcaactaatatttttactaaacgtgcaatagcacttataactaatcatccacctgaaaaaccactttttttatatttagctttacaatctgttcatgaaccacttcaagttccagaagaatatttaaaaccatatgactttatccaagataaaaatagacatcactatgcaggtatggtttcattaatggatgaagcagttggaaatgttacagctgctcttaaatcatctggactttggaataatactgttttcatcttttcaacagataatggaggtcaaactcttgcaggagggaataactggccacttagaggacgtaaatggtctttatgggagggaggtgttcgtggagtaggattcgttgcatctccattattaaaacaaaaaggagttaaaaacagagagttaatacatataagtgattggttaccaacacttgttaaactagctcgaggacatacaaacggtacaaaaccattagatggttttgatgtttggaaaacaatatctgaaggaagtccatctccaagaattgagttacttcataatattgatccaaattttgttgattcatcaccttgtcctagaaactctatggcaccagctaaagatgatagtagtctacctgaatattctgcatttaacaccagtgttcacgcagcaattcgacatggaaattggaagttactaacaggttatccaggatgtggatattggtttccaccaccatcacaatataatgtttcagagattccatcatccgatcctccaacaaagaccctatggttatttgatatcgatcgagatccagaagaaagacatgatctcagtagagagtatccacacattgttacaaaattgttgtctagacttcaattttatcataaacattcagttcctgtatatttcccagctcaagatccaagatgtgatccaaaagctactggggtttggggaccatggatg

SEQ ID NO: 7103 - DNA, 1599 bp, synthetic construct
  misc_feature 1..1599: note = source = /note="Description of Artificial Sequence: Synthetic coding sequence"
  source 1..1599: mol_type = other DNA
atgggacctcgcggtgcggcctccttgcctcgcggaccaggaccacgccgccttctgctgccggtggtcttgccactgctcctgcttttgctgctggcgccaccgggatcaggagctggagcgagccgccctccccatctcgtctttctgctggccgatgacttgggctggaacgacgtaggattccacgggtcgcggatccgcactccacatctggatgccctggcagccggtggagttctgctggacaactattacacccagccgctctgcactccgagcagatcgcaactgctcaccgggcggtaccagatccgcacgggcctgcagcatcaaatcatttggccgtgccagccctcgtgcgtgccgctggatgagaaattgctgcctcagctgctgaaggaagctggttataccacccacatggtcggaaagtggcacctcggaatgtacagaaaggaatgtctgcctactcgccggggtttcgatacttactttggttacctgctcggctcggaagattactactcccacgaacggtgcaccctgattgatgcgctcaacgtgactcgctgcgccctggacttccgggacggtgaggaggtggccacgggctacaagaatatgtactcgaccaacatcttcaccaaacgcgccatcgcgctcatcaccaatcacccgccagaaaagccgctcttcctgtaccttgccctccagtcagtccatgagccgttgcaagtgccagaggaatacttgaaaccatacgactttatccaggacaaaaatcgccaccactacgccgggatggtgtccctgatggacgaagccgtggggaacgtgactgcagccctcaagtctagcggactctggaataacaccgtctttatcttctctacggataatggagggcagaccctggctggtggcaataactggccgcttcgcggtcgtaagtggtcactctgggaagggggagtgcgcggggttggttttgtcgcatcccccctgcttaagcaaaagggcgtgaaaaaccgggagctcatccatatctcagattggctgccgaccctggtgaaactggcaaggggccatacgaacggcaccaaaccactggatggtttcgacgtttggaaaaccatctcagaaggaagcccaagtccgcgcatcgaactcctccataacatcgatccgaattttgtcgactcgtctccgtgtcctcggaactcgatggcacctgccaaagacgactctagcctgccagaatactcagccttcaacactagcgtgcacgcggcgatcaggcacggcaactggaagttgctcactggctacccgggctgtgggtactggttccctcccccatcgcagtacaacgtgtccgagatcccatcctcggatccacccactaagacgctctggctgtttgacatagacagagatcctgaagaacgccatgatctctcccgggaatacccccatatcgtcaccaagctcctgtcgaggctgcagttttaccataagcactcagtcccggtgtacttcccagctcaagaccctcgctgtgaccctaaggcaaccggagtctgggggccgtggatg

SEQ ID NO: 7104 - DNA, 1599 bp, synthetic construct
  misc_feature 1..1599: note = source = /note="Description of Artificial Sequence: Synthetic coding sequence"
  source 1..1599: mol_type = other DNA
atgggtcctaggggtgcagcatcactgccccggggacctggaccaaggagactcctgcttcctgtggtgcttccgctgctccttttgcttcttctggcaccgcctgggtcgggtgcaggtgcgagtcgacctccacacctggtgttcttgcttgccgatgatcttgggtggaacgatgttgggttccatggttcccgcattcgcaccccacacctcgatgcactggcagcagggggagtgcttttggacaattactatactcaacctctttgtaccccaagcaggtcgcaactgcttaccggacgctaccagatccggaccggactgcagcaccagatcatctggccgtgccaaccctcgtgtgttccccttgacgagaaattgcttcctcagttgctgaaagaggccggatacactactcatatggtcggcaagtggcatttgggaatgtacagaaaggagtgtctcccaaccagacgtggattcgacacttacttcgggtacctccttggatccgaggattactactcgcatgaaagatgcactctgattgatgcactgaacgtgacgaggtgcgccttggactttcgggacggggaagaagtggctactggatacaaaaacatgtactcgaccaacattttcacgaagcgggctatcgcactgataactaaccaccctccagaaaagccactctttctttaccttgcactgcagtcggtacatgaaccccttcaagtacccgaggagtatctgaaaccctacgacttcattcaagacaaaaatcgccatcattacgccggaatggtgtcgcttatggacgaagcagtcggcaacgttaccgcggcactcaagagctcaggtctttggaacaacaccgtgtttatctttagcactgataatggtggacaaacccttgccggtggaaacaactggccactgaggggacgcaagtggtcactgtgggagggaggcgtccgcggagtgggatttgtcgcgtcgcctttgctgaagcagaagggagtgaagaacagggaactgattcatattagcgattggctgccgactctggtcaagctggcaagaggacacaccaatggtaccaagcccctggatggttttgatgtgtggaaaactattagcgaaggcagcccttccccccgaattgaacttttgcataacattgatccaaactttgtcgatagctccccctgtccgcggaacagcatggccccagcgaaagatgactcttcgttgcccgaatactccgcgtttaacacctcggtccacgcagcgataaggcacggtaattggaagctgcttacggggtacccagggtgtggatactggttcccacctccctcgcaatacaacgtctcagagataccttccagcgatcctccgaccaaaaccctgtggctgttcgatatcgatagagatccagaggaaagacatgacctgagccgtgaataccctcatattgtcaccaagctgctgtcacgcctgcagttctaccataaacattcggtgcctgtgtactttccagcccaagatccgagatgtgacccaaaggcaacgggcgtgtggggtccttggatg

SEQ ID NO: 7105 - DNA, 1599 bp, synthetic construct
  misc_feature 1..1599: note = source = /note="Description of Artificial Sequence: Synthetic coding sequence"
  source 1..1599: mol_type = other DNA
atgggcccacgcggtgcggcttctcttcctcgggggccaggaccacgacgcctcctgcttccagtggtgctcccgctgctgctcctgctgttactggcccctcccggtagcggcgccggtgctagtagaccgcctcacttggtgttcctgttagcggacgatctggggtggaacgatgtaggattccacggctctcgcatccgcactccccatctcgatgccttggccgccgggggcgtacttctggataattattacactcaaccgttgtgcacgccctctcggagtcagctgttgacaggccgctatcagattagaacaggattgcagcatcagattatctggccttgtcagccctcgtgtgtgccactcgacgagaagctactgccccagctgctcaaggaagctggatataccactcacatggtcgggaagtggcacctgggcatgtaccggaaggagtgcctgccaactagacggggatttgacacctattttggctatctcctcggtagtgaggattactactcacacgagcgctgtacccttattgatgccttgaatgtgacccggtgcgcacttgatttccgtgacggagaggaagtcgcaactgggtataagaatatgtatagtaccaatatctttaccaagcgggccattgccctgattaccaatcatccccccgagaagcctctctttttatatcttgcccttcagagtgttcatgagcctctgcaggtgcctgaagaatacttgaaaccctatgattttatccaggacaagaataggcaccattatgcgggaatggtgtctttgatggatgaagcggttggtaatgtgactgctgcccttaagagctccgggctctggaacaatactgtattcatattttccactgacaacggcgggcaaactttagccggtggaaataattggcctcttcggggaaggaaatggagcttgtgggagggcggggtcaggggcgtgggttttgtcgcctccccgcttctgaaacagaaaggagtcaaaaaccgagagctaatccacatttccgactggctgcccacgctggtgaaattagcccgcgggcataccaacggcactaagcctcttgacgggtttgacgtgtggaagactattagcgaaggctctccgtcaccacgcatcgagctcctacataatatcgacccaaatttcgtggacagctcaccttgcccccgcaattcgatggcgccggctaaggacgacagctcacttcctgaatactcagcctttaataccagcgtgcacgcagctatccgccatggcaactggaagctcctcactggctaccctggctgcggttattggttcccaccccccagtcagtataacgtttccgagattccgagtagcgacccccctaccaagactttgtggctttttgacattgatagggaccctgaagaacgtcacgatctgtccagagagtatccgcatattgtcaccaagctcctttctaggctgcaattctaccataaacatagcgtgccagtgtattttcctgcgcaagaccctcgttgcgacccaaaggctactggcgtttggggtccatggatg

SEQ ID NO: 7106 - DNA, 1599 bp, synthetic construct
  misc_feature 1..1599: note = source = /note="Description of Artificial Sequence: Synthetic coding sequence"
  source 1..1599: mol_type = other DNA
atgggaccaagaggggcagcaagcctgcctcgcggaccaggtccacggcggttgctgcttccagtcgtgttgcctctgctgctgcttttgctccttgccccacctggatccggtgcaggcgccagcagaccgccacatctggttttccttctggcagatgatcttggttggaacgatgtgggatttcacgggagccgaattcggaccccgcacctcgatgcacttgcggccggtggcgttctgctggacaattactacactcaaccactttgtaccccgtcaagatcacaactgttgaccggtcgataccaaattagaactgggcttcagcatcaaatcatttggccgtgccaaccttcatgtgtgccactcgacgaaaaactcctgccacagctccttaaagaagcaggttacacgactcatatggtgggaaagtggcacctcgggatgtaccggaaagaatgtctgccaacgagacgtggattcgacacctacttcggttacctgctgggatcagaagattactactcgcatgaacgttgcactttgattgacgcacttaacgtcacgcgctgtgcactggattttcgggatggggaggaggtggcaactggatacaagaatatgtactccaccaacattttcacgaagagggccatagctctgatcactaatcaccctcccgaaaagcctctgttcctttacctcgcgctccaatccgtgcacgagccactgcaagtgcctgaagagtaccttaaaccttacgactttattcaggacaagaaccgccatcactacgcgggcatggtttcccttatggatgaagccgtgggaaatgtcaccgcagcactgaagtcctccggcctgtggaacaatactgtgtttatcttttccacggacaacggtggacagaccctggcagggggtaataactggcccctgcgagggcgcaaatggagcttgtgggaaggaggtgtgcggggtgttggatttgtggcatcacctcttctcaagcaaaaaggcgtgaaaaacagagagctgattcacatttcggactggctgcccacgctggtcaagttggcacgggggcatactaacggaactaagcctcttgatggctttgacgtgtggaaaaccatctccgaaggttcgccatctcctaggatcgaactcctgcataacattgatcctaactttgtcgactcatccccctgccctagaaattcaatggcaccagccaaagatgattcctcccttcctgaatactccgccttcaatacctcagtccatgcggccatccgccatggaaactggaaactgctcactggctaccccggctgtggatactggtttccccctccatcccagtacaatgtgtcagagatacctagctcagatcctccaaccaagactctttggttgtttgatattgatagggatccggaggagcggcacgatctgtcccgtgagtacccacatatagtgaccaagctccttagtagacttcaattctatcataagcattcagtgccagtgtacttcccagcacaagatccaagatgcgacccaaaggcaactggagtgtggggtccatggatg

SEQ ID NO: 7107 - DNA, 1599 bp, synthetic construct
  misc_feature 1..1599: note = source = /note="Description of Artificial Sequence: Synthetic coding sequence"
  source 1..1599: mol_type = other DNA
atgggtcctcggggagccgctagcctcccgcgggggcccgggccccgtagactgcttttacctgtggttctgcccctgctgcttttgttgttgttagcacctccagggtctggggccggggcatcaaggccgccacacctcgtgttcctactggccgatgacttaggctggaacgacgtggggtttcatggaagtaggattcgcaccccgcacctggacgcactggcagccgggggagttctgctggacaattactatacccagccactgtgcactccaagcagaagtcaactgctaacagggcgataccagatcaggactggtctccaacatcagatcatctggccttgccagccgagctgtgtccccctggatgaaaagctgctgccgcagctgcttaaagaagccggttacacgacccatatggttggaaagtggcatctgggtatgtataggaaagagtgtttgcctacacggagaggcttcgatacttattttgggtaccttctgggatctgaggattattattcacacgagcgatgtacactaattgacgctctgaacgttacacggtgcgcactggattttagggatggcgaggaggtggcgaccggctacaagaatatgtacagcacaaacatcttcactaaacgggccattgctcttattacgaaccacccaccagagaaacccctgttcctctacctggccctgcaatccgtccatgagcccttacaggtacctgaggagtaccttaagccctacgacttcatccaggacaagaacaggcaccattacgctggtatggtgagtcttatggatgaggccgtgggcaacgtcacagccgcacttaaatcttctggcctgtggaataatacagttttcattttttcgaccgacaacggcggacagacactcgccggaggaaataattggccccttcggggtaggaaatggagtctgtgggagggaggcgtcagaggggttgggttcgtggctagccctctactcaagcagaaaggagtcaaaaacagagagctgatccatattagcgattggctgccgacactggttaaattagcgagaggacacaccaatggaactaaaccgttagacggctttgatgtttggaagactatttctgagggttcccccagtccgcggatcgagctgctgcacaatattgaccccaacttcgttgactcatcaccttgcccgcgaaattccatggcccccgctaaagatgactccagtcttccagaatattccgcattcaatacgtccgtccacgctgccatcaggcatggcaactggaagctcttgaccggctaccctggctgtggctactggttccctccaccctcgcagtataacgtttccgaaattcccagctcagatcctcccactaaaaccttgtggctattcgatatcgacagggacccggaggaacgtcacgacctgtcacgggaatacccacacatagtgactaaactgctgagtcgactgcaattctaccacaaacactctgtccctgtgtactttccagcgcaagatcccaggtgcgacccaaaggctacaggagtgtgggggccctggatg

SEQ ID NO: 7108 - DNA, 1599 bp, synthetic construct
  misc_feature 1..1599: note = source = /note="Description of Artificial Sequence: Synthetic coding sequence"
  source 1..1599: mol_type = other DNA
atggggcctaggggcgcagcctcactgccacgaggccccggacctcggcgcctgctgctgccggtcgttctgccattgctgctgcttcttctccttgctccaccaggctctggggctggcgcttctcgcccaccacatcttgtgtttcttctggctgacgacctgggctggaacgacgtgggattccacggcagtagaataagaacacctcacctggacgcactggcagcgggtggagttctgctcgacaactactatacacagcccctgtgtactcccagccggagtcagctgctcactgggaggtaccaaatccgcaccggattgcaacaccaaataatttggccttgtcaaccttcttgcgtgcctctggacgaaaagctgcttccacagctcctgaaggaggccggctacacaacacatatggtgggtaagtggcacctgggaatgtaccggaaggaatgcctcccaacccggaggggttttgatacatacttcggatatcttctgggttcagaagattactattcacatgagaggtgcaccctcatcgatgcactgaacgttacccggtgcgcccttgactttcgggacggagaagaggtggccaccggctacaaaaacatgtactctacgaacatcttcaccaaacgcgctattgctcttataaccaatcacccccctgagaagcctctgttcttgtacctggctctccagtcagttcacgaacctttgcaggtgccagaagagtatctgaagccctatgattttatccaagacaagaacaggcaccattatgcgggcatggtctccctgatggacgaggctgtcgggaatgtcacagccgcattgaagagttccgggttgtggaacaatacagtttttatcttcagtaccgacaatggcggccagactttggctggggggaataactggcctctgcggggccggaagtggagcctctgggaagggggtgtcagaggagtgggtttcgtggcctcccccctgctgaaacagaagggtgtgaagaatcgcgagctgatccatatttccgactggctcccgacactggtgaagctcgcccgagggcatacgaacggtacaaagccccttgatggatttgacgtgtggaagacaatcagtgaagggagtccatctcctcgcatagagcttctgcacaacattgaccccaatttcgtcgactcttccccctgcccccggaactcaatggctcctgccaaggacgatagctccctgcctgaatactcagcgttcaacaccagcgtgcacgctgcgattcgccatggtaactggaagttgctgaccggttacccaggatgtgggtattggtttcccccacctagccaatacaatgtgagcgaaatcccatcatctgatccaccaacaaagactctctggttgttcgacattgacagggatccagaggagcgacacgacctttcacgggagtacccacacatcgtaacaaagttgctgtcccgactgcagttttatcacaagcactcagttcctgtgtacttccccgctcaggatcctcgatgtgatcccaaagccaccggagtgtgggggccctggatg

SEQ ID NO: 7109 - DNA, 1599 bp, synthetic construct
  misc_feature 1..1599: note = source = /note="Description of Artificial Sequence: Synthetic coding sequence"
  source 1..1599: mol_type = other DNA
atgggccctaggggagcagcatccctcccccgagggcctggcccaagacgactgcttcttcctgtggtgctccctctgctgttgctgctgttgcttgcaccgcctggttcaggtgccggagcgtcgcgacctccccatctggtgtttcttctggcagacgatcttggttggaatgatgtgggctttcacggatcgcgcatccgtactccacatcttgatgctctggcagccggtggcgtgctcctggacaattactacacccaacccctgtgcactccatcccgctcacagctcctgactggtagataccagatccggactggactccaacatcagattatctggccttgccagcctagctgtgttcctcttgatgagaagctcctgccacaactgcttaaagaagcaggatacaccacccacatggtgggaaagtggcatctgggaatgtacagaaaggaatgtctgccaacccgcagagggtttgacacgtacttcggttaccttcttggttcagaggattactattcccacgaacgatgtaccctgatcgatgcgcttaacgtgactagatgtgctctggattttagagacggggaggaagtggccaccggatataagaatatgtacagcaccaacattttcactaagagagctatagccctgattactaatcacccaccagagaagcctctttttctttacctggcactgcaaagcgtgcacgagccactccaggttccagaagaatacctgaagccctacgacttcatacaagataagaatcggcaccactacgcaggcatggtgtcgctgatggatgaagcagtgggaaatgtcacggcagcacttaagtcgtcggggctttggaacaacactgtgtttatctttagcaccgataacggcggccaaactctggcaggtggtaacaattggcctctgcgcggcaggaaatggtccctttgggaaggaggggtgagaggcgtcggttttgttgcaagccctcttctcaaacaaaagggcgtgaaaaacagagaattgatacatatctcagattggcttcctacgctcgtgaagctcgcccgtggtcacaccaacggaactaaaccgcttgatggctttgatgtttggaaaacgatttcagaagggtcaccttctcctaggattgagcttctccataacatcgatccaaacttcgtggattcatcaccctgcccccggaactcaatggcgccagcaaaggacgattcctcattgcctgaatattccgcttttaacaccagcgttcatgcagccatccggcatgggaactggaaactgttgaccggctacccaggatgtggatactggttcccgcccccttcgcagtacaatgtgtcggagattccgtcctccgacccacccactaagaccctgtggctttttgatatagaccgggacccagaagagagacatgacctgtcgagagagtacccgcatattgtgaccaaacttctgtccaggctgcaattctaccataaacatagcgtgcccgtttacttccccgcacaagacccgcgctgtgatcctaaggcaaccggagtgtggggtccttggatg

SEQ ID NO: 7110 - DNA, 1599 bp, synthetic construct
  misc_feature 1..1599: note = source = /note="Description of Artificial Sequence: Synthetic coding sequence"
  source 1..1599: mol_type = other DNA
atggggcccagaggtgctgccagcctcccacgtggccctgggccacggcgcctcctcctccccgttgtcctccctcttctattgctgctactgttagctccacctggcagcggtgccggcgcctctcggcccccgcatctggtttttctgctcgctgatgatctgggatggaatgacgtcggctttcacggcagtcggattaggacaccacatctggacgctctggcagccgggggggtgctgctggacaattattacacacagcccttgtgcacgccatcacgctcccaactgctgaccggaaggtaccagattcgcaccggtctccagcaccaaatcatctggccatgccagccatcctgtgtgccgttggatgaaaagctgctgccacagctgcttaaagaggctggttatacgacgcacatggtcggaaaatggcatctaggcatgtatcgcaaagagtgcttaccaacccgccgcgggttcgacacatactttggctacctgctgggttcagaggactactattcccacgaacgatgtactctgatcgacgccctgaacgtcacccgctgtgccctggatttccgggatggcgaagaggtcgctactggatataagaacatgtattcaactaacatcttcacaaagagagctatcgcactgatcactaatcatccccccgagaaacctctgtttctgtatcttgccctgcagtccgtccatgaaccccttcaggtgcctgaggaatacctgaaaccatacgatttcatacaggacaagaatagacatcactacgcagggatggtgtcattaatggacgaagccgtgggcaacgtcactgcggcccttaagtcctccgggttgtggaataacacagtgttcatctttagtactgacaatggagggcagacactggctggcggaaataactggccgctgcgtggtcgaaagtggtctttatgggagggcggcgtgcgaggcgtaggctttgtggcgtctccccttttaaagcagaaaggcgttaagaacagggagcttattcatatctcagattggctccccacccttgtgaagctggctcgaggccatactaatgggacgaaacctttagacgggttcgacgtttggaagacaatctccgaaggtagtcccagccctagaatcgagctcctgcataacattgacccaaactttgtcgacagctcaccatgtccaaggaactctatggctccagctaaggatgactctagtctgccagaatattcagccttcaatacaagcgtgcatgccgcgatcaggcatggaaattggaagctcctgaccggttatccagggtgtgggtattggttcccccctccatctcaatataacgtttcagaaattccatcttcagatcccccaaccaagacgctctggctgttcgatattgaccgagatccagaggagagacacgatttgagccgggagtaccctcacattgtcaccaaactgctcagtcgattgcagttttatcataaacatagcgtacctgtgtacttccccgcccaggatcctcggtgtgatcccaaggctaccggagtttggggaccctggatg

SEQ ID NO: 7111 - DNA, 1599 bp, synthetic construct
  misc_feature 1..1599: note = source = /note="Description of Artificial Sequence: Synthetic coding sequence"
  source 1..1599: mol_type = other DNA
atgggccccagaggcgcagcaagcctgccccgtggtcccggccctagacgactgctcctgccggtcgtcctgcctttgcttctcctcctgcttctggcgcctcctggatccggagcaggtgcgtcaagacccccacacttggtgttccttctggctgacgatctggggtggaacgatgtgggatttcatggaagccggattagaaccccccatctcgatgcgctggcagctggaggtgtgctgctggacaattactacacccaacctctgtgtactccatctcgatcacagttgttgaccggcagataccagatacgcacgggacttcaacaccagataatctggccatgtcagccaagctgtgtgccccttgacgagaaacttttgccgcagctgcttaaggaggcggggtataccactcatatggttggaaagtggcacctggggatgtaccggaaggagtgtctccctactagaagaggatttgatacttactttgggtacctcctcgggtcagaggattactattcacatgagcggtgcaccttgattgacgcgcttaatgtgacgaggtgtgcactggacttcagagatggagaggaggtggctaccggctacaagaatatgtattcaactaacatctttaccaaaagagccattgcacttattaccaaccatccacctgaaaaaccactcttcctctatcttgcacttcaaagcgtccatgaacctcttcaagtccctgaagagtaccttaagccgtatgacttcatccaagacaagaaccggcatcattacgcagggatggtgtcgttgatggacgaagcagtcggaaatgtgaccgccgcgcttaagtcaagcggactttggaacaacaccgttttcatattctcgacggataatggtggtcaaactcttgcaggcggaaacaactggccactgagaggtagaaagtggtccctgtgggaaggaggcgtgaggggcgtggggttcgtcgcctcgccccttcttaaacagaagggagtcaagaatcgcgaacttattcacatctccgactggctccctaccctggtgaagctggcaagaggacacacgaacgggaccaagcctctggatggatttgatgtgtggaaaaccatctcggaaggtagtccaagtccccgcatcgagctccttcataacattgatcccaattttgtggatagctcaccatgtccccggaactccatggcacctgcaaaagacgattcaagcctcccagaatacagcgcatttaacacctcggtgcatgcagcgatccgacacggaaactggaaactgctgaccggataccccggatgcgggtactggtttccaccaccttcccagtacaacgtgtccgaaattccttcgtcggacccaccaactaaaaccctctggctctttgacatcgaccgtgatccagaagaaagacatgatctgtcacgcgaataccctcatattgtgaccaagctgctgtcgaggcttcaattctaccacaagcatagtgtgccagtgtactttcccgcacaagacccccgatgcgatcctaaggcgaccggtgtctggggaccttggatg

SEQ ID NO: 7112 - DNA, 1599 bp, synthetic construct
  misc_feature 1..1599: note = source = /note="Description of Artificial Sequence: Synthetic coding sequence"
  source 1..1599: mol_type = other DNA
atgggtccccgtggggcagcgtctctgccccgcggcccgggaccaaggcgcttactcctgcctgtcgtgcttccattactgctgctgctgctgttagcgccaccgggcagcggggcaggcgccagccgaccacctcacttggtgtttctgctggcggacgatctgggctggaatgatgtcggttttcatggctcacgcatccgcacgcctcatctggacgcgctggcggctggtggagtgctgttggataactactatactcaacctctgtgtaccccaagccgtagccagctgttgacgggtcgataccaaattcgaacaggactgcagcaccagattatttggccatgccaacccagctgtgttccactggacgagaagttgttaccgcagctgctgaaagaggcaggctataccactcatatggttggaaagtggcatctagggatgtaccgcaaggaatgcctaccgactcgccggggcttcgacacgtatttcggctatctgttaggaagtgaggactattattcccacgaacgctgcaccctgattgatgctctgaacgtgacgcgctgtgcattggatttccgcgacggtgaagaggttgctaccgggtataagaacatgtatagcactaacatcttcacgaaacgtgccattgcacttattacgaaccatccgcctgagaagcctctgttcctgtatctcgcgctgcagagcgtccatgagccactgcaagtaccagaagagtacctaaaaccgtacgatttcatccaggacaaaaaccgccatcactacgcggggatggtgagcttaatggatgaggcggttggtaacgtgaccgcggcgttgaagtcatccggtctctggaacaataccgtattcatctttagcactgacaacggcggccaaacactggcgggcggcaacaactggccgctacgcggacgcaagtggagcctgtgggagggcggagtgaggggtgttggtttcgtcgcaagccccctgctgaagcagaagggagtgaaaaacagagagctgattcacatctccgactggctgccgacgttggtgaaactggcgcgcggccatacaaacgggacgaaaccgctggatgggtttgacgtatggaaaaccattagcgaagggagcccaagcccgcgcatcgaactgctgcacaatatcgatccaaattttgtcgactcaagcccgtgccctcgcaactcgatggcccccgcaaaagacgattcttcactgccggagtactccgcatttaacacttccgtgcacgcggcaattcgccacggcaattggaagctgctgacgggttatccagggtgtggctactggttcccgccaccgagccagtataatgttagcgaaattcctagctcggatcctccaacgaaaaccctgtggctgttcgatattgaccgcgatccggaggaacgccacgatctgagcagggaatatccacacatagtgactaaattgctctcccggctgcaattctaccacaaacacagcgtgccggtttatttccctgcccaagatcctagatgtgacccgaaggcgaccggagtttggggtccgtggatg

SEQ ID NO: 7113 - DNA, 1599 bp, synthetic construct
  misc_feature 1..1599: note = source = /note="Description of Artificial Sequence: Synthetic coding sequence"
  source 1..1599: mol_type = other DNA
atgggtcctagaggggctgcgagcctgcctcgagggccaggaccccgacggctgctgctcccagttgtgctgcccctgttactcctcctcctattagcccctccgggatctggagccggcgcaagtaggcctcctcacttagtcttccttctggcggatgatctgggatggaacgacgtggggtttcacggctctcggatccggacgccacaccttgatgcgctcgcagccggtggcgttctcctagacaactattatacgcagccactgtgcactccatcaaggtcccaactgctgacaggcaggtaccaaattcgtacagggctgcagcatcagattatctggccatgccagccaagctgcgtcccactggacgaaaagctgctgccacagcttctgaaggaggcaggttacactacgcacatggtgggtaagtggcatctcgggatgtaccggaaagaatgtttgcccacccggcgtggttttgatacctacttcggatatctgctcggctccgaagattactactcacacgagcggtgcacactcatcgacgcgctgaacgttacaaggtgcgcgctggattttcgggacggagaggaggtcgccactgggtataagaacatgtatagtacaaacatcttcacaaaacgtgcgattgctctcatcactaaccacccacccgagaaacccctcttcttgtatctggccttacagtccgtgcacgaacctctgcaggtgcccgaggagtacttgaagccctacgattttatccaggataaaaatcgccatcactatgcaggtatggttagcctaatggacgaggcagtgggcaatgtgactgccgccctgaaatcatctggcttgtggaataatactgtgttcattttttccacagacaacggcggccagaccttggcgggagggaataattggcccctccgggggagaaagtggtcattatgggaagggggcgtgaggggcgtgggattcgtagcgtcgcccttacttaagcaaaaaggagtgaaaaatagagaacttatacacatttctgactggctgccaactctcgtcaagctggcgcggggccacacaaacgggaccaaaccattggacggttttgacgtgtggaagaccatttccgaggggtctcctagccctcgcatagaacttcttcacaacattgaccctaatttcgtggattcatccccctgcccgcgaaacagcatggcacccgccaaggacgacagttctttgcccgaatactccgcttttaatactagcgtccacgctgcaatcaggcatggaaattggaaattactgaccggttacccaggctgcggctactggtttccaccaccgtcccagtataacgttagcgaaatcccgtcctccgatccaccgacaaaaacactctggctgttcgacatcgatcgggacccagaagagcggcatgacctctctagagagtaccctcacattgtgactaagttgctgagccgactgcaattctatcacaaacatagtgtgccagtttactttccagcacaggacccccggtgtgaccctaaagccaccggagtgtggggcccgtggatg

SEQ ID NO: 7114 - DNA, 1599 bp, synthetic construct
  misc_feature 1..1599: note = source = /note="Description of Artificial Sequence: Synthetic coding sequence"
  source 1..1599: mol_type = other DNA
atgggcccaaggggcgctgctagtttgccacgagggcctgggccaagaaggctgctgctccctgtggtgttgccactcttgctccttctcctactcgccccgcctggctctggagccggtgcttcccgccctcctcatttagtcttcctactcgcagacgacctgggctggaacgatgtcggatttcatggatcaaggatccgcaccccacacctagacgcgctcgcagctgggggagtccttctcgataactattacacgcaacctctgtgcaccccctctagaagccagttgctaacgggacggtaccagatccggaccggccttcagcaccagattatttggccatgccagcctagctgtgtgcccctggatgagaagctcctgccacagctcctgaaggaagcaggatacaccacacacatggtcgggaaatggcacctgggcatgtaccggaaggagtgcctgcctaccaggcgtggctttgacacgtatttcggttacctgttggggtcggaagactactatagccatgaacgatgcacactgatagatgccctgaacgtgacacggtgtgccttggactttcgtgacggtgaggaggttgcaacggggtacaagaatatgtactccaccaacatctttacgaaaagagccattgctctcatcaccaaccatccaccggaaaaaccactcttcctgtacctggcactacagtccgtccatgaacctttgcaggtccctgaggagtatcttaagccatatgacttcatccaggataagaaccggcatcattacgcgggcatggtgtcccttatggacgaggctgtggggaacgtgacagctgctttgaagtcatctggtctgtggaataataccgtgttcatctttagtacggacaatggcggacagaccctggcagggggtaacaactggcctctgagaggtcgaaagtggtccttatgggaaggaggagttaggggagtaggatttgttgcttctcccctcctcaagcagaagggtgtgaagaatcgcgaactcatccacataagcgattggctgcctaccctggttaagttggctcgcggtcatactaacggaaccaaacctctggacgggttcgacgtttggaagacaatttcagagggctccccgagtccacggatcgagctgctgcataacatcgatcctaacttcgtggatagctctccttgccctaggaattccatggcgccggctaaggatgattcttctttacctgagtactctgcgtttaacaccagcgttcatgccgcgatccgccatggcaattggaaattgctgaccgggtacccaggctgtggatactggttccctcctcccagccagtataacgtgtccgagataccatccagcgatcccccgacaaaaacattgtggctgtttgatatagatagggatcccgaggagcgacatgatctgtccagagagtacccccatatcgtaaccaaactactgtcgagactgcagttctaccacaagcacagcgttcccgtatacttccctgcccaagacccacgatgcgatccaaaagcaaccggagtgtggggaccttggatg

SEQ ID NO: 7115 - DNA, 1599 bp, synthetic construct
  misc_feature 1..1599: note = source = /note="Description of Artificial Sequence: Synthetic coding sequence"
  source 1..1599: mol_type = other DNA
atgggcccaaggggagcagcatcactccctagaggtcccggaccacggcggctcctccttcctgtggtcttgccactgttgctgctcctgctgcttgcacctcctgggtcgggggccggtgcgtcaagaccccctcatttggtgttccttctggcggatgacttgggttggaacgacgtgggctttcatggctcgcgaattaggaccccacatttggacgcactcgcagcgggtggtgtcctcctggataactattacactcaaccactttgtaccccgagccgctcccaacttcttactggacggtaccaaatccgcaccggactccagcaccagatcatttggccatgccagccttcgtgtgtgccactggatgagaagctgctcccgcagctgctgaaggaggcaggatacaccacccacatggtgggaaagtggcatcttggtatgtacagaaaggaatgccttcctactaggagaggatttgatacctacttcggttaccttctcggttcggaagattactactcccatgagagatgcactctgattgacgcactgaacgtgacgcgatgtgcgcttgactttcgagacggcgaagaggttgccactggatacaagaacatgtacagtacgaatatctttaccaagcgtgcaatcgcactcattactaaccacccgcccgagaagccactttttctctacctggccctgcaaagcgtgcatgaaccactgcaagtgcctgaggaatacctgaaaccatacgatttcatccaagacaagaaccggcatcactacgcaggaatggtgagtctgatggacgaagccgttgggaatgtcaccgcagcacttaagtccagcggactttggaacaatactgtgtttatcttctccaccgacaacgggggtcagaccctcgcaggagggaacaattggcctctgcggggaagaaagtggtcgctctgggaaggaggggttcgcggagtgggtttcgtggcaagcccgcttcttaaacaaaagggtgtgaaaaatcgcgaactcatccatattagcgattggcttcccactcttgtcaaactggcacggggacataccaacggtacgaagccactcgatggtttcgatgtttggaaaacgatctcggaaggctccccctcgccgcggatcgagcttctccataacatcgacccgaattttgtggatagcagcccgtgtcctagaaactcaatggcgccagcgaaggatgattcatcccttcccgaatattccgccttcaatacgtccgtccacgcagcaattaggcatggaaactggaagctgcttaccggttatccgggatgcggatactggttccccccgccgtctcaatacaacgtgagcgagatcccatcatcagatcctcctactaagaccctgtggctttttgacatagatcgggaccctgaagaacggcatgacctgtcccgcgaatacccccatatcgtcaccaagctgctgtccaggctgcagttttaccacaaacatagcgtgcctgtctactttccagcgcaggatcccaggtgtgatcctaaagccaccggggtgtgggggccatggatg

SEQ ID NO: 7116 - DNA, 1599 bp, synthetic construct
  misc_feature 1..1599: note = source = /note="Description of Artificial Sequence: Synthetic coding sequence"
  source 1..1599: mol_type = other DNA
atgggtcctaggggagcagcaagtcttcctagaggtccaggcccgcgccgcttgttgctgccggtagtgctgccattgctgctgctcttgttgttggcaccccctggttccggtgctggcgcttcccgcccgccccacttggtgttcctgcttgccgacgacctcggctggaacgacgtaggttttcacggttcccgcatacgcaccccgcatctggacgctcttgcggccggcggcgtccttctggacaactactacactcagccactctgtaccccgagtagaagtcagctgctgaccggccgctatcaaattcgcactggcctgcagcaccaaatcatctggccatgtcaaccgtcttgtgtcccactggacgagaagctgcttcctcagctgttgaaggaagcgggatacaccacccatatggtaggtaagtggcatctgggaatgtatagaaaagagtgtctcccaacgagaaggggttttgacacttattttggctaccttctcggcagtgaggattactacagccacgagaggtgcacgctcattgatgcgctcaacgtgactaggtgtgcgctggatttccgcgacggcgaagaagtggccactggttacaagaatatgtattctacaaacatatttacaaaaagggcaattgccctgattacgaaccaccctcctgaaaagcccttgttcctctatctggctcttcagagcgtccacgaaccactgcaggtccctgaggagtatttgaagccctatgacttcatccaagacaaaaacagacaccactatgccggcatggtgtcccttatggacgaagcagtgggtaacgtcacggcggccctgaagagctctggtctgtggaacaacacagtcttcattttcagcactgacaacggaggccagaccttggcaggtggaaataactggcctctgagaggtcgcaaatggagtttgtgggagggtggcgtacgcggagtgggtttcgtcgcctcccccctgctgaagcagaagggtgtcaagaatagagagttgattcacataagtgattggttgcccaccctggtgaaactggcccgcggccacactaacggaaccaagcctctggatggcttcgacgtttggaaaacgatatcagagggtagccccagtccgcgcattgagctgctgcacaatattgacccgaactttgtagacagctccccctgtcccagaaattctatggcgcctgcaaaagatgattcctctctgcctgagtactccgcgttcaatacttcagtgcacgccgccattaggcatggaaactggaagttgctgaccggctacccaggatgcggatactggttccctccaccctcccagtataatgtatctgagatcccctccagcgacccgccaaccaaaactttgtggctctttgatattgacagagaccctgaagagcgccacgatctgagtagagagtacccacacatagtgactaaactgctgtcaagactccagttctaccataagcactccgtacccgtttactttcccgcgcaagacccacgctgcgaccctaaagctaccggtgtgtggggaccgtggatg

SEQ ID NO: 7117 - DNA, 1599 bp, synthetic construct
  misc_feature 1..1599: note = source = /note="Description of Artificial Sequence: Synthetic coding sequence"
  source 1..1599: mol_type = other DNA
atggggcctcggggagcagcaagtctgcctagggggcctggaccccggcgtctactgctccccgttgttctaccactgcttctgcttctgctcttagctccacctggaagtggtgctggcgcctctcgtccccctcacctagtcttcttattggccgacgaccttgggtggaatgacgtagggtttcatggaagtaggataagaaccccccacctggatgcattagccgcagggggcgtccttctcgacaactattacacccagcccctgtgtaccccatcacggagccagcttctgactggaaggtaccagattcgaaccggtctgcagcatcagatcatctggccctgccaaccatcttgcgtgccactggacgaaaaactcctgccgcagctcctgaaagaggcgggttacacaacacacatggttggaaagtggcatcttggcatgtatagaaaggagtgtctcccaacacgccggggatttgacacttacttcggttatctgctgggaagtgaggactactattcccacgaacggtgtacgctcatagacgccttgaacgtgacaagatgcgccttggacttccgagacggagaggaggtggccacaggttacaagaatatgtatagcacaaatatatttactaagcgggcaattgccctgataactaaccacccccccgaaaagccgctgtttctttatttggcgcttcagtccgtgcacgaaccgcttcaggtccccgaggaatacctaaagccttatgacttcattcaggataagaaccgacaccattatgctgggatggtgagtctgatggatgaagccgtcgggaatgttacggccgctttgaaatcctccggcctctggaataacacggtgttcattttctccaccgacaacggcgggcagacactcgctggaggcaataactggcctctaaggggccgtaagtggagtctttgggaggggggtgttaggggcgttggcttcgtggctagcccactcctaaaacagaagggggtaaagaatagagaattaattcacatctctgattggctccccactctggttaaacttgccaggggccacaccaacggcacaaagcctctggacggatttgatgtctggaagaccatcagtgagggcagtccttccccgcgcatcgaattgctgcataacattgatcccaactttgtagactcatccccctgcccccgcaatagtatggctccggcaaaagatgattcttcgctgccggaatattccgcttttaatacctctgttcatgctgccatccgccacgggaattggaaacttctgactggttatccaggatgtggctattggtttccccccccctcacagtacaacgtaagtgaaatcccttccagcgatccgcccactaagactttgtggctgttcgacattgaccgagatccagaagagcgccacgacctgagtagagaatacccacacatcgtcacaaaacttctgagccggctgcagttctaccacaaacactccgtgcccgtctacttccctgcacaagaccccaggtgcgaccccaaggccacaggcgtttggggaccatggatg

SEQ ID NO: 7118 - DNA, 1599 bp, synthetic construct
  misc_feature 1..1599: note = source = /note="Description of Artificial Sequence: Synthetic coding sequence"
  source 1..1599: mol_type = other DNA
atgggcccccgaggcgcagcaagcctgccccgcgggcctggaccccgccgactgctgctgcccgtagtcctgccactgctcctactcctattgctcgctccaccaggcagcggtgcgggggcttctagaccacctcacttagtctttctgctcgccgacgacctgggctggaatgatgtagggttccacggctctcgcatccggactccacaccttgatgcgcttgcagccggaggggtgctgctggataactactacacccagcccctgtgtacacccagcagatcccagttactcactggacggtatcaaatccgcactggtctgcagcaccaaatcatatggccttgccagccctcttgcgtacctctggacgagaagttgctaccccaactgttgaaagaagcagggtacacaactcacatggtaggcaagtggcatctaggaatgtatcggaaagagtgcctcccaacccgtcggggattcgacacatacttcggataccttctgggaagtgaagactactattcgcatgagcggtgcacactcatcgacgcattgaatgtgacaaggtgcgcgttagacttcagggatggtgaggaggtagcaacaggttacaagaatatgtattctaccaacatcttcaccaagcgagctatcgctctgattaccaaccaccctcccgagaagccattatttctttatctggcgctccagagcgtccatgagcccttgcaggttccggaggaatatctcaagccctatgacttcatccaggacaagaatagacaccattacgcaggtatggtatctctgatggacgaggccgtgggcaacgttacagccgcattgaaatcaagcgggctgtggaacaacaccgtcttcatattctctacggataacggcgggcagacactggcgggggggaataactggccactcagggggcggaagtggtccctttgggagggcggagttcggggtgtgggctttgtggctagccccctcctgaagcagaaaggcgttaagaaccgagagctcatccacatctctgattggctacccacattggtgaagctggctagaggccacaccaatgggactaagcccttggatggatttgatgtgtggaaaaccatctctgaagggtctccaagtccacggattgaactgctgcataatattgatcctaatttcgtcgactcttccccttgcccacgcaattcgatggcgccggctaaagacgacagttctctaccggagtacagtgcattcaacacttcagtccacgctgcaattcgtcatgggaattggaaactgctcactggatacccggggtgtgggtattggtttcctcccccctcccaatacaatgtgtcggaaatcccctcctccgatccgcccacgaagacactctggctgttcgacattgaccgggatcccgaggagaggcatgatctgagtcgcgaatatccccatatcgtaaccaagctcctgagccgcctgcagttctatcataaacatagcgtacctgtctattttcctgcacaggatcctagatgcgaccctaaggctaccggcgtgtgggggccatggatg

SEQ ID NO: 7119 - DNA, 1599 bp, synthetic construct
  misc_feature 1..1599: note = source = /note="Description of Artificial Sequence: Synthetic coding sequence"
  source 1..1599: mol_type = other DNA
atgggacccagaggagccgctagcctgcccagaggccccggaccccgcaggctgctgttgcctgtcgttctccccctgctgcttcttctgctcctggctccacccggtagcggtgctggagccagtcgtcctcctcacctggtgtttctgttggctgatgacttgggctggaacgacgttggcttccacggcagcaggattagaaccccccacctggatgcattggccgctggcggtgtcctgctggacaactattacacccagccactgtgtactcccagtcgcagccaacttctcaccggcagataccagattcgtaccggcctgcagcaccagatcatctggccatgccagccctcctgcgtccccctggacgaaaaactgttgccccagcttctgaaggaggctggctacacaactcatatggtgggaaagtggcatctgggaatgtaccgcaaagagtgcctgcctacccgccgcggtttcgatacatatttcggttacctcttgggttccgaggactactattcacatgaacgttgtacactgatcgatgctctcaatgttacccgttgcgctcttgactttcgcgacggcgaggaggtagctactggctataagaacatgtactctacaaatattttcaccaagagagccatcgctctcatcacaaaccacccccccgagaagccactgtttttgtaccttgccctccaatccgtgcacgagccccttcaggtgcccgaggagtatctcaaaccatacgatttcatccaggacaagaacagacaccattacgctggtatggtctctctgatggacgaggctgtgggtaacgtcactgccgccctgaagtccagtggattgtggaataatacagtattcatcttctctaccgataacggcggacagactcttgcaggtggtaacaactggcctctgcgcggtcgcaagtggtctctttgggaaggaggcgtcaggggagtgggatttgtagctagtcccttgctgaagcagaagggtgttaagaaccgcgaactcatccacatctctgattggcttcccacactggtcaagctcgctagaggacacaccaatggcaccaaaccactcgatggcttcgatgtctggaagaccatttctgagggatcaccttccccccgcatcgaattgctccacaacattgatcccaactttgttgattcttccccttgccctagaaactccatggctcctgctaaggacgatagttctctgcctgagtacagtgcctttaacaccagcgtccatgcagccatcaggcatggaaactggaaactcctgacaggctaccctggctgcggttactggtttccccccccatctcagtacaatgtctctgagatcccctccagcgatccacccaccaagaccctgtggctcttcgatattgacagggatcctgaggaaagacacgacctctccagagagtaccctcacatcgtgacaaagttgctctctcgtctccagttctaccacaagcattccgtaccagtttacttcccagctcaggatcctcgctgcgatccaaaagccactggagtctggggtccatggatg

SEQ ID NO: 7120 - DNA, 1599 bp, synthetic construct
  misc_feature 1..1599: note = source = /note="Description of Artificial Sequence: Synthetic coding sequence"
  source 1..1599: mol_type = other DNA
atgggccccagaggagctgcttcactccccagaggcccggggcctaggagactattactccctgttgtcctccctctcctcctcttgcttttgctggcccccccaggaagcggggctggagcctctcggccacctcacctagttttcctgcttgccgatgatctggggtggaacgacgtgggattccacgggtcacggatccgaacccctcatctggatgctttggctgccggcggcgtcttactcgataattactacactcagcctctgtgcacgccatccagaagccagctcctaactggccggtaccagattcgcactggcctgcaacaccagatcatttggccctgtcaaccctcctgtgttcctctggacgaaaaactgctcccgcagctgttaaaagaggctgggtacacaacccacatggtggggaagtggcatcttgggatgtaccgcaaagagtgcttgcccacacggagaggattcgacacctatttcgggtatctcttagggagcgaagactattacagccatgagcggtgcactctgatcgacgctcttaatgtgacccgatgtgccctcgatttccgagatggagaggaggtggctacagggtacaaaaatatgtacagtaccaatatctttactaagagggcgatcgccctgattaccaaccatccgcctgaaaaaccactatttctgtaccttgccctccaatccgttcatgaacccctgcaagtacccgaagagtacttgaagccttacgactttatacaagacaaaaacagacaccattacgccggcatggtttcgcttatggatgaagctgtgggcaatgttaccgccgctctaaagagtagtggactgtggaacaatactgtcttcattttcagtaccgacaacggaggacagacattggcgggcggtaataactggcccttgaggggtagaaagtggagtctgtgggaggggggagttagaggtgtcggattcgtagcaagtccactattgaaacagaagggggtgaagaatcgcgaactgattcatataagcgattggctccctacattggtaaagctggctcgcggccacacaaatggaactaaaccccttgatggcttcgacgtctggaagactattagtgaaggttcacccagcccgcgaattgagctgctccataacatcgacccaaatttcgtggattcttccccttgcccaaggaactcaatggcgcccgccaaggatgattccagcctgccggaatatagcgcatttaacacgtccgtccacgccgcgattcgccacggcaactggaaactgctgactgggtatcccggttgcgggtactggtttcctcctccttcccagtacaatgtttccgagataccctccagcgaccctcccaccaaaacactttggttgtttgacatcgatcgggatcccgaggagcgccatgacctgtcaagggagtatccccacattgtcactaagctgctcagcagacttcaattttaccataaacatagcgtaccagtttacttccctgcccaggaccccaggtgtgatcctaaggcaacgggcgtgtggggcccttggatg

SEQ ID NO: 7121 - DNA, 1599 bp, synthetic construct
  misc_feature 1..1599: note = source = /note="Description of Artificial Sequence: Synthetic coding sequence"
  source 1..1599: mol_type = other DNA
atgggtccgcgtggtgcggcgtcgttaccgcgtggtccgggtccgcgtcgattattactaccggttgttttaccgctattactactattattattagcgccgccgggttcgggtgcgggtgcgtcgcgtccgccgcatttagtatttctattagcggatgatttaggttggaatgatgtaggttttcatggttcgcgtatacgaacgccgcatttagatgcgctagcggcgggtggtgtattattagataattattatacgcaaccgttatgtacgccgtcgcgttcgcaactattaacgggtcgatatcaaatacgaacgggtttacaacatcaaataatatggccgtgtcaaccgtcgtgtgttccgttagatgaaaaattattaccgcaattattaaaagaagcgggttatacgacgcatatggtaggtaaatggcatctaggtatgtatcgaaaagaatgtctaccgacgcgtcgaggttttgatacgtattttggttatttactaggttcggaagattattattcgcatgaacgatgtacgctaatagatgcgttaaatgtaacgcgttgtgcgttagattttcgtgatggtgaagaagtagcgacgggttataaaaatatgtattcgacgaatatatttacgaaacgtgcgatagcgctaataacgaatcatccgccggaaaaaccgctatttttatatctagcgttacaatcggttcatgaaccgctacaagtaccggaagaatatttaaaaccgtatgattttatacaagataaaaatcgtcatcattatgcgggtatggtatcgttaatggatgaagcggtaggtaatgtaacggcggcgttaaaatcgtcgggtctatggaataatacggtatttatattttcgacggataatggtggtcaaacgctagcgggtggtaataattggccgctacgtggtcgtaaatggtcgttatgggaaggtggtgttcgtggtgtaggttttgtagcgtcgccgctactaaaacaaaaaggtgtaaaaaatcgtgaattaatacatatatcggattggctaccgacgctagttaaattagcgcgaggtcatacgaatggtacgaaaccgttagatggttttgatgtttggaaaacgatatcggaaggttcgccgtcgccgcgtatagaattattacataatatagatccgaattttgttgattcgtcgccgtgtccgcgaaattcgatggcgccggcgaaagatgattcgtcgttaccggaatattcggcgtttaatacgtcggtacatgcggcgatacgacatggtaattggaaattattaacgggttatccgggttgtggttattggtttccgccgccgtcgcaatataatgtatcggaaataccgtcgtcggatccgccgacgaaaacgctatggttatttgatatagatcgtgatccggaagaacgacatgatttatcgcgtgaatatccgcatatagttacgaaattattatcgcgactacaattttatcataaacattcggtaccggtatattttccggcgcaagatccgcgatgtgatccgaaagcgacgggtgtatggggtccgtggatg

SEQ ID NO: 7122 - DNA, 1599 bp, synthetic construct
  misc_feature 1..1599: note = source = /note="Description of Artificial Sequence: Synthetic coding sequence"
  source 1..1599: mol_type = other DNA
atgggcccgcgcggcgccgcctccctgccccgtggtcccgggccccgccgactgctgctgccggtggtcctgcccctgctgctgctcttactgcttgcccctcctggctccggcgccggcgcctctaggcctccccatctcgtgttcctgctggcggatgacctggggtggaacgacgtgggttttcacggctcgcggatacgaacgccccacctcgacgcgcttgccgcgggcggagtcctcctggataactactacacacagccactatgtactcccagccggagccaactgctgacaggacgataccagattagaacgggtctacaacaccagattatctggccctgtcagccatcttgcgtccccttggatgagaagctgctccctcagcttctcaaggaagccggatacaccacgcacatggtcggaaagtggcatctcggcatgtaccggaaggagtgcctcccgacgaggcgaggttttgatacgtacttcggatacctgctaggatccgaggattactactcgcacgagcggtgcacgctaatcgatgctctgaatgtgacccgctgcgcactggatttccgggatggtgaggaagtggcgaccggatacaagaatatgtactcaaccaacattttcaccaagcgggcaatagcactaatcactaatcatcctcctgaaaagccgctgtttctgtatttggcactgcagagcgtgcatgagcctttacaggtgccggaagagtacctcaagccgtatgatttcatccaggataagaaccggcaccattatgcaggaatggtctccctgatggacgaggccgtcggtaacgtcaccgccgcgttgaaatcgtcgggtttgtggaacaacacagtgtttattttctcaacggataacggcggccaaaccctggctggaggtaataactggcctctgagggggcgtaagtggagcctttgggagggaggcgtccgaggggtgggctttgtagcaagtcccctattgaagcagaagggagttaagaaccgcgagctgatccacatctcggattggctgccgaccttggttaagttggcaaggggccacaccaatggtacaaagcccctcgatggtttcgacgtatggaagacgatttcggagggcagcccaagccctaggattgagctgttgcacaacatcgatcctaactttgtcgattcgagtccctgcccccggaattcgatggctcccgctaaggacgattccagtcttcccgaatactcggcattcaacaccagtgtccacgccgctatccgccacggaaactggaaactgctgactggctatcccggctgcggttattggttcccgcctccctctcagtacaatgtctctgagattcccagctccgatccgcccactaaaaccttgtggttgtttgatattgatcgagatcccgaggagaggcatgatctcagccgcgagtacccgcatattgtgactaagctactgtcccgcctgcagttctaccacaagcattcggtgccagtctacttccctgcccaggacccgaggtgcgacccgaaggccacaggagtgtggggcccttggatg

SEQ ID NO: 7123 - DNA, 1599 bp, synthetic construct
  misc_feature 1..1599: note = source = /note="Description of Artificial Sequence: Synthetic coding sequence"
  source 1..1599: mol_type = other DNA
atgggcccgcggggagcggcgtctctcccgcgaggcccgggcccgcggcgcttgctgctgcctgtcgtgctcccgctcctccttctgctgcttctggcgccgccgggtagcggagcaggagcgtccagaccaccgcacttggtgttcctgctcgctgatgatctgggctggaacgatgtcgggtttcacggctcacggatccgcactccgcacctggacgctctggccgccggtggggtcctgctggataactactacactcaaccgctttgcaccccatcccgctcacaactcctcaccggaagataccaaatccggacgggactgcaacaccagatcatttggccgtgccagccttcatgcgtcccgctggacgaaaaacttctgccgcaactccttaaagaagccggatacaccactcacatggtgggcaagtggcacctcggcatgtaccgcaaggagtgcctccctacgcggcgcgggttcgacacctatttcggatacctgcttgggtcagaagattactactcccacgaacgttgcaccctgatcgatgccctcaatgtgacgcgttgcgccctggacttcagagacggggaagaggtggctactggatacaagaatatgtacagcactaatatctttaccaaaagagcgattgcgctgatcaccaatcatccgccggaaaagccactgtttctgtaccttgcactgcagtccgtgcacgaaccacttcaggtgccggaagagtatctcaagccgtacgatttcatccaagacaagaaccgccatcattatgctggaatggtgtccctgatggatgaggcggtgggaaacgttactgcagccctgaagtcgagcggactgtggaacaataccgtctttatcttcagcactgataacggtggacagacgttggccggcggcaacaattggccattgcgggggaggaagtggtccctctgggagggaggggtccgaggcgtgggcttcgtggcctcccccctgctgaagcagaagggtgtgaagaacagagaactgatccacatctcggactggttgcccaccctcgtcaagctggcgcgaggacataccaatggaaccaagccactggacggattcgacgtgtggaaaaccatctcagagggatcgccaagcccgaggattgagctcctccataacatcgaccctaactttgtggattcgtcaccttgcccgcgcaactcaatggcacccgctaaggatgactcaagcctcccagagtacagcgccttcaatacctcggtccacgccgcgatccgccacggtaactggaaactgctgacggggtacccaggttgtgggtattggtttcccccaccatctcagtacaacgtgtcggaaatcccttcctcagatcctcccaccaagaccctgtggctcttcgacatcgaccgtgaccccgaggaacgccatgacttgtcgcgcgaatacccacacattgtgaccaagctgctgtcgcgcctgcagttctatcacaaacattcggtgccagtttacttcccagcacaggacccacgctgcgacccgaaagctaccggagtgtggggtccttggatg

SEQ ID NO: 7124 - DNA, 1599 bp, synthetic construct
  misc_feature 1..1599: note = source = /note="Description of Artificial Sequence: Synthetic coding sequence"
  source 1..1599: mol_type = other DNA
atgggacccagaggagccgctagcctgccgcgcggccctggaccaaggcgtctgctgctcccagtggtgcttccgctgctgctcctgctgctgcttgcgccgccgggatccggtgcaggagcctcacgcccaccgcatcttgtttttctcctcgcagacgacctgggatggaacgatgtgggcttccacgggtcgcggatccggacccctcacctcgacgccctggccgccggaggagtgctcctggataactactacacccagccgctgtgtactccgtcaagatcccagctgctgactggccggtaccaaattaggaccggattgcagcatcaaatcatctggccgtgtcagccgtcgtgcgtgccgctggatgagaagctcttgccgcaacttctgaaagaggcaggatacactacccacatggtggggaagtggcatctcggcatgtaccgcaaagaatgcttgcccactagaaggggatttgacacctacttcggctatctgctcggttccgaggattactactcacacgagcggtgcacgttgattgatgctttgaatgtgactagatgcgcgctcgacttccgcgacggcgaagaggtggctactggatacaagaacatgtactcgaccaacattttcactaaacgcgcgatagcgctgatcacgaatcatccaccagaaaaaccacttttcctttacctggccctccaatccgtgcatgagccgctgcaggtgccagaagaatacctgaaaccctatgacttcatccaggataagaatcggcaccattacgccggaatggtgtccttgatggacgaggccgtcggtaatgtcactgcagcgctgaagtcatcggggctgtggaacaatactgtgttcatcttttcgactgacaatggaggacagaccctggccggaggtaacaactggccactccgcggaagaaagtggagcctctgggagggtggcgtgcggggtgtggggttcgtggcaagtccgttgctgaaacagaaaggagtcaagaatcgcgaactgatccatatctccgactggctgccgaccctggtgaagttggcccggggacacactaacggaaccaagcctctggacggatttgacgtgtggaaaacgatctcggagggatcgcctagcccgagaatcgaactgcttcataacatcgaccctaactttgtagactcgtccccctgcccgcgcaatagtatggcaccagccaaggatgactcatccctcccagaatactcagcgttcaacacttcggttcacgcagcgattcggcatggaaactggaagctcctcactggatacccgggttgcggctactggttccctccgccgtcccagtataacgtgtcggaaattccgagttcggacccaccgactaagactctgtggctgttcgacatcgaccgggacccagaagagcgccacgacttgagccgcgagtacccgcacatcgtgaccaagctgctgtctcggctccagttctatcacaagcactcagtgcctgtttacttcccggctcaggatccccgctgcgatccgaaggcgactggcgtctggggtccctggatg

SEQ ID NO: 7125 - DNA, 1599 bp, synthetic construct
  misc_feature 1..1599: note = source = /note="Description of Artificial Sequence: Synthetic coding sequence"
  source 1..1599: mol_type = other DNA
atggggccccggggagcggcgagcctgccaagaggcccaggacctcggcggctgctgcttccagtcgtgttgcctcttcttttgcttctccttcttgccccaccaggatcaggtgcaggtgcatcccgacctccgcacctcgtgtttcttctggcggatgatctcgggtggaatgacgtcggcttccacggctcgcgaatccggaccccccatctggatgcacttgcagcaggaggtgtcctgcttgataactactacacccaacctctgtgtactcctagtagatcccagcttctgactggcaggtaccaaatcagaaccggactgcaacaccaaatcatttggccctgtcagccgtcatgtgtgcctcttgacgagaaattgctgcctcaacttcttaaagaagccggctacactacgcatatggtggggaagtggcatctgggaatgtaccggaaggaatgcctgccgacccgtagaggttttgacacctactttggataccttttggggtcggaggactattactcgcatgaacgatgcaccctcatcgatgcacttaatgtgactagatgcgcacttgattttcgtgatggagaagaagtcgcaactggttacaagaacatgtacagcactaacattttcactaagcgagcaattgcccttattactaaccaccctcctgagaagccgcttttcctgtatcttgcgctgcagtccgtccatgagcctctccaagtgcctgaggagtaccttaaaccttacgactttatacaggacaagaaccgacatcattacgcaggtatggtgagccttatggatgaagcagtggggaatgtgactgcagcgctcaagtcaagcggcctttggaacaacacggtgttcatattctcgacggataatgggggccaaaccctggcaggggggaataactggccgctgagaggtagaaagtggtcgctttgggagggcggagtacggggtgtgggttttgtggcgtcacctttgctgaaacagaagggagtgaaaaaccgcgaacttatccatatttcagattggcttcccacgcttgttaagttggcacgcggccacaccaacgggacgaagccactggacggctttgatgtgtggaaaaccatctcggagggatccccttcgcccagaatagagcttctgcacaatattgaccctaactttgtcgattcatcgccctgtccgagaaacagcatggccccagcgaaggacgatagctcacttcctgaatactctgccttcaataccagcgtgcatgcagcaattaggcacggcaattggaagctgcttacgggttacccaggatgtggctactggttcccacctccttcgcaatacaacgtgtcagagattccaagcagcgatccgcctactaagaccctgtggctttttgatatcgaccgggacccagaagaacgccatgatctgtccagagaatacccacatattgtgactaagctcctttcgcggcttcagttttaccataagcattcagttccagtctacttccctgcacaggatccccgttgtgatccaaaggctaccggtgtgtggggaccctggatg

SEQ ID NO: 7126 - DNA, 1599 bp, synthetic construct
  misc_feature 1..1599: note = source = /note="Description of Artificial Sequence: Synthetic coding sequence"
  source 1..1599: mol_type = other DNA
atgggaccaaggggggcagcgtccctgccacgggggccggggccccgcagattactgctgcctgtggtgctacccctgctgctacttctgctgctggccccaccgggcagcggcgccggcgcaagtagacctccccacctagtgtttctgctagcagatgatctggggtggaacgacgtgggcttccacggctccagaatacgaaccccccacctggacgccctggctgcgggcggtgtgctcctagataactactacactcagcctctgtgcacaccttcccgaagccagctgctaacaggaagatatcagatacggaccgggctgcagcatcagatcatctggccttgccagccttcatgtgtacccttggacgagaaactcctgccgcagttgctgaaggaagcagggtacactacccacatggtaggaaagtggcacttggggatgtacaggaaggagtgcctgcctacaagacgggggtttgacacatatttcggctatttgttgggctctgaggactactattctcacgagcgctgcaccctcatcgacgccctgaacgtgaccagatgcgcccttgacttccgcgatggcgaagaagtggccacagggtataagaatatgtactccaccaatattttcacaaagcgggctatcgctctcattactaatcatccacctgaaaagccgctgtttctgtacctcgctctccagagcgtccatgagccactccaagtgcctgaagagtacctgaaaccatacgactttatacaggacaagaaccggcaccattacgcagggatggtttccctcatggacgaagccgtgggaaatgtgactgctgccttgaagtctagcggtctttggaacaacactgtcttcatcttctccacagataacggaggccaaaccctagctggaggtaacaactggcccctaagagggcgcaagtggtcattatgggaaggtggcgtgagaggagtcggttttgttgcaagccccctattaaaacagaaaggggtcaaaaatcgagaactgatccatatatcagattggcttcctaccctcgtcaaacttgcaagaggacatactaatggtacaaagccactggatggattcgacgtgtggaagacaatatctgagggctcaccctcaccaagaatcgagctgctccacaatattgatccaaacttcgtggatagttccccgtgcccacgtaattccatggcacctgccaaggacgatagtagtctcccagaatactccgcttttaacacctcggttcatgccgccatccggcatggaaattggaaacttctcaccggctaccccggatgtggctattggttcccaccccctagccagtacaacgtcagcgagattccttccagcgatcccccaacgaaaacactctggctcttcgacatcgatagagaccctgaggagaggcatgacctgagccgcgagtatcctcatatcgtaaccaagctgctcagtagactgcagttttaccacaaacactcagtgccagtatacttcccagctcaggatccccggtgcgaccccaaggccacgggtgtttggggtccatggatg

SEQ ID NO: 7127 - DNA, 1599 bp, synthetic construct
  misc_feature 1..1599: note = source = /note="Description of Artificial Sequence: Synthetic coding sequence"
  source 1..1599: mol_type = other DNA
atgggtccaaggggggccgcctcactgccgaggggcccaggccccagacgcctgctgctccctgtagtgctcccacttctgctgctgttactgctggcaccacccggctctggagccggtgcctcacgccctcctcacttggtgtttttgttggccgatgacttaggatggaacgacgtcgggtttcacggctcacggattaggaccccacacttggatgcactggctgcaggcggcgtgctgttagacaactattacacccagccgctttgcactcctagtcgctcacagctactgactgggcggtatcagattcggaccggtttacagcaccagattatctggccatgccagcctagctgtgttcctctggacgagaaactcctgccccaactgctcaaggaagctgggtacaccacacatatggttggaaagtggcatctcggtatgtaccgtaaagagtgtttgcccacacggcgagggttcgatacttacttcggatacctattgggctctgaggactattactcacacgagcgttgcaccctcatcgatgctttgaacgttactagatgtgccctcgacttccgggatggtgaggaggtcgccacaggctacaagaacatgtattcaaccaacatcttcaccaaaagagctatcgctttgattacaaaccacccccccgaaaagcccctgttcctttatttggctctgcagtctgtgcatgagccgctgcaggtgcctgaggaatatctgaagccttacgacttcatccaggacaagaataggcatcactacgcgggtatggtgtccctgatggacgaggcagtgggaaatgtgaccgcggcgctgaagtcaagtggcctttggaataatacggtgttcatcttcagcacagataacggtggccaaaccctggccgggggcaacaattggcccctcaggggacgcaagtggtccttatgggaggggggcgtgaggggggtgggctttgtggcctcccccctgcttaaacagaagggcgtcaagaaccgggagcttatacacatcagtgactggctcccaacattggtgaagttggcacgtggtcacacgaatggaactaaacccttggatggcttcgacgtgtggaaaacgatctccgagggaagtcccagtcccaggatcgagctgctccataatatcgaccccaactttgtagatagttccccgtgcccccgcaatagtatggcccccgctaaggatgattcatcactaccagagtactccgctttcaacaccagcgtccacgcggccatcaggcacggaaattggaaattgctgactggctatcccgggtgtggctactggtttccacctccatcacagtataatgtcagcgaaataccaagctccgatcctcccacaaagacactctggttgttcgatatcgacagggatccagaggaacggcatgacttaagtcgagagtatcctcacattgtcaccaaattgctttcccgccttcagttctatcataagcacagcgtgcccgtgtatttcccggctcaggatcctaggtgcgatccaaaagccacaggcgtatggggcccatggatg

SEQ ID NO: 7128 - DNA, 1599 bp, synthetic construct
  misc_feature 1..1599: note = source = /note="Description of Artificial Sequence: Synthetic coding sequence"
  source 1..1599: mol_type = other DNA
atgggtccccgcggggccgcaagcctccctcggggtcctggccctagacgtctgctgcttcctgtcgtgctgccactgctgctcctgctgctccttgcacccccaggaagcggtgcaggggcatccaggccgccccatttggtctttttgctggcagatgatctgggttggaacgatgtcggattccacgggtcccgcattcggaccccccatcttgatgcacttgcggccggaggcgtgcttctggacaattactacacccagccactgtgtactccctcgagaagccagcttctcacgggtcgataccagatccgaaccggtttgcagcatcagatcatctggccatgtcagccttcatgcgtgcctctggacgaaaagctgcttccccaacttcttaaagaggccggctacactactcatatggtcggtaagtggcatcttggcatgtaccgtaaagagtgccttccaactcgccggggctttgatacttacttcgggtaccttctcggttcagaggactactactcccatgagcgttgcactctgattgatgcacttaatgtcacccgttgtgccctggatttccgggatggtgaagaggtggccaccggatacaaaaacatgtattcgaccaacatcttcactaagcgcgcaattgccctgattactaatcacccaccagaaaagccactgtttctctacttggccctccaatcagtccatgaaccactgcaggttccggaagaatatcttaagccttacgactttatacaggataagaatagacatcactatgcaggaatggtgagcctgatggatgaagcagtcgggaatgtcaccgccgcattgaagagctcggggctctggaataacactgttttcattttcagtacggataacggaggacaaacgctggcaggcggaaacaactggcccctgcgcggccgtaagtggagcctgtgggagggaggcgtgcggggagtgggattcgtggcgtccccactgctgaagcagaagggagtgaagaaccgcgagctgattcacatttcggattggctgcccactctcgtcaagctcgcaaggggtcacaccaacggtaccaagccgctggatggatttgatgtgtggaaaaccataagcgagggaagcccttcgccccggatagaactgcttcataacattgatccaaactttgtggactcttccccctgtcctcgcaactccatggcccctgccaaggacgatagctccttgcctgaatactcagcctttaacacctccgtccatgccgcgatccggcatggtaactggaagctgcttaccggatacccaggttgtgggtactggttcccgccaccatcgcagtacaatgtgtcagaaattcctagctcagatcctccgaccaaaacgctgtggctctttgatattgacagggatccggaagagcgacatgacctgtccagggaataccctcatattgtcacgaaactcctctcacgcctccaattctatcacaaacactcggttccggtctacttccctgcacaagatcctagatgtgatccaaaagccactggagtctggggaccttggatg

SEQ ID NO: 7129 - DNA, 1599 bp, synthetic construct
  misc_feature 1..1599: note = source = /note="Description of Artificial Sequence: Synthetic coding sequence"
  source 1..1599: mol_type = other DNA
atgggacctagaggagcagcctcactgccccgcggaccggggccacgcagattgctgctcccagtcgtcctgccattgctccttttgttgctgctggctcctccgggatccggtgccggagctagccgaccgcctcatttggtgttcctgctggccgacgatctcggatggaatgacgtggggttccacggaagcagaatcagaacgccgcacctggacgccctggccgccggaggggtgctgctggacaactactacacccaacctctgtgcaccccctctcgatcccaactcctgaccggccggtaccaaatccggactggactccagcaccaaatcatctggccgtgtcaaccgtcttgtgtgccactggacgaaaagctgttgccccagctgctgaaggaagctgggtacactactcacatggttggaaagtggcacctgggaatgtacagaaaggagtgcctgccgacccggagggggtttgatacctactttggatatcttctggggagcgaggactattactcgcatgaacggtgcaccctgatcgatgcgctgaacgtgacccgatgcgcacttgacttcagagatggagaggaagtggcgactggatacaagaatatgtactcaaccaacatctttactaagcgggctatcgccttgatcaccaaccatccgcccgaaaagccgctcttcctgtacctggccctccaaagcgtgcacgaaccgctgcaggtgccggaggagtacctgaagccgtacgacttcatccaggacaagaaccgccatcactacgccgggatggttagcctgatggacgaagccgtcggcaacgtgaccgccgccctgaagtcgtccggactctggaataacaccgtctttatcttttcaactgacaatgggggacaaacccttgctggcggcaataactggcctctcaggggccggaagtggtcgctctgggagggtggagtacgcggggtgggattcgtggcgtccccgttgctcaaacagaagggcgttaagaaccgcgaactcatccacatctcggattggctgccgaccctggtgaagctggcacgcggccacactaatggaaccaagcccttggacggattcgacgtgtggaaaactatttcggagggatcgccatctccacgcattgagttgctccataacatagacccgaacttcgtggacagctcgccatgtccgcgcaattcgatggcgccagccaaagatgactcctcactccccgagtactccgcgttcaatacttcagtgcacgccgcgatccgccatggcaactggaaactgttgaccggctacccaggatgcggttactggttcccgccgccctcccagtataatgtgtcggaaatcccatcgtccgatccaccgaccaagacgttgtggctcttcgatatcgaccgcgaccctgaggaaagacacgacttgtcccgcgaatacccgcacattgtgacgaagctcctctcccgcctgcaattctatcacaagcactccgtgccggtgtacttcccagcccaggatccgagatgcgatcctaaggcgacgggagtgtgggggccatggatg

SEQ ID NO: 7130 - DNA, 1599 bp, synthetic construct
  misc_feature 1..1599: note = source = /note="Description of Artificial Sequence: Synthetic coding sequence"
  source 1..1599: mol_type = other DNA
atgggcccacggggggctgcctctctgccccgaggacctgggcccagacggctcctgttgccagtggtgttgcctctactgctcctcttactgttggcccctcccggatctggggctggggcctcccgaccccctcatctcgtgtttttgctggctgatgacttgggttggaacgacgtaggctttcatggaagccgaattcgaacacctcacttggacgcattggcagctggaggcgttttgctggataattattacacacagcctctttgcactccctccaggtcacagctcctcaccggacgatatcagatcaggaccggcctgcaacatcagatcatatggccttgccagccatcctgtgtcccgcttgatgagaagctgctgccgcagcttctgaaggaagctggatatactacacacatggtagggaaatggcatctcggaatgtatcgcaaagagtgtcttccgactagacggggtttcgacacttactttggatatcttctgggatcggaggattattacagtcatgagcggtgtacccttattgacgcactgaatgttactagatgcgccctggactttcgggacggcgaagaggttgccaccggctacaaaaacatgtactctacaaatatcttcacaaagcgcgccattgcgttaatcacgaaccacccacccgagaagcccctcttcttatatctggccctgcagtccgttcatgaacctcttcaggtgcccgaggaatacctgaaaccctatgactttattcaggataagaaccggcaccattatgccgggatggtgtccctgatggacgaagcagtggggaacgtgacagccgccctgaagtcctcaggcctgtggaacaacacagtatttatcttttctactgataacggcggacagacactggctggaggcaacaattggccactcagggggcgcaaatggtccctgtgggagggcggcgtgagaggtgtaggctttgttgccagccccctccttaagcagaaaggggtcaaaaatcgggaactcattcacatcagcgactggctgccaacacttgttaaactggccagaggccatacgaacggcacaaaaccgcttgatggattcgatgtctggaagacaatctccgagggctcaccgtcaccacggatcgaactcctccataatattgaccccaatttcgtggattccagcccttgcccgcgcaacagcatggctccagccaaagacgactccagcctgcccgaatattcagcttttaatacctccgttcacgccgccataagacatggtaactggaagctcctgaccggctaccctggctgtgggtattggtttccccccccttctcaatacaatgtgtctgagatcccttcctcagacccacctacaaagacactgtggttgttcgacattgatcgagacccagaggagcgtcacgacctgtctcgggagtatccgcatattgttacaaagttgctctctcgtctccaattttaccacaagcactcagtgcccgtctattttccggcccaagaccctaggtgtgatcccaaggccaccggcgtgtggggcccctggatg

SEQ ID NO: 7131 - DNA, 1599 bp, synthetic construct
  misc_feature 1..1599: note = source = /note="Description of Artificial Sequence: Synthetic coding sequence"
  source 1..1599: mol_type = other DNA
atgggcccaaggggagccgctagccttccaagaggtcctggacctagacgcctgctcctgcctgtcgtgttgccattgctgcttctgctcctcctggcccctccgggctccggagccggggccagccggccaccacacctcgtattcctgttggcggatgacctgggatggaatgatgtgggctttcacggaagcagaatcagaacccctcatctggacgccctcgcggcagggggcgttttgcttgataactattacacccaaccactgtgcactccgagccggtcccagctcctgacagggcgctaccagatcaggaccggcctgcaacatcagatcatctggccttgtcaaccatcctgcgtgcctctcgatgaaaaactgctcccacagcttttgaaggaggccggatataccacgcacatggtgggaaagtggcacctgggcatgtatcgaaaagagtgtttgcccactagaagaggttttgatacctattttggctatcttttgggcagcgaagactattattctcatgaacggtgcactttgattgatgccctcaatgtcactagatgcgctctcgactttcgcgacggtgaggaggtggcaacgggttacaaaaacatgtactcaacaaacatctttactaagagggcgatagctctcattactaaccacccacccgagaaacctctgtttttgtacctcgctttgcagtctgtgcacgaaccattgcaggttccagaggagtacctcaaaccttacgacttcatccaggataagaacaggcaccattatgcaggcatggtgtctctgatggatgaggctgtaggcaatgttactgcagcactgaagagttctggcctctggaacaatacagtgttcatattttccactgataatggcggccaaaccttagcgggaggcaacaactggccactgagaggccgaaaatggtccctttgggaggggggtgtgagaggagtgggattcgttgcgagccctttgctgaagcaaaaaggtgtcaagaacagagagcttattcatatcagcgactggttgccaacactggtgaagttggctagaggacacacaaacggaaccaaaccgctggatggcttcgacgtttggaaaaccatcagcgagggcagtcccagccctcgcattgagcttctgcataatatcgatcccaactttgtggatagttcgccctgtccccgtaacagcatggctccggccaaggatgactccagcctgcccgagtacagtgcttttaacacctccgtgcatgcagccataaggcatggaaactggaagctcttgacaggttatcctggctgcgggtattggttcccccctccgtctcagtacaacgtatcagaaataccgtctagtgaccctcccacaaagactctgtggttatttgatatcgatcgcgatcccgaggaacgacacgatttgtcgagagaatatccacacatcgtgaccaaattgctgtcacgtctgcaattttatcataaacattccgttccagtttactttcccgcccaagacccacgttgcgaccctaaggctacaggagtatggggaccctggatg

SEQ ID NO: 7132 - DNA, 1599 bp, synthetic construct
  misc_feature 1..1599: note = source = /note="Description of Artificial Sequence: Synthetic coding sequence"
  source 1..1599: mol_type = other DNA
atgggaccaagaggagccgcttctctccccagaggccctgggccaaggaggctccttctgcctgtggtcctgccattgctccttttgttgctccttgccccccccggcagtggggcgggagccagcagaccccctcatcttgtattcctgctcgccgacgatctggggtggaatgatgtgggcttccatggaagtagaataagaaccccccacctggacgctctagccgctggcggtgtgttgcttgataattactacacacaaccactatgtaccccctccaggtcccagctgcttactgggcgatatcagatacgtactggcctgcagcatcagatcatttggccttgccagccttcttgcgtaccactggacgagaaactgttgccacaacttttaaaggaagctgggtacaccacccacatggtcgggaagtggcatctgggtatgtatcgaaaagaatgtttgcctactcgaagagggtttgatacgtatttcgggtacttactcggatccgaggactactactcacatgagcggtgtacgcttatcgacgcactcaacgtgactaggtgcgctttagattttcgtgacggtgaggaggtcgcaaccggttacaaaaacatgtatagcacgaatatcttcacgaagcgggcgatcgctttgatcacaaaccacccccctgagaagccgctttttctgtacctggctttgcagagcgtgcacgagcccctccaggtgccagaagagtatcttaagccttacgattttatccaggacaagaataggcaccactatgcaggaatggtgtccttgatggatgaggccgtggggaacgttaccgctgccctcaaaagctccggattatggaacaatacagtcttcattttttctacagataacggaggccaaacactcgccggtggcaataattggcctctgagagggcggaaatggtcattatgggagggaggtgtccgtggcgttggatttgtcgcctctccgctgctcaagcagaagggtgtgaagaatcgggagctaatccatatttcagactggttacccacgctggttaagctggctcgtggccataccaacgggaccaagccactagacggctttgatgtttggaagacaatctcagaaggctctcccagccctagaatcgagctcctgcataacatcgatcccaactttgtggactcatcaccctgtccccgcaatagcatggcgccagctaaagacgacagttctctgccagaatacagtgcctttaacacatctgtgcatgctgccatcagacatggcaattggaaactgctcactggctatccaggctgcggctattggtttccgccaccctcccagtataacgtgtctgagattccctcatcagatcctcccactaagacattgtggctgttcgacatcgaccgagacccagaggagcgacatgacctcagtagggaatatcctcacatcgtgacgaaactcttgagcaggttgcagttctatcataaacatagcgtgcctgtgtacttccctgcccaggacccccgatgcgatcctaaggctacaggagtgtgggggccttggatg

SEQ ID NO: 7133 - DNA, 1599 bp, synthetic construct
  misc_feature 1..1599: note = source = /note="Description of Artificial Sequence: Synthetic coding sequence"
  source 1..1599: mol_type = other DNA
atgggcccgcgcggcgcggcctcgctgccacggggacccggacctcgccgactcttgctcccagtggtgctgcctctccttttgctgctcctcttggcgccgccaggctcaggagccggcgcctcccgcccgccgcacctggtgttcctccttgccgacgatctgggctggaacgacgtcggctttcacggatcgcggatccgcactcctcacctcgacgctttggcggctggaggagtgctgctggacaactactatacccagcctctgtgtacgccctcacggtcccagcttttgaccggtcgctatcagatccggaccggattgcagcatcagattatttggccgtgccaaccaagctgcgtcccgctggacgagaagctgctgccgcagcttctgaaagaagccggatacaccacccacatggttgggaagtggcatttgggtatgtacagaaaggaatgcctgccgactagacggggatttgatacctacttcgggtatctcctggggtccgaggactactactcccatgagcgctgcacccttatcgatgctctgaacgtcaccagatgcgccctcgatttccgcgatggagaggaggtggccaccgggtacaagaacatgtactccactaatatcttcactaagcgcgctatcgcgctgattaccaaccatccaccggagaagccgctcttcttgtaccttgcactgcaatcagtgcacgagccgctccaagtgccagaagaatacctgaagccatacgacttcatccaggataagaataggcatcattacgcaggaatggtgagcctcatggacgaggccgtgggtaatgtgacggcagcactcaagagcagcgggctttggaacaacacggtgttcatcttcagcactgacaacggtgggcagaccctcgcaggaggaaacaattggcctctgcgcggacggaaatggtcactgtgggaaggaggagtgcggggtgtgggattcgtcgcttcgccgctcctgaagcagaagggagtgaagaaccgggagctgatccatatctcggactggctgccgaccctcgtgaaacttgcgagaggccataccaacggcactaaacctctggacggattcgatgtctggaagaccatctcggaagggtccccatcaccccgcatcgagcttttgcataacatcgacccgaacttcgtggactcatccccgtgtcctcggaactccatggcccctgctaaggacgatagctccctgccagagtacagtgccttcaacacctcggtgcacgctgctatccggcatggcaattggaagctcctgaccggttatcctggctgcggatactggttcccaccgccatcacagtacaacgtgtcagaaatcccgtcgtccgatcctcctactaaaacgctttggctcttcgacatcgaccgcgacccggaagaacggcacgatctgtcgcgggaatacccgcatatcgtgaccaagctgctgtctcgcctccagttttaccataagcactccgtgccggtctacttcccggcgcaagacccgcggtgcgatccaaaagcaactggagtgtggggaccctggatg

SEQ ID NO: 7134 - DNA, 1599 bp, synthetic construct; identical to SEQ ID NO: 7110
  misc_feature 1..1599: note = source = /note="Description of Artificial Sequence: Synthetic coding sequence"
  source 1..1599: mol_type = other DNA

SEQ ID NO: 7135 - DNA, 1599 bp, synthetic construct
  misc_feature 1..1599: note = source = /note="Description of Artificial Sequence: Synthetic coding sequence"
  source 1..1599: mol_type = other DNA
atggggcctaggggggcggccagcctcccgcgcgggcctggaccacgcaggctgttgctcccagtagtgttgccactgcttttgttgttgttgctggcacccccagggtcaggggctggggcgagtcgcccgccccacctcgtgtttctcctcgcggacgatctagggtggaacgatgtggggtttcacgggagtaggatcaggaccccgcacttggacgctctggcagcaggtggagtccttctggacaattattacacacaacctctctgcaccccatcacgctcccaactgctgaccggtcgctaccagatccgcacgggcttgcagcaccagatcatttggccttgtcagccatcttgcgtgccactcgacgaaaagcttctcccccagttgctgaaggaagccgggtacactacgcatatggtgggaaaatggcacctgggtatgtacaggaaagaatgtttgcctacccgaagaggcttcgacacttactttggctacttattaggaagtgaagactactatagccacgaaagatgcactttgattgacgccctgaatgttacacggtgcgcactggatttccgcgacggagaggaggtcgcaacaggctataagaatatgtactctaccaacatctttacaaaacgcgcaattgcactcatcacaaaccaccctccggagaagcctctgttcctttatctggcacttcagtccgtccatgagccactccaggtgccagaagaatatctgaagccgtacgacttcatccaggataagaatcgacaccactacgctggtatggtctcgctcatggacgaagccgtcggaaacgtgacagccgctttgaaaagttcagggctgtggaataacacggtttttatcttttctaccgataatggaggccagacactcgctggtggcaacaattggcccctcagaggacgcaaatggagcctgtgggaaggcggtgttaggggcgttggtttcgtggcctcccccctgcttaagcaaaaaggggtgaagaatcgtgagctgattcatataagtgattggcttcccacactagttaaactggccagggggcataccaacgggactaagccacttgatggctttgatgtgtggaaaaccattagcgagggctccccgtccccgaggatagagctccttcacaatatagatcctaacttcgtggactcctccccatgccctcgcaatagtatggctcccgccaaggacgattcctctctgcccgagtattccgccttcaatacctcagttcacgccgcgatccgccatgggaattggaagttgctcaccggctaccccggctgtgggtactggttcccaccaccatcacagtataatgtgtccgagatcccttccagtgatccacctactaagaccctgtggctgttcgatatcgaccgggatccagaggagcggcacgatctttctagagaatatcctcacatcgtgaccaagctcttgtctcgtctccagttctaccacaagcacagtgttcctgtgtacttcccggcccaagatcctaggtgtgatccaaaggcgacaggcgtgtggggcccgtggatg

SEQ ID NO: 7136 - DNA, 1599 bp, synthetic construct
  misc_feature 1..1599: note = source = /note="Description of Artificial Sequence: Synthetic coding sequence"
  source 1..1599: mol_type = other DNA
atgggccctcgtggggctgcctctcttcctcgaggaccgggccccaggcgcttgctgctgcctgtggttctgcctctgctgcttctcctccttttagcaccacccggctccggagctggtgcctccaggccaccacatctggtttttttattggcagacgatctaggctggaacgacgtcggctttcacggcagtaggatacgaaccccacatctcgacgccttagctgctggtggagtgctgctggacaactactatactcagcccctctgcacacccagccgatctcaattgctcacaggccgttatcagataaggaccggcctgcagcaccagattatatggccctgccagccctcctgtgtcccacttgatgagaagttactgccccagctcctgaaggaggctggatatactactcacatggtgggcaagtggcatctaggcatgtatcggaaggagtgcctgccaacgcgccgagggttcgatacatacttcggttaccttcttgggtccgaggactattattctcacgagcgatgcactctgattgatgccttgaatgtcacacgatgcgcgcttgacttccgggacggcgaggaggttgccaccgggtacaagaatatgtattccaccaacatctttacgaaaagagcaatcgcccttatcaccaaccatccgcctgagaaacccctattcctttacctggccttacagtcagtgcatgaaccacttcaagtacccgaagagtatctgaagccttacgactttatacaggacaaaaaccgacatcactatgcaggtatggtcagtctgatggatgaggcagtggggaatgtgacagccgctcttaagtccagcgggctctggaataatacggtgttcatattctctaccgacaacggaggccagaccctcgccgggggcaacaactggccccttcgcggcagaaagtggtctctgtgggaggggggggtgcggggtgtcggattcgtcgcgtcccctctccttaaacaaaaaggcgttaagaatcgggaactcattcacatctccgactggctcccgactctggtgaaactggcccggggccatacaaatgggaccaagccgctcgacgggttcgacgtatggaaaaccatctctgaggggagtcctagtccacggattgaattactgcataacattgatcccaactttgtagatagcagtccttgcccaagaaactccatggcccccgccaaagatgatagttcgctacctgagtacagtgcattcaacacttccgttcatgccgccatccgacatgggaattggaaacttttgacagggtacccaggttgcggctattggtttcctccaccatctcagtataacgtttctgagattcccagctcagacccaccaaccaaaacactatggctgttcgacattgacagggatccagaggagcggcatgatctgtctcgcgagtatccccatatcgtgacgaagctgctcagcagattacaattttatcacaagcactcagtcccagtttacttcccagcccaagatccccggtgcgatcccaaagcaaccggcgtctgggggccatggatg

SEQ ID NO: 7137 - DNA, 1599 bp, synthetic construct
  misc_feature 1..1599: note = source = /note="Description of Artificial Sequence: Synthetic coding sequence"
  source 1..1599: mol_type = other DNA
atgggccctcgaggagcagcgtcacttcctaggggtcctggtccccgacgtctgttgctgcctgtggtgctgccactgctgttgcttttgctgcttgcgcccccgggatcaggggcaggagcatcccggcccccacaccttgtgttccttctcgccgatgaccttggctggaacgatgtgggatttcacggttcgagaattaggactccccacctcgatgcacttgccgcaggaggagtgcttctggacaactattacactcaaccactgtgtacgccaagcagatcccaactccttaccggcagataccagattagaactgggcttcaacatcagattatctggccctgccagccttcgtgcgtgccgctggatgagaagctgctgcctcaactgttgaaggaagcagggtacacgactcatatggtgggaaagtggcatctgggaatgtatagaaaagaatgtctgcctactagacggggcttcgatacgtacttcggataccttctgggaagcgaggattactactcccatgaacggtgtactctgattgatgcactgaatgtgaccagatgcgctcttgattttcgggatggagaagaggtggccactggatacaagaacatgtactcgactaacattttcaccaagagagcaatagccctgattactaaccatccccctgaaaagccgctgtttctgtaccttgccctgcaatccgtgcacgagccgctgcaggtgccagaggagtatctgaaaccttacgacttcatccaggacaaaaaccgtcatcactacgcaggcatggtttcgctgatggatgaagccgtcggaaatgtgactgcagcactgaaaagctcgggcctctggaataacactgtgttcatattctcaaccgataatgggggccaaaccctggcaggaggtaacaattggccacttcgggggaggaagtggtcgctgtgggaagggggtgttagaggagtgggtttcgtggcatcgccattgctgaagcaaaagggcgtgaagaaccgcgagctgatccatatcagcgactggcttccaacgctggtgaagttggccagggggcataccaacggcacgaagcctttggacgggtttgatgtgtggaaaaccatctcggaaggttccccttctcctcggatcgagctgcttcataacatagaccctaactttgtggattcatcaccctgtccaagaaacagcatggcccctgcaaaagatgatagcagcctgccggagtacagcgcgttcaacacctctgtccatgcggccattcgccacggaaactggaagctgcttaccggatacccaggttgtggatactggtttcctccaccttcacaatacaacgtgtcagaaattccatcatcggatccgcctactaagactctctggctttttgatatcgatcgcgacccagaagagcgccatgatctgtcaagagaatacccccatattgtgacgaagctcctctcccggctgcagttctaccacaagcattccgtgcctgtgtactttcctgcacaggatccaagatgtgaccccaaggcaaccggagtgtggggaccatggatg

SEQ ID NO: 7138 - DNA, 939 bp, synthetic construct
  misc_feature 1..939: note = source = /note="Description of Artificial Sequence: Synthetic coding sequence"
  source 1..939: mol_type = other DNA
atgacttcgtgccatatcgctgaggaacatatccaaaaagtggccatcttcggcggaacgcatggaaacgaacttaccggcgtgtttctcgtgaagcactggctggaaaatggagcagaaatccagcgcactggattggaggttaagccattcatcaccaacccacgggccgtgaagaagtgtacccggtacatcgattgcgatctcaataggatctttgacctggagaacctcggaaagaagatgtcagaagatctcccatatgaagtccgccgcgcgcaagaaatcaaccacctgttcgggccgaaggattccgaggattcctacgacatcatcttcgacctgcataataccactagcaacatgggatgtaccctgattctcgaggactcgcggaataacttcctgatccaaatgttccactacattaagacttcgctggccccgttgccgtgctacgtgtacttgattgagcacccctcactcaagtacgcgaccacgagatccatcgccaaatacccggtcggaatcgaagtcggaccgcagcctcagggagtccttcgagcggacatcctggaccagatgaggaagatgatcaagcacgcactggacttcatccatcatttcaatgaaggcaaggaatttccgccttgcgccattgaagtgtacaagatcatagagaaagtggattatccgcgcgatgagaacggggagattgcggcaatcatccacccaaatcttcaggaccaggactggaagccgctgcaccccggcgaccccatgtttctgactctggatggtaaaaccatccctctcgggggtgactgcactgtgtacccagtgttcgtcaacgaggctgcttactacgaaaagaaggaagcattcgccaaaaccaccaaactcactctgaacgccaaaagcatcagatgttgcctgcac

SEQ ID NO: 7139 - DNA, 939 bp, synthetic construct
  misc_feature 1..939: note = source = /note="Description of Artificial Sequence: Synthetic coding sequence"
  source 1..939: mol_type = other DNA
atgacttcgtgtcatattgcggaagagcatattcagaaggtggctatctttggaggaactcacggcaacgagctgactggagtgtttctggtgaagcattggttggaaaacggtgcagaaattcaaagaactgggctggaagtgaagccattcattactaatcctagagcagtgaagaagtgtacccgttacattgattgtgatctcaaccgcatttttgacctcgaaaaccttggaaagaagatgtccgaggatctgccgtacgaagtcagacgggcccaggagattaatcatctgtttggccctaaagactcggaagattcgtacgatatcatttttgatcttcataacaccacctcgaacatggggtgtacccttattctggaggactcgagaaacaacttccttattcagatgttccattacattaagacctcactggcgcctttgccatgctacgtctatctcatcgaacatccaagcctgaaatatgcaaccactagatcgatagcaaaataccctgtgggtatagaagtgggacctcaaccacaaggagtgttgcgggccgatatcctggatcaaatgagaaagatgattaagcacgcactggatttcatacaccactttaatgagggaaaagaatttcccccttgtgcgatcgaagtgtacaaaatcatcgaaaaagtcgattaccctagggatgagaacggggaaattgccgcaataatccatccaaatctgcaagatcaggattggaaacccctgcacccaggcgatcccatgtttcttacccttgatggtaagacgattcctctgggaggagattgtaccgtgtaccccgtgttcgtgaatgaggcggcctactacgaaaagaaggaggcatttgcaaaaaccactaagctgaccctgaacgcaaagtccatccgttgctgtctccat

SEQ ID NO: 7140 - DNA, 939 bp, synthetic construct
  misc_feature 1..939: note = source = /note="Description of Artificial Sequence: Synthetic coding sequence"
  source 1..939: mol_type = other DNA
atgactagctgccacatcgccgaagaacacattcagaaggtggccatcttcggaggtacgcacggcaacgaactcactggcgtgttccttgtgaagcactggttggaaaacggtgcggagatccagcggaccggcctcgaggtcaaaccgtttatcaccaacccacgcgccgtgaaaaagtgtactcgctacatcgactgcgacctgaatagaatctttgacctggaaaatcttggaaagaaaatgtcggaggacttgccgtacgaggtccgccgggcccaggaaatcaaccacttgttcggcccgaaggactccgaagattcgtacgacatcatattcgacctgcataataccacttcgaacatgggatgcactcttatccttgaggactcccgcaataactttctcatccaaatgttccactacatcaagaccagcctggccccgctgccatgctacgtgtatctgatcgagcatccgtccctcaagtacgccactacccggtcaatcgcaaagtacccggtgggaatcgaggtgggcccgcagccacagggagtgctgcgcgcagacatcctggaccagatgagaaaaatgattaaacatgcactcgactttatccaccatttcaacgaaggaaaggagttccccccatgcgccattgaggtgtataagatcatcgagaaggtggattaccctagagacgaaaatggcgaaatcgcagctatcatccacccgaatctgcaggatcaggattggaaacctctccaccctggtgatcctatgttcctgacgctcgacggaaagacgatcccccttggaggtgactgtaccgtgtacccggtgttcgtgaatgaagctgcctattatgagaagaaggaggccttcgcaaagaccacgaagctcactctgaatgcaaaatcaattcggtgctgcctgcat

SEQ ID NO: 7141 - DNA, 939 bp, synthetic construct
  misc_feature 1..939: note = source = /note="Description of Artificial Sequence: Synthetic coding sequence"
  source 1..939: mol_type = other DNA
atgacctcctgtcacatagccgaggagcacatacagaaggttgctatcttcggtgggacgcatggtaatgagttaaccggagtgttcctggtgaaacactggctagagaatggagctgagatccaacgaacaggcctggaagttaagccttttatcaccaaccctagggccgtcaagaagtgtaccaggtatatcgactgtgatctgaacaggatttttgatctcgagaatctaggcaagaagatgtccgaagacctaccgtatgaagtcagaagagcccaagaaattaaccatctcttcgggcccaaagacagcgaagattcttacgatatcatttttgacctgcataacacaacttcaaacatgggatgcacactcatcctcgaggattctcggaataacttcttaatccagatgtttcactacataaagacctctttggcaccactcccctgctacgtttaccttattgaacacccctctctgaagtacgccaccacccgaagtatcgctaaataccccgtaggcatcgaggtgggcccacaacctcagggcgtactgagggctgacatcctggaccaaatgaggaagatgattaagcacgccctcgatttcattcatcacttcaatgaggggaaggagttccccccgtgcgcaatagaggtatacaagatcatcgagaaagtggattacccaagggacgagaatggcgaaattgccgctatcatccacccaaacctgcaagaccaagattggaagcccctacaccccggggaccccatgttcctcaccctagatgggaaaacaatcccgttgggcggtgactgtacagtttatcccgtatttgtgaatgaggccgcatattacgaaaagaaagaagcattcgctaagacaacgaagctgactctcaatgccaagtccattaggtgttgtctgcac

SEQ ID NO: 7142 - DNA, 939 bp, synthetic construct
  misc_feature 1..939: note = source = /note="Description of Artificial Sequence: Synthetic coding sequence"
  source 1..939: mol_type = other DNA
atgacttcgtgccatattgctgaagagcatatccagaaagttgctatcttcggaggcactcatggtaacgaactgaccggtgtgttcctcgtcaagcactggctggaaaacggagccgagatacagcgcactggactggaagtgaagcctttcataactaacccaagggcggtgaaaaagtgtacccggtacatcgactgcgacctgaaccggattttcgatcttgagaatctgggcaagaagatgtctgaagatttgccatacgaggtcaggcgtgcccaggagatcaaccacttgttcggccctaaagacagcgaagattcctacgacattatctttgacctccacaataccacctcgaacatgggatgcaccctgattttggaagattcccgcaacaacttcctgatccaaatgttccactatatcaagacctccctcgccccgcttccgtgttacgtgtacctgatcgaacatccgtcactcaaatacgcgactacgaggtcgatcgctaagtacccagtgggtatcgaggtgggaccacaaccacagggagtgctgcgcgcggatatccttgatcagatgcgaaaaatgatcaagcacgcgctcgactttatccatcacttcaatgagggaaaagaattccctccgtgtgccatcgaggtgtacaagatcattgagaaggtcgactacccgcgggacgagaacggggaaattgcagcaatcatccatcctaatctgcaagatcaggactggaagcccctgcacccgggggatccgatgttcctgactctcgacggaaaaaccataccactcgggggcgattgcactgtgtacccggtctttgtcaacgaggccgcatattacgaaaagaaggaagcctttgctaagaccactaagttgacgctgaatgccaagtccattcgctgctgcctgcac

SEQ ID NO: 7143 - DNA, 939 bp, synthetic construct
  misc_feature 1..939: note = source = /note="Description of Artificial Sequence: Synthetic coding sequence"
  source 1..939: mol_type = other DNA
atgacctcatgccacatagccgaggaacatattcagaaggtggcaattttcggtgggactcacggcaatgaactcacgggagtattcttagtgaaacactggctggagaatggcgccgaaatccaacggacgggattggaggttaagccattcataactaacccacgtgcggtgaagaagtgtacacgctatatcgactgtgaccttaaccggatattcgacctggaaaatctcggcaagaagatgagtgaggatctgccttacgaagtgcggcgggctcaggaaattaatcatctgtttggccccaaagacagcgaagattcctacgatattatattcgatctccacaacaccacaagtaacatgggatgtacactgattctagaggacagcagaaataatttcctgattcagatgttccattacatcaaaacatccttagctccgcttccctgctatgtctacttgatcgagcacccctccctcaaatatgcaacaacccgctcaattgccaagtacccagtaggaattgaggtgggtccccaaccccagggggtcctgcgggcagacattctggaccagatgcggaaaatgattaaacatgcactggatttcatccaccacttcaatgagggaaaagagtttcccccttgcgcgatcgaggtttacaagatcattgagaaagtggattacccccgggatgagaatggtgaaattgcggcgatcatccaccccaatctccaggatcaggattggaaacctctccaccccggtgacccaatgttcttaactctggacggaaagactatccccctaggaggcgattgcaccgtctatcccgtgtttgtcaacgaagcggcgtattatgagaagaaagaagcatttgccaagaccaccaaactgaccttgaatgcgaagagcatccgatgttgtttgcac

SEQ ID NO: 7144 - DNA, 939 bp, synthetic construct
  misc_feature 1..939: note = source = /note="Description of Artificial Sequence: Synthetic coding sequence"
  source 1..939: mol_type = other DNA
atgaccagctgtcatattgcggaggaacatattcaaaaggtcgcaattttcggaggaacgcacggaaacgaacttactggtgtgttcctggtcaagcactggttggagaatggagcggagatacagaggacgggtctggaggtgaagccgttcattactaaccctcgagcagttaagaagtgcacgcgctacatcgattgcgatttgaatcggattttcgacctggagaatctgggtaaaaagatgtcagaagatctcccgtacgaagtgcgcagggcacaggagataaaccatctgtttggtcctaaggactcagaggacagctacgatatcatctttgatctgcataataccacctccaacatgggctgtactctcatcttggaggacagcagaaacaatttcctgattcaaatgtttcattacatcaagacctcgctggcgccgcttccatgttacgtgtaccttattgaacacccttcgctcaaatacgcaaccacccgctccatagcgaaataccctgtgggaatagaagtcggaccccaaccccagggagtgcttcgggcagatattctggatcagatgaggaagatgattaaacacgcgctcgactttattcaccatttcaatgaaggcaaagagtttccgccctgcgccattgaagtctacaagatcattgagaaggtggactacccacgcgatgaaaacggagagattgcagcaatcatccatcctaatctgcaagaccaagactggaagcctttgcatcccggtgatcctatgtttcttactttggacggaaagaccatccctctcggaggcgattgtacggtgtatcccgtttttgtgaacgaagcagcatactacgaaaagaaggaagcgtttgccaagactaccaagttgactcttaacgcaaaatcgataagatgttgtctgcat

SEQ ID NO: 7145 - DNA, 939 bp, synthetic construct
  misc_feature 1..939: note = source = /note="Description of Artificial Sequence: Synthetic coding sequence"
  source 1..939: mol_type = other DNA
atgacctcctgccacatcgccgaagaacacattcagaaagtggcaatctttggcggtactcatgggaacgagcttaccggagtttttcttgtgaaacactggctcgaaaatggagcagaaatacaaagaacgggtctggaggtgaagccgttcataacgaatcctagagctgtcaagaagtgcactcggtacatagactgtgatctcaacaggatttttgatctggaaaaccttggaaagaagatgtccgaggacctgccgtacgaggtgcggcgggcccaggagattaatcatctttttggacccaaggacagcgaagattcctacgacatcatctttgatcttcataatactacctcaaacatggggtgcacccttattctggaagattcgcggaacaactttttgattcaaatgttccattacatcaaaactagccttgccccactgccctgttacgtctacttgattgaacatccatcgctgaagtacgccacgacccgctctattgctaaataccctgtcggaattgaggtgggaccccagccacaaggggtgttgagggctgatatacttgaccaaatgcgaaagatgatcaagcacgcactggatttcatacatcacttcaacgaaggaaaggagtttcctccctgtgcgatcgaggtgtataagattattgaaaaggtcgattacccaagagatgaaaacggtgaaattgccgctatcatccacccaaatctgcaagaccaggattggaaaccactgcatcctggcgatccgatgttcttgactcttgatggtaagactattccacttgggggcgactgtaccgtctaccctgtgtttgtcaatgaggctgcgtactatgagaaaaaagaagcgtttgcaaagaccaccaaattgactctgaacgccaagagcatccgctgctgtctgcat

SEQ ID NO: 7146 - DNA, 939 bp, synthetic construct
  misc_feature 1..939: note = source = /note="Description of Artificial Sequence: Synthetic coding sequence"
  source 1..939: mol_type = other DNA
atgaccagctgtcacattgctgaggagcacatccagaaggtggcgatctttggggggacccacgggaatgaacttaccggtgtattcctggttaaacactggctcgagaacggagccgagattcagcggacaggactggaagtcaaacccttcatcacaaacccaagagcagttaagaaatgtactagatatattgattgcgacctcaataggatatttgacctcgaaaacctgggaaagaaaatgtctgaggacctgccctacgaggtgaggcgggcccaggagatcaaccacctcttcggcccaaaggactctgaggattcctacgatatcatctttgacctgcataacacgactagcaacatgggctgcacccttatcctggaggacagcaggaataactttctgatccagatgttccactacataaagacgagcttggccccactcccttgctacgtctatctgatcgagcacccctcattgaagtatgccactacacgcagcatagctaagtatcctgtggggattgaggtgggtccacagccccaaggagtgcttagagctgacatcctggaccagatgcggaagatgatcaagcacgccctcgacttcattcatcactttaacgaaggtaaagagtttcctccctgcgctattgaggtatacaagatcattgaaaaagtggattatccccgggatgagaatggcgagattgctgccatcatccaccccaatctccaggaccaggactggaagcctctgcatccgggagaccccatgtttttgaccctggatggcaaaacgataccgttgggaggggattgtacagtttaccccgtcttcgtgaatgaagctgcttactatgagaaaaaagaggccttcgctaaaactacgaagcttaccctcaatgccaagagcatccggtgttgccttcac

SEQ ID NO: 7147 - DNA, 939 bp, synthetic construct
  misc_feature 1..939: note = source = /note="Description of Artificial Sequence: Synthetic coding sequence"
  source 1..939: mol_type = other DNA
atgaccagttgccacatcgccgaagagcatattcagaaggtggccattttcggaggcactcacggcaacgagttgacaggcgtgttcctggtgaagcattggttggaaaacggggcagaaatccagcgaactgggcttgaagtaaaacccttcatcacaaatcccagagccgtgaagaagtgtacccgctacattgactgcgacctcaaccggatttttgatttagaaaacctcggtaagaagatgtccgaggacctcccatacgaggtgcggcgagcccaggaaatcaaccatttgtttgggcccaaagacagcgaggatagctacgatatcatcttcgatttacataataccacaagcaacatgggctgcactctcattctggaagacagtaggaataatttcctgatccagatgtttcattacattaaaacgtccctcgcacccctcccgtgttatgtctatttaatcgagcatccgagcctgaaatacgcaaccacacgttccatagccaagtaccccgtgggaatagaggttgggccacagcctcagggcgttctgagggcggacatactcgaccaaatgagaaaaatgataaaacatgcattggatttcatccaccactttaacgagggcaaagaatttccaccttgcgctatcgaggtctacaaaataatcgagaaggtcgactatcccagggatgagaatggcgagattgctgctatcatccatcccaatcttcaggaccaggattggaagcctctccatcctggcgaccctatgttcctaacactggacggtaaaacgatcccccttgggggggattgtaccgtgtacccggtctttgtgaacgaagcggcctattatgagaaaaaggaggcctttgcaaaaaccaccaaacttactttgaatgccaagtccattcgttgctgtttgcat

SEQ ID NO: 7148 - DNA, 939 bp, synthetic construct
  misc_feature 1..939: note = source = /note="Description of Artificial Sequence: Synthetic coding sequence"
  source 1..939: mol_type = other DNA
atgacaagctgccacatcgccgaagagcacatacagaaggtggctatattcgggggcactcacggcaacgagctgaccggggtgtttctcgtaaaacactggctggagaacggggccgagattcaaaggacagggctagaagttaagccctttatcaccaatccgagggccgtgaagaagtgcacccgctacattgattgcgatctgaaccggatatttgatctggaaaatctgggaaagaaaatgtcagaagacctaccttatgaagttcgaagagcccaggagattaaccatctcttcggccctaaggattctgaggactcgtatgacatcatcttcgatctgcataacaccacttcaaatatgggctgcaccctgattcttgaagactcccgcaacaatttcctgattcagatgtttcattatattaaaacgtctctggccccattgccctgttacgtctatttgattgagcatccatctctcaagtacgcgactacccgctccatcgcgaagtacccagtgggcatagaggtggggccccagccacagggcgtcctgcgggcagatatactcgaccagatgcgaaagatgatcaagcacgcacttgacttcatccaccactttaatgagggcaaagaattccccccatgcgctatcgaggtatacaagataatcgagaaggtggattatcctcgggacgagaatggcgaaatcgcagctatcatccatcccaatttacaggaccaggattggaagcccctgcaccctggagatcccatgttcctgactctggacgggaaaacgattcccctcgggggtgattgtaccgtatatcctgtgttcgtcaacgaagctgcctactacgagaaaaaggaggcgttcgccaaaaccacaaagctgaccctgaatgccaagagtatccgatgctgcctccac

SEQ ID NO: 7149 - DNA, 939 bp, synthetic construct
  misc_feature 1..939: note = source = /note="Description of Artificial Sequence: Synthetic coding sequence"
  source 1..939: mol_type = other DNA
atgaccagttgtcacatcgctgaagagcacatccaaaaggttgctattttcggcggaacccacgggaacgagctcaccggagtcttcctggttaaacactggctcgaaaacggagctgagatccaaaggacgggtctcgaagtgaaaccttttatcaccaatcctcgcgccgttaagaagtgtactcggtacatcgattgtgatctaaaccgcattttcgacctggagaaccttgggaagaagatgtccgaagacctgccgtacgaagtgcggcgggcccaggagatcaaccatctgttcggacccaaagatagtgaggactcatatgatatcatcttcgatctgcacaataccacctccaatatgggctgcaccttgatactcgaggattcacgcaacaatttcctgatccagatgtttcactacattaagacttccctggcgccactgccttgctatgtctatcttattgaacacccaagcctcaaatatgcgactacgcgcagcatcgcgaaatatccggttggaatcgaagtggggcctcagccacaaggcgttcttagagcagatatcctggaccaaatgaggaaaatgattaaacatgctctggatttcatacaccacttcaatgaggggaaggaatttcccccttgtgcaattgaagtttacaagatcattgagaaggttgattatcctcgcgatgaaaatggagaaattgcagctatcattcatcccaatctgcaggaccaagactggaaaccactacaccctggggatccaatgttccttacccttgatgggaaaaccattccacttgggggagattgtaccgtttaccccgtgtttgtgaatgaggctgcctactatgagaaaaaggaggccttcgccaaaaccaccaagctcactctgaacgcaaagagcatacggtgctgtctccat

SEQ ID NO: 7150 - DNA, 939 bp, synthetic construct
  misc_feature 1..939: note = source = /note="Description of Artificial Sequence: Synthetic coding sequence"
  source 1..939: mol_type = other DNA
atgacctcctgccatattgcggaggaacatattcaaaaggtcgcgatttttggagggacccacggaaacgaactcactggcgtctttcttgtcaaacactggttggagaacggagcagaaattcaacggactggtcttgaggtgaaaccgttcatcactaacccccgtgcggtgaagaagtgtacccggtatatcgattgcgacctgaatcggatttttgatctggagaatctcggaaaaaagatgagcgaggaccttccgtacgaagtgagacgcgcacaagaaatcaaccacttgtttggacctaaagattcggaagatagctacgacatcattttcgaccttcacaacacgacttccaatatgggctgcaccctcatacttgaagattcaagaaacaactttctgattcagatgttccactacattaagacttctctggcaccactgccttgttacgtgtacctgattgaacatccttcgcttaagtacgcaactactaggtcaattgcgaagtaccccgtgggcatcgaagtcggccctcagccacaaggcgtgctccgtgccgatatccttgaccagatgcggaaaatgatcaagcatgcacttgacttcatccatcactttaacgaagggaaggagttccctccatgtgctatagaggtgtacaagataatcgaaaaggtggattaccctcgagacgaaaacggagaaatcgcagcgattatccaccccaacctccaagaccaggattggaagccactccatccaggggatcctatgttcctcaccctggacggaaagaccattccactgggaggagattgtaccgtctacccggtgtttgtgaatgaggcggcctattacgagaagaaggaagcatttgcaaagactactaaattgactctcaatgcaaagtcgatccgatgttgtttgcat

SEQ ID NO: 7151 - DNA, 939 bp, synthetic construct
  misc_feature 1..939: note = source = /note="Description of Artificial Sequence: Synthetic coding sequence"
  source 1..939: mol_type = other DNA
atgactagttgtcacattgctgaagagcacatccagaaggtggctatattcgggggaacgcacgggaacgagctgacgggcgtgttccttgttaaacattggctggagaatggtgccgagatccaacggaccggtctggaggtgaagccctttataacgaatccgcgcgcagtaaagaagtgcacccgatacatagactgcgacctgaatcgcattttcgatctggagaatctcggaaaaaagatgtccgaggatctcccttatgaggtgcggcgagctcaggagatcaatcacttatttggccccaaggactctgaggattcatatgatataatctttgaccttcacaatacaaccagcaacatgggctgtacgttgatactagaagacagcagaaacaattttctgatccagatgtttcactatatcaagaccagcttagcccctcttccatgctacgtgtatcttatagaacacccatccctcaaatacgctaccaccagatccatcgctaagtacccggtgggcatagaggtggggccccaacctcagggtgtgctgcgggccgatatcctggatcagatgagaaaaatgatcaagcatgccctagatttcattcaccattttaatgaaggaaaagaattcccgccgtgcgccatcgaggtctacaagattatcgaaaaggtagattaccctcgcgatgaaaatggcgagattgcagctatcattcaccccaatttgcaggaccaggattggaaaccccttcatcctggcgaccctatgtttctcacactggacggtaagacaatccctctaggaggagattgcaccgtctatcccgtttttgtgaatgaagccgcgtactacgagaaaaaagaagctttcgccaaaaccacgaagttaacactgaacgccaaatctatcagatgctgccttcat

SEQ ID NO: 7152 - DNA, 939 bp, synthetic construct
  misc_feature 1..939: note = source = /note="Description of Artificial Sequence: Synthetic coding sequence"
  source 1..939: mol_type = other DNA
atgacctcttgtcacatagctgaggagcacattcagaaggtcgctatttttggcggcacccacggcaatgagctgactggcgtatttctggtcaagcattggcttgaaaacggcgctgagatccagcgcacaggtctggaagttaagccgtttatcacaaacccgagggctgttaaaaaatgtactaggtacatcgattgcgacctcaacagaattttcgacctcgaaaacttgggcaagaaaatgtccgaggatctgccgtatgaagtaaggagagcccaagagatcaaccacctcttcggacccaaggatagcgaggacagttatgacattatattcgatctgcacaacacgacctccaacatgggctgtactctgatcttggaggactctaggaacaattttttgattcagatgtttcactatatcaaaactagcttggcgcccctgccttgctatgtataccttattgagcatccctccctgaagtatgctactacgagatctatcgcaaaataccccgtgggcatcgaagttggcccgcagcctcagggcgttctgcgcgctgacattcttgatcaaatgagaaaaatgataaagcacgctctggattttatccaccacttcaacgaaggtaaggaattccccccttgcgccattgaggtttataaaattattgaaaaggttgactaccccagggatgagaacggcgaaatcgccgctatcattcatccaaacctgcaggatcaagactggaaaccactgcatcccggcgatccaatgtttctgaccctggatggcaagacgatcccacttggtggcgactgcactgtgtatccagttttcgtcaacgaagcggcttactacgagaagaaggaggcctttgcaaaaactaccaagctgactctcaacgctaagagcatcagatgctgtttgcac

SEQ ID NO: 7153 - DNA, 939 bp, synthetic construct
  misc_feature 1..939: note = source = /note="Description of Artificial Sequence: Synthetic coding sequence"
  source 1..939: mol_type = other DNA
atgacatcgtgccacatcgctgaagagcacatccaaaaagtcgcgatctttgggggaacacacggcaacgaattaaccggggtctttcttgtcaaacactggctcgaaaatggagctgagattcagcggacgggtttagaggttaaaccgttcatcacaaacccgagagccgttaagaagtgtacaagatatatcgattgcgatttaaatagaatttttgatctggaaaatttgggcaaaaagatgtcagaagacctcccgtacgaagtccggcgcgcacaggaaataaatcatctgtttgggccaaaagattctgaggattcttacgatatcatatttgacctgcataacacaacgagtaatatgggatgcactttaattttagaagacagtcgaaataattttctgatccaaatgttccattacatcaaaacatctctcgccccgttaccctgttatgtgtatttaatcgaacatccgagcctgaagtacgcaacaacaagaagcattgccaaatacccagtaggaatcgaagtaggaccgcaaccgcaaggcgtcttaagggccgacattcttgatcagatgagaaaaatgattaaacatgccttagattttattcatcactttaatgaggggaaagaatttccgccgtgcgctattgaagtctataagattattgagaaggtcgactatcccagagacgaaaatggcgaaatagcagctattattcaccctaacctgcaagatcaggattggaaaccgctgcatccaggtgacccgatgtttctgacacttgatggcaagacaatacctcttggaggagattgtacggtgtatcctgtgtttgttaatgaagcagcctattatgaaaaaaaagaagctttcgcaaaaacaacaaagcttactcttaacgcaaaatcaattagatgctgtcttcat

SEQ ID NO: 7154 - DNA, 939 bp, synthetic construct
  misc_feature 1..939: note = source = /note="Description of Artificial Sequence: Synthetic coding sequence"
  source 1..939: mol_type = other DNA
atgacttcgtgccacatcgccgaggagcacattcagaaagtcgccatctttgggggcactcacggcaatgaattgactggagtgtttctggtgaagcattggctcgaaaacggcgctgaaattcagcgcaccggactggaagtgaaaccgttcatcacgaatcctcgcgcggtgaagaagtgcacgcggtacatcgactgtgacctgaacagaattttcgacctcgaaaatcttggcaagaaaatgagcgaggacctgccttacgaggtgcggagagcgcaggaaatcaaccacttgttcggtccgaaggactctgaagattcttatgacatcatctttgatctgcataacaccacctcgaacatgggatgcactctgatcctcgaagatagcagaaacaactttctgatccagatgttccactacatcaaaacttcactcgcaccgctcccgtgttacgtgtatctcatcgaacatccttccctgaagtacgcgacgactagaagcattgccaagtacccggtcggaatcgaggtcggcccgcagccccaaggagtgctgagagcagacattctcgatcagatgcgcaagatgatcaaacacgccctggatttcatccaccatttcaacgaaggaaaggagttcccaccgtgtgctatcgaagtctacaagattatcgagaaagtggattacccccgggatgaaaatggggaaatcgctgccatcatccatccgaatctccaagaccaggattggaagccgctgcacccaggcgacccaatgttcctgaccctggacggcaagacgatcccactcgggggagattgcactgtctacccggtgttcgtcaatgaggccgcgtactacgaaaagaaagaagccttcgccaagaccactaagctgaccctgaatgcgaagtccatccggtgctgcctgcac

SEQ ID NO: 7155 - DNA, 939 bp, synthetic construct
  misc_feature 1..939: note = source = /note="Description of Artificial Sequence: Synthetic coding sequence"
  source 1..939: mol_type = other DNA
atgaccagctgtcatatagccgaagaacatattcagaaggtcgcgatttttggaggcacccacggtaacgaacttactggtgtgttcttggtgaaacactggcttgagaacggtgcagaaatccaacggactggccttgaagtcaagccgtttatcaccaacccacgggccgtgaaaaagtgtacccggtacattgattgtgatctgaacaggattttcgatctcgaaaacctggggaagaaaatgagcgaggatctgccatacgaggtgagaagagcacaggagatcaaccatctctttggtccaaaggacagcgaggactcgtacgatatcatctttgatcttcataatactacttccaacatgggctgtaccctcatccttgaggatagcagaaataactttctgattcagatgtttcactacatcaagacctcccttgcacccctcccgtgttacgtgtaccttatcgagcacccatcactgaagtacgcgaccactcggtcaattgccaaatatcctgtgggaatcgaggtgggcccccagccccaaggtgtgcttcgcgcagacattcttgatcaaatgcggaagatgattaagcatgcgcttgactttatacatcacttcaatgaaggcaaagagtttcccccctgtgcgattgaagtgtacaagatcattgaaaaggtggactacccacgggacgagaatggagaaattgccgcaatcattcatccaaacctccaggatcaagattggaagccactccatcctggtgatccaatgttccttacgctggacggaaagaccatccctcttggaggagattgtaccgtctaccctgtctttgttaatgaagcagcatactacgaaaagaaggaagcatttgcaaagacgactaagctgactttgaatgccaagtccatccggtgctgtctgcat

SEQ ID NO: 7156 - DNA, 939 bp, synthetic construct
  misc_feature 1..939: note = source = /note="Description of Artificial Sequence: Synthetic coding sequence"
  source 1..939: mol_type = other DNA
atgacttcttgtcatattgcagaagaacatatacaaaaagttgcaatttttggaggaacacatggaaatgaactaacaggagtttttcttgttaagcattggcttgaaaatggagcagaaatacaaagaacaggtttagaggtaaagccattcattacaaatccaagagctgttaaaaaatgtacacgatatattgattgtgatcttaatagaatttttgatttagaaaatctagggaagaaaatgtctgaagatttaccatatgaagtaagaagagcacaagaaattaatcatcttttcggtcctaaggatagtgaagattcttatgatataatttttgatttacataatacaactagtaatatgggatgtacattaattttagaagattcacgaaataattttttgattcaaatgtttcattatattaaaacatcacttgctccacttccttgttatgtttatcttattgagcatccatctcttaaatatgcaactactagatcaatagcaaaatatccagttggaatagaagttggaccacaaccacaaggagtattaagagctgatattcttgatcaaatgagaaaaatgataaaacatgcacttgattttattcatcattttaatgaaggaaaggaattcccaccatgtgctattgaagtttataagattattgaaaaagttgattacccaagagacgaaaatggagaaattgctgctattattcatcctaacttacaagaccaagattggaaaccattacatccaggagatccaatgtttttaactttagatggaaagacaattcctcttggtggtgattgtactgtttatccagtattcgttaacgaagcagcatactatgaaaaaaaggaagcattcgcaaaaactacaaagttaactcttaatgcaaaatcaattagatgttgtttacat

SEQ ID NO: 7157 - DNA, 939 bp, synthetic construct
  misc_feature 1..939: note = source = /note="Description of Artificial Sequence: Synthetic coding sequence"
  source 1..939: mol_type = other DNA
atgacttcctgtcacattgcagaggaacatattcagaaagtcgctatttttggggggacccatggtaacgaactgactggcgtgttcttggtgaaacattggctcgaaaatggcgcggagattcagcgcacagggcttgaggttaagccattcataactaaccctcgcgcagtcaagaaatgtacaagatacatcgactgcgacttgaatcgtatctttgacctggagaatctcggaaagaagatgtctgaggatctcccttatgaggtccgccgagcccaggagatcaatcatctcttcggtccgaaggacagcgaagactcttacgacattatctttgacctgcacaacaccacatccaatatggggtgcacactgattttggaggacagtaggaataactttctgatacaaatgtttcactatatcaagacaagtctcgctccattgccctgttatgtctacctcattgagcacccctccctaaagtacgccaccacccgttcaatcgctaaataccctgttggaattgaagtgggcccacaacctcaaggagtgctgcgggcagatatactggatcagatgaggaaaatgatcaagcacgcgctggattttatccaccactttaacgagggcaaagaattccctccatgtgccattgaggtttataagattatagagaaagtggactacccccgagacgagaacggggaaattgcagcgatcattcaccctaacctgcaagatcaagactggaagcccttgcaccccggcgaccccatgtttttgaccctcgatgggaagactataccgctaggaggcgattgtaccgtctaccccgtctttgtgaacgaggccgcctactatgagaagaaagaagcattcgcgaaaaccacaaagctcaccctgaacgcgaagagtatacggtgttgtctgcac

SEQ ID NO: 7158 - DNA, 939 bp, synthetic construct
  misc_feature 1..939: note = source = /note="Description of Artificial Sequence: Synthetic coding sequence"
  source 1..939: mol_type = other DNA
atgacttcctgccatatcgccgaggagcatatccagaaggtggctatattcgggggaactcacgggaacgaactgaccggagtgttccttgtaaaacactggctcgagaacggcgcagagatccagcgcaccggactggaagtcaagccctttatcaccaacccgcgcgctgtgaagaaatgtaccagatatatcgattgtgaccttaacaggatttttgacctggaaaatctgggaaagaagatgtctgaagatttgccgtacgaagtaagacgcgcgcaggaaatcaaccatttgtttggacccaaggactccgaagattcctacgacatcattttcgacctgcacaataccacgagcaacatgggatgcacgctgattctggaagattcgcgcaacaacttcctgattcagatgttccattacatcaagacttcacttgcgcctctcccttgctacgtctatttgatagaacacccgagcttgaaatacgccacgaccaggtcaatcgcaaaataccctgtgggaattgaggtgggaccccagcctcaaggcgtgctcagggcagacatcctggatcaaatgcggaagatgataaagcacgccctggacttcatccaccacttcaacgaaggaaaggagtttccgccgtgtgctattgaagtgtacaaaatcatcgagaaggtcgactaccctcgagacgagaacggtgaaattgctgcaatcatccatccaaatctccaagaccaagactggaagccactgcatccgggcgatccgatgtttcttactctcgatggtaagaccatcccgctcgggggagattgcaccgtttacccggtgttcgtgaatgaggctgcctactacgaaaagaaggaagccttcgccaagactaccaagctgacccttaatgccaagagcatcagatgctgcctgcat

SEQ ID NO: 7159 - DNA, 939 bp, synthetic construct
  misc_feature 1..939: note = source = /note="Description of Artificial Sequence: Synthetic coding sequence"
  source 1..939: mol_type = other DNA
atgactagctgccacatagcggaagagcatatccagaaagttgccattttcggtgggacccacgggaacgagttgaccggagtgttccttgtcaagcactggctcgagaacggggcggagatccagcgcaccggactcgaagtgaagccattcatcactaacccgcgggccgtgaagaaatgcacgcgctacatcgactgcgacttgaatcgcatctttgacttggagaacctgggcaagaaaatgtcggaagatctcccatacgaggtccggcgcgcacaagagatcaatcacctgtttgggcctaaggactcggaagattcatacgatatcatcttcgacctgcataacaccactagcaatatgggctgtactctgattctcgaagattcacgaaataactttctgattcagatgttccactacatcaaaactagcctcgcgccgctcccttgctacgtgtacctcattgagcacccgtcgcttaagtacgcaaccacccgctccatcgcgaagtacccggtgggcatagaagtgggaccgcagccccagggcgtgctgagagcagatatcctggatcaaatgcggaagatgataaagcacgctctggactttatccatcatttcaatgagggaaaagaattccctccgtgtgccattgaagtgtacaagatcatagaaaaggtcgattatccgagagacgagaacggcgaaatcgcagctatcatccatccaaatctgcaagaccaggactggaagcccctgcacccaggcgacccgatgttcctgactctcgacggaaagaccatcccgctcggaggagattgtacggtctacccagtgttcgtgaacgaggccgcctactatgaaaagaaagaggcattcgctaaaactactaaactgaccctgaacgctaagtccatcagatgctgccttcat

SEQ ID NO: 7160 - DNA, 939 bp, synthetic construct
  misc_feature 1..939: note = source = /note="Description of Artificial Sequence: Synthetic coding sequence"
  source 1..939: mol_type = other DNA
atgacgtcgtgccacatcgcggaagagcacattcagaaggtggcgatcttcggcgggactcacgggaacgagctcaccggagtattcctggtgaagcactggctcgaaaacggagccgagatccaaagaaccgggcttgaagtgaagccctttatcaccaacccccgcgccgtcaagaaatgtactcgatacatcgattgcgatctgaacaggatctttgatctcgaaaatctgggcaagaaaatgtctgaagatctgccttatgaggtccgcagggcgcaggaaatcaatcatctgttcggccctaaagacagcgaggactcctatgatatcatcttcgatctccataacactacctcgaatatgggatgcaccctcattctcgaggattcgcggaataacttcctcatccaaatgttccactacataaagacttcactggcaccactcccgtgttacgtgtacctgatcgaacacccgtcgctcaagtacgccaccacgcgcagtatcgccaagtacccggtgggtatcgaagtggggccgcagcctcagggagtcctccgggcagatatcttggaccagatgcgaaagatgatcaagcatgccctggacttcattcatcacttcaatgagggaaaagagttccctccgtgcgctatcgaagtgtacaagattatcgagaaggtggactacccacgcgacgagaacggggaaatcgccgcaatcattcatccgaacctccaggatcaagactggaagcctctccacccgggagatccgatgttcctgactttggacggaaagaccattcctctgggcggagattgcactgtctaccctgtttttgtgaacgaggcggcctactacgaaaagaaggaagcgtttgccaagaccaccaaattgaccctgaacgctaagagcatccggtgctgcctgcat

SEQ ID NO: 7161 - DNA, 939 bp, synthetic construct
  misc_feature 1..939: note = source = /note="Description of Artificial Sequence: Synthetic coding sequence"
  source 1..939: mol_type = other DNA
atgacctcctgtcatatcgccgaagagcatatccaaaaggtcgcgatttttggcgggactcacggcaacgaactgactggagtgtttctcgtcaagcactggctggaaaacggagctgagatccagaggaccggactggaggtcaagccatttatcaccaaccctcgcgccgtaaagaagtgcaccagatatatcgactgcgatttgaaccggatattcgaccttgagaatctcggaaagaagatgagcgaagatctgccgtacgaggtgcggcgcgcccaggagatcaaccacctgttcggcccaaaggactccgaagattcctacgacatcatcttcgacctgcataacaccactagtaatatgggatgcactctcatcctggaagattcacgcaacaatttcttgatccagatgttccactacattaagacctccctcgccccactgccgtgctacgtgtaccttatcgaacacccctcgttgaagtacgcaaccacccgctcgatagccaaatacccagtgggaatcgaagtgggaccgcagccgcaaggcgtgctgcgcgcagacatcctggatcagatgcgcaaaatgatcaaacatgcgctggacttcatccatcacttcaacgaaggtaaggagttccctccttgcgccatcgaagtgtacaaaatcatcgagaaggtggactacccgcgcgacgagaatggcgaaattgctgccatcatccatccaaatctccaggaccaagactggaaacctctgcacccaggtgacccaatgtttctcactttggacgggaaaaccatcccactgggcggagattgcaccgtctatcccgtgtttgtgaacgaagcagcgtactacgagaagaaggaagcctttgcaaaaactacgaaactgactctgaacgcgaagtctattcgctgttgcctgcac

SEQ ID NO: 7162 - DNA, 939 bp, synthetic construct
  misc_feature 1..939: note = source = /note="Description of Artificial Sequence: Synthetic coding sequence"
  source 1..939: mol_type = other DNA
atgacttcgtgccatatcgccgaggaacatatacaaaaggtcgcaatcttcggaggcactcatggaaacgaacttactggtgtattccttgttaagcattggcttgaaaatggggcagaaatccagaggactgggctcgaagtcaagcctttcattaccaatccacgggcggtgaagaaatgtactcggtacatcgactgcgatctgaatcgcatctttgatcttgaaaatctgggaaagaaaatgagcgaagatctgccttacgaagtgagacgagcacaagaaatcaaccatctcttcggacccaaggactccgaggattcatacgatatcattttcgatctccataataccacttccaacatggggtgtacccttatcctcgaagattcaagaaacaatttccttatacaaatgttccactacattaagacgtccttggcccctctgccatgttacgtgtaccttattgaacacccttccctcaaatacgcaaccacccgctcgattgcaaagtacccagtggggattgaggtcgggcctcaaccacagggagtgcttcgtgctgacatactcgaccaaatgagaaaaatgatcaagcatgccctggatttcattcaccactttaatgaaggcaaggaatttccaccgtgcgccattgaagtgtacaagattatcgaaaaggtggactatcctcgggacgagaacggagaaattgcggcaatcattcatcccaaccttcaggaccaagattggaagcctcttcatccaggtgatccaatgttcctcactctggatggaaagaccataccgctgggaggcgattgcactgtgtacccagtttttgtgaacgaggcggcctattacgaaaagaaggaggcatttgcaaagactactaaattgacgcttaacgcgaagtccattaggtgttgcctgcat

SEQ ID NO: 7163 - DNA, 939 bp, synthetic construct
  misc_feature 1..939: note = source = /note="Description of Artificial Sequence: Synthetic coding sequence"
  source 1..939: mol_type = other DNA
atgacctcatgccacatagccgaagaacatattcaaaaggtggcgatttttggaggtacccacggaaacgaactgaccggagttttcctcgtgaagcattggctggagaacggtgcggaaatccaaaggaccggccttgaggtgaagccctttatcacgaaccctagggcagtgaagaagtgtacccgttacatcgactgcgaccttaaccgaatcttcgacctcgagaaccttggtaaaaagatgagtgaggacctcccatatgaggtcaggagagcacaggaaatcaaccatctgtttggtccgaaggatagcgaggatagctacgatatcatattcgatcttcataataccaccagcaacatgggttgtactcttattctggaggatagccgtaacaactttttgattcaaatgttccattacatcaaaacttcacttgcaccactgccttgttacgtgtacctgatcgaacatccatcccttaagtacgcaaccacccggtccatcgcaaaatacccagtgggtattgaagtgggtccacagcctcaaggggtgcttcgggcagatatcctggatcagatgaggaaaatgataaaacatgcactggacttcattcaccacttcaacgaggggaaggaatttcctccttgtgctattgaagtctacaagataatagaaaaagtcgactaccctagagacgaaaacggtgagattgccgcgattatacatccaaacctgcaagaccaagactggaagccacttcaccctggagatcccatgtttctcacccttgacggaaagaccatacctctcggaggagattgtactgtgtaccccgtctttgtgaacgaagcagcttactacgagaagaaagaggcatttgcaaagactactaagctgacgttgaacgcaaagtcgatccgctgttgcctgcat

SEQ ID NO: 7164 - DNA, 939 bp, synthetic construct
  misc_feature 1..939: note = source = /note="Description of Artificial Sequence: Synthetic coding sequence"
  source 1..939: mol_type = other DNA
atgacatcctgccatatcgccgaggagcatatccagaaagttgccatctttggaggtacacacggaaacgaattgactggcgtttttctggtcaaacactggctcgaaaatggagctgagattcaaaggacaggtctggaagtgaaaccgttcatcaccaatccgcgtgccgtaaagaagtgtactcggtatattgactgtgatctcaaccgtatattcgatttagaaaacttggggaagaagatgtctgaggatcttccatatgaagttcgtcgtgcacaagagattaatcatctatttgggccaaaagattcagaagacagttatgacattatatttgatctacataacactactagcaatatgggctgtacattaattcttgaagattcgcgaaacaatttcctgatccagatgttccattacatcaagacctcgcttgccccactcccttgctatgtgtatcttatcgagcatccatcacttaaatatgcaacaacaagatctattgcaaaatatccagtcggaattgaggtgggaccccagccacaaggcgtattacgggcagacattttagaccaaatgagaaaaatgattaaacatgccttggattttattcaccattttaacgaaggtaaagaattcccaccatgcgcgatcgaagtttacaaaataatagagaaagttgactacccacgcgatgaaaatggagaaattgcagctatcattcatccaaatttgcaggatcaagattggaaaccgttgcatccaggtgatcctatgttcttgacgcttgatggaaagaccatcccgttaggaggagattgtacggtttacccggtttttgttaatgaagcagcttattacgagaagaaggaagcgttcgcaaaaacgacaaaacttactcttaatgctaaatccatccgctgctgtcttcat

SEQ ID NO: 7165 - DNA, 939 bp, synthetic construct
  misc_feature 1..939: note = source = /note="Description of Artificial Sequence: Synthetic coding sequence"
  source 1..939: mol_type = other DNA
atgacttcttgtcacatcgccgaagagcatattcagaaggtggccattttcggagggacccacgggaacgaactgacaggcgtcttcctcgtgaagcactggttagaaaatggtgcagaaatccaacgtaccggcctggaagtgaagcccttcatcacaaaccctcgtgctgtcaaaaaatgtactcggtatatcgactgcgacctcaaccggatatttgatctggaaaacctgggaaagaagatgagcgaagatctgccctatgaggtgcgcagggctcaggaaatcaatcacctgttcggaccaaaggatagtgaagatagttacgacataatattcgacctacacaatacaacatcgaacatgggttgtactttaatcctggaggattctaggaataacttcttgatccagatgttccactacataaaaacctctctggcaccgctgccatgctacgtttacttgatagaacatccttcgttgaagtatgccaccacacgatctattgccaaatatccagtgggcatcgaggtcggcccacagccccagggcgtcctgcgcgcagacatacttgaccagatgcggaagatgattaagcatgcactcgactttatccaccacttcaacgaggggaaggaattcccgccctgcgctattgaggtctacaaaattattgagaaagtggactacccgcgggatgaaaatggcgagattgcagcgatcatacacccaaacctccaggatcaggactggaagcccctgcaccccggcgaccccatgttcctgacgctggacggcaaaactatccctctggggggtgactgcacagtgtatcccgtttttgttaacgaggcagcttattacgagaagaaggaggctttcgcgaagaccacgaagcttacactgaatgctaaaagtattcgatgctgtctgcat

SEQ ID NO: 7166 - DNA, 939 bp, synthetic construct
  misc_feature 1..939: note = source = /note="Description of Artificial Sequence: Synthetic coding sequence"
  source 1..939: mol_type = other DNA
atgacctcatgtcatatcgccgaggaacacatccagaaagtggcaatcttcggagggacgcacggaaacgagctgactggtgtgtttctggtcaagcactggttggaaaacggagctgaaatccagcgaactggactggaggtgaagcctttcatcaccaacccgcgcgcggtgaaaaagtgcacccgctatattgattgtgatttgaatcgcatttttgacctggaaaacctgggcaaaaagatgtccgaggatctgccttacgaagtccgccgggcgcaggaaatcaaccatctgttcggcccaaaggacagcgaggactcgtacgacattatcttcgatctccacaataccacctccaatatgggatgcactctgattctggaagattcacggaacaatttcctgatccaaatgttccattacatcaagacctcgttggctccgctgccttgttacgtctacctgatcgaacacccatcgttgaagtacgcgaccactcggagtatcgcaaagtaccccgtgggcattgaagtgggaccacaaccacagggggtgctgagagctgatatcctggaccagatgcgcaagatgatcaagcatgcactggactttatccatcatttcaatgagggtaaggagttccctccgtgtgctattgaagtttacaagatcatcgaaaaagtcgactacccgcgcgacgagaacggggagatcgccgcgatcattcacccgaaccttcaggaccaagattggaagccattgcatcctggagatccgatgtttttgaccttggacggaaagactatcccgctgggcggcgactgcaccgtgtacccagtgtttgtcaacgaagccgcatactacgaaaagaaagaagccttcgcaaagactactaagctcaccctgaacgctaagtcgatcaggtgttgcctgcat

SEQ ID NO: 7167 - DNA, 939 bp, synthetic construct
  misc_feature 1..939: note = source = /note="Description of Artificial Sequence: Synthetic coding sequence"
  source 1..939: mol_type = other DNA
atgacctcctgtcatattgcagaagagcatattcaaaaggtggcaattttcggagggactcatggcaacgagcttaccggagtgttccttgtcaagcattggcttgaaaacggtgcagaaattcagagaactggcctggaagtgaagccattcatcactaacccccgtgcagtgaagaaatgcacgcgctacatagactgtgatctgaaccggatatttgaccttgaaaatctgggtaaaaagatgtccgaggacctgccttacgaagtgaggagggcccaagagataaaccacctttttggccccaaggactcggaggattcgtacgacatcatttttgatctgcacaacactactagcaacatgggatgcactctcatcctcgaagattcgcggaacaactttcttattcaaatgtttcactacataaagaccagcctggcacccctcccgtgctacgtgtacctgattgaacatccttcgctgaagtacgcgactactcggtccattgcgaaataccctgtgggaatcgaagtgggtcctcagccacagggagtcctcagggcagacattcttgatcaaatgaggaaaatgatcaaacatgcgctggactttattcatcactttaacgaaggaaaagagttccccccatgcgcgattgaagtctacaaaatcattgagaaagtggactacccacgggatgagaatggagaaatcgcagcaattatccacccaaaccttcaggaccaagactggaagcctctccacccaggcgaccccatgttccttactctggatgggaaaactatcccacttggtggtgattgtactgtctatccagtctttgttaacgaagccgcctactacgaaaagaaggaggcattcgcaaagactaccaagctcaccctgaatgctaagtcgattagatgttgtttgcat

SEQ ID NO: 7168 - DNA, 939 bp, synthetic construct
  misc_feature 1..939: note = source = /note="Description of Artificial Sequence: Synthetic coding sequence"
  source 1..939: mol_type = other DNA
atgaccagctgtcatatcgctgaagaacatatacaaaaagtagctatcttcggtggcacccacgggaacgagctgactggagtctttctggtgaagcattggctcgaaaacggagcagaaatccagagaactggtctggaagtgaaaccgttcattaccaaccctcgggccgtgaagaagtgtactcgctacattgactgtgatctgaatcgcattttcgacctggaaaatctgggaaagaaaatgagcgaagatctcccttacgaggtgcggagggcccaagagattaatcatctgtttggtcctaaggattcggaggactcgtacgacatcatatttgacctccataacacgacttcaaatatgggttgtaccttgattctggaggattcccggaacaactttctgattcaaatgttccactacattaagacgtccttggcgccacttccctgttacgtctacttgatcgaacacccttctctgaagtacgcgactacccgatcgatcgcaaaatacccagtgggaatcgaagtgggtccccagcctcaaggtgtgcttagagcagatattctcgaccagatgcgaaagatgatcaagcatgcgttggacttcattcatcatttcaacgaaggaaaggaatttcctccttgtgccatagaagtctacaaaatcattgaaaaggtcgattatcctcgagacgaaaacggcgagatcgcggctatcatccatcccaatcttcaggaccaagattggaagcccctgcacccaggagatccaatgtttctgacccttgatggaaagaccatcccattgggaggggattgcaccgtctatccagtgtttgtcaacgaagccgcgtactacgagaagaaggaagcatttgcgaaaaccactaagctgacgctgaacgcaaagtccattcgctgttgccttcat

SEQ ID NO: 7169 - DNA, 939 bp, synthetic construct
  misc_feature 1..939: note = source = /note="Description of Artificial Sequence: Synthetic coding sequence"
  source 1..939: mol_type = other DNA
atgacctcctgtcatatcgccgaggagcatatacaaaaggttgccatttttggaggaacgcacggtaacgagctgacaggagtattcctggtgaagcattggcttgaaaatggggcagaaatacagaggactggactggaggtcaaaccgtttatcaccaacccgcgggccgttaagaaatgtaccagatatattgactgtgacctgaatcggatcttcgaccttgaaaatctggggaagaaaatgagcgaggacctgccatacgaagtgagacgcgcccaggaaattaaccacctgtttgggcccaaggattctgaggactcctatgacatcattttcgatttgcacaacaccacctccaatatggggtgcacccttatcctcgaggacagtcgaaacaatttcctcatccaaatgttccactatatcaagaccagcctggcgcccctgccttgttatgtctacctcatagagcacccaagtctcaagtacgccacaacgcgctccatcgccaagtaccctgtcggaatcgaagtgggtccccagccccaaggtgtccttcgcgctgacattctggaccagatgcgaaaaatgatcaaacacgccctggattttatccaccattttaatgagggtaaagaattcccaccctgcgccattgaagtctacaaaattatcgagaaggtcgattatccgagagatgagaatggagagattgccgctattatccatcccaatcttcaggatcaggactggaaaccgctgcaccccggcgaccctatgttcctcaccctcgatgggaagacgataccccttggcggagattgcacagtgtaccctgttttcgtgaacgaagctgcatattacgagaagaaagaggcattcgctaagacaaccaaactgactctcaacgcaaagtcaattagatgctgccttcat

SEQ ID NO: 7170 - DNA, 939 bp, synthetic construct
  misc_feature 1..939: note = source = /note="Description of Artificial Sequence: Synthetic coding sequence"
  source 1..939: mol_type = other DNA
atgacatcatgtcacattgcggaagaacatatccagaaagtggccatcttcggcgggacacacggaaacgaactgaccggcgtgttcctcgtgaagcactggctggagaacggagctgagattcagagaacaggtctggaggtcaagccctttataacgaaccccagagcagtaaagaagtgtactcgatatatagattgtgacttgaatagaatttttgatctggagaacttagggaaaaaaatgagcgaagatctcccctacgaagtgagacgagcccaagaaatcaatcatctgtttggaccgaaagattccgaggatagttacgatatcatcttcgacttacacaatactacttctaatatgggctgcacactgatcctggaggattctagaaataacttcttgattcaaatgtttcactacattaagacatccctcgcccctctcccttgttacgtctacctgattgagcatccgtcattgaagtacgctactacgagaagtatcgctaaatatcccgtggggattgaagtggggccccagccgcaaggcgtcctgcgggcagatatactggatcagatgagaaagatgattaagcacgctcttgatttcatccaccacttcaacgaaggcaaagaattccccccttgtgccattgaagtgtacaagataatcgagaaggtggactatcctcgagacgaaaacggggaaatcgcagctataatccaccctaatctacaggatcaggactggaaacctctccatcctggagacccaatgttcctgacactggacgggaagactatacctcttggcggcgattgcacagtctaccccgttttcgtgaatgaagcagcgtattacgaaaaaaaagaagccttcgcaaaaacgactaagctgaccctgaacgctaagtctatcagatgctgtctgcat

SEQ ID NO: 7171 - DNA, 939 bp, synthetic construct
  misc_feature 1..939: note = source = /note="Description of Artificial Sequence: Synthetic coding sequence"
  source 1..939: mol_type = other DNA
atgacttcctgccacatcgctgaagaacacattcaaaaagtggccatctttggagggacacatgggaatgaactgaccggagttttcctcgttaagcattggttggagaacggcgcggagatccagaggaccgggctcgaggtcaagccgtttatcacaaatcccagggccgtgaagaagtgtacgcgctacattgactgcgacttgaatcggatctttgacttggaaaatttgggcaaaaagatgtcagaggacttgccctatgaagttcgaagagcccaggaaattaatcatctctttgggccgaaagactccgaggattcatacgacataatattcgatctgcacaacaccacaagtaacatgggctgtaccctaatcctggaggattctagaaataacttccttatacagatgtttcattatatcaagacaagcctggcaccacttccttgctacgtgtatttaatcgaacatccttccctcaagtatgcgaccacacgttctatagctaagtacccggtcgggatcgaagtgggtccacagccacagggagtgctgagagcagatatcttggaccagatgcgaaagatgatcaaacatgcccttgacttcattcatcacttcaacgaggggaaggagttccccccatgcgctattgaagtgtacaagattattgagaaagtggattacccgagagatgagaatggcgagattgcagctattatccatcctaatctgcaagaccaggattggaagccactccaccctggcgaccctatgtttctgactcttgatgggaaaaccatacctctcggcggggattgcacagtctatcccgtctttgtgaacgaagccgcatactatgaaaagaaggaggcctttgcaaaaactaccaagctcaccttgaacgccaagtcgattaggtgttgtttgcac

SEQ ID NO: 7172 - DNA, 939 bp, synthetic construct
  misc_feature 1..939: note = source = /note="Description of Artificial Sequence: Synthetic coding sequence"
  source 1..939: mol_type = other DNA
atgacaagttgtcacattgccgaagagcatattcagaaagtggcgatttttgggggcacgcatgggaacgaactgacgggagtttttttggtcaagcattggttggaaaacggtgcagaaattcagaggactggattggaagtgaaaccattcattaccaacccacgagcggtgaagaaatgtactcggtacatcgattgcgatctgaataggatttttgacctggagaatctcggcaagaagatgagcgaagacctgccatatgaagtgcgacgagcacaggaaataaatcatttgtttggtcccaaggattccgaggactcttacgacattatattcgacctgcacaataccacctcaaacatgggctgcaccctgatactcgaggattctcgaaataacttcttgatccagatgtttcactatatcaagacctctttggctccactaccatgttatgtgtacctgattgagcacccatccctgaaatatgccactacacgttctattgccaagtatcccgtgggcatagaagtgggaccacagccacaaggggtgttacgagctgacatactggatcaaatgcggaaaatgattaagcatgccctggacttcattcaccattttaatgagggcaaggagtttcctccttgtgctattgaagtatacaagattatcgaaaaggtcgattatcccagagatgagaacggcgaaattgctgcaataatccaccctaacctgcaggatcaggattggaagcccctgcacccgggggatcctatgttccttaccctcgatgggaaaacgatcccccttggaggagactgcaccgtttatcctgtatttgtgaacgaggctgcatattatgaaaagaaggaagcctttgcaaagactacaaaactcaccttgaacgccaagtccatccgctgctgtctccac

SEQ ID NO: 7173 - DNA, 939 bp, synthetic construct
  misc_feature 1..939: note = source = /note="Description of Artificial Sequence: Synthetic coding sequence"
  source 1..939: mol_type = other DNA
atgacttcctgtcacattgccgaggagcacatacaaaaggtcgctatcttcggaggaacccatggtaacgagctgacgggggtgtttctcgtgaaacactggctcgaaaacggagcggagattcaacggaccggcctggaagtgaagccattcattactaacccccgggccgtcaagaagtgtactaggtacatcgactgcgacctcaatcgcattttcgacctcgagaacctgggaaagaaaatgagcgaagatctgccgtacgaggtgcgcagggcacaggaaatcaaccatctgtttggaccaaaggactccgaggactcgtacgacatcatcttcgaccttcataataccacctctaatatgggctgtactctgatcctcgaagattcacgcaacaacttccttatccagatgttccactatatcaagacgtcactcgcacccctgccttgctacgtgtacctgatcgagcaccctagcctcaagtacgcgactactcggtccatcgctaaatacccggtgggaatcgaagtgggacctcagccacagggagtgttgcgggcggacatcctggatcagatgcgcaagatgatcaagcacgcgctggactttatccaccactttaacgaaggaaaagagttccccccttgtgccatcgaggtgtacaaaatcattgaaaaggtagattaccccagagacgagaatggcgagatcgcagcaatcatccatccaaatctgcaagaccaggactggaaacccctgcacccgggtgatcccatgttcctgactctggacggcaagactattccgttgggaggcgactgcaccgtgtacccggtgttcgtgaacgaggctgcttactacgagaagaaggaggccttcgccaagactactaaactgactctcaacgccaaatcaatcagatgttgcctgcat

SEQ ID NO: 7174 - DNA, 939 bp, synthetic construct
  misc_feature 1..939: note = source = /note="Description of Artificial Sequence: Synthetic coding sequence"
  source 1..939: mol_type = other DNA
atgacctcctgccacattgctgaggagcatatccagaaggtggccatctttggcgggacacacggtaacgagctgaccggcgtgtttctcgtcaagcattggcttgagaacggcgcagaaatccagagaacaggtctggaagtcaaaccttttatcacaaatccccgagctgttaaaaaatgcaccagatatatcgactgcgatctcaatcggatttttgacctggagaatctcggcaagaaaatgagcgaggaccttccatacgaagtccgccgagcccaagagattaaccatctctttgggccaaaagacagcgaagactcctacgatatcatttttgatctccataacaccacctcaaacatgggctgtactcttatccttgaggattccaggaataactttctgatccaaatgttccattacatcaagacctcactcgcaccacttccttgttacgtttacctcatagaacacccttctctcaagtacgcaacaacaagatctatcgcaaagtaccctgttgggatcgaggtgggacctcagcctcaaggcgtcctgagggctgatatcctcgatcaaatgagaaagatgattaagcacgctctggactttatacatcatttcaacgaagggaaagagtttccgccctgcgctattgaagtgtacaagatcatcgaaaaagtggattacccgcgggatgaaaacggggaaatcgctgccatcatacacccaaacttgcaagaccaagactggaaaccgctgcatccaggtgacccaatgttcctcactttggacggaaaaacgatccccctgggcggcgattgcaccgtttatccagtgtttgttaacgaggccgcctactacgaaaaaaaggaggcattcgctaaaaccacaaagctgacactcaacgctaagtcaatccggtgttgcctgcac

SEQ ID NO: 7175 - DNA, 939 bp, synthetic construct
  misc_feature 1..939: note = source = /note="Description of Artificial Sequence: Synthetic coding sequence"
  source 1..939: mol_type = other DNA
atgacgagctgtcacatcgcggaggaacacattcaaaaggtcgcaattttcggcggcacccacggaaacgaactgactggtgtgttccttgtcaagcattggctcgagaatggagcggagatccagagaactggtcttgaagttaaaccgtttatcactaaccctcgggcagtgaagaaatgcaccaggtatattgattgtgacctgaatcgcatcttcgaccttgagaatcttggaaagaagatgtctgaagatctcccctacgaagtgagacgcgcccaggagattaaccacctctttggacccaaggactcggaggactcgtacgacattatctttgatctgcataacactacctcaaatatggggtgtactcttatcctggaagattcccggaataactttcttatccagatgtttcattacataaagacctccctggccccacttccttgttacgtgtatttgattgaacatcctagccttaagtacgctaccaccagatcaatcgccaagtaccccgttggaattgaggttggtcctcaaccgcaaggagttttgagggcggacattcttgatcaaatgcggaagatgatcaagcatgcactcgatttcattcaccatttcaatgaaggaaaagaattccccccttgtgctatcgaagtgtacaaaatcatcgaaaaagtggactacccgcgggatgagaacggtgaaatcgctgcgattatacatccaaaccttcaagaccaagattggaagccccttcacccaggtgatcccatgttcctgactctggacggaaagacgattcctctgggaggggactgtactgtgtaccctgtgttcgtcaatgaagcagcatattacgagaaaaaggaggcttttgcaaagacgaccaagctgactcttaacgccaagtccattagatgttgccttcac

SEQ ID NO: 7176 - DNA, 939 bp, synthetic construct
  misc_feature 1..939: note = source = /note="Description of Artificial Sequence: Synthetic coding sequence"
  source 1..939: mol_type = other DNA
atgaccagctgccatatcgcagaagaacatatccagaaagtcgcaatctttggaggaacccatggcaacgaacttaccggcgtgtttctggtgaagcactggctggaaaacggagcagagattcagcgtacgggactggaggtcaagcctttcataacgaaccctcgcgccgtgaagaagtgtactcgctatatcgattgtgatcttaaccgcatttttgatctggaaaatctgggaaagaaaatgtcagaagatcttccctacgaagtgagaagagcgcaagagatcaaccatcttttcggcccaaaggattccgaggattcatacgatatcatattcgacctgcacaataccacttctaatatgggatgtaccctcatcctggaggacagccgaaacaactttctgatccagatgtttcactacatcaagacctcacttgcaccgctcccctgttacgtctacctgatcgaacatccatcacttaagtatgccaccacgaggtccatcgcaaagtacccggtgggaattgaagtcgggcctcaacctcagggagtgcttagggcagatattctggatcaaatgagaaagatgattaaacacgccctcgactttatacatcatttcaatgaaggcaaagaatttcccccttgcgccatcgaggtgtacaaaatcatcgaaaaagtggactacccaagagacgaaaatggagagattgcagcgattatccatccaaacctgcaggatcaagattggaaacctcttcacccaggagatccaatgttcctcacgctggatggtaagactattccacttggaggtgattgtactgtgtatccagtctttgtcaatgaggcggcatactacgaaaagaaggaggcatttgccaagaccactaagttgactcttaacgcaaagtccatacgctgctgtctccac

SEQ ID NO: 7177 - DNA, 939 bp, synthetic construct
  misc_feature 1..939: note = source = /note="Description of Artificial Sequence: Synthetic coding sequence"
  source 1..939: mol_type = other DNA
atgacctcctgtcacatcgctgaggaacacatccagaaggtggcgatatttggcggtactcacggcaatgaactgaccggagtgtttctggtaaaacactggctcgagaatggcgccgagatccagagaaccggacttgaagtgaagccgttcatcactaacccgcgcgccgtcaagaagtgcactcgctacatagactgcgatctgaatcgcatctttgacttggaaaacctgggaaagaaaatgtcagaggatctcccctatgaggtgcgacgggcacaagagatcaaccatctgttcggtccgaaagactcggaagattcgtacgatatcatcttcgacctgcacaacaccaccagcaacatgggctgcacccttattctcgaggattccagaaataactttctgatccaaatgttccattacatcaagacttctctggctccgctgccctgctacgtctacctgatagaacatccaagtctcaagtacgctactacccgcagcattgcgaaatacccagtgggaattgaagtgggaccacaaccacagggagtgcttagggcagatatcctcgaccagatgcggaaaatgattaagcacgcgcttgacttcatccatcatttcaatgaagggaaggagttccctccgtgcgccatcgaggtgtataagatcatcgaaaaagtcgattacccgcgggatgagaacggtgaaatcgccgccattattcacccgaatctccaggatcaggactggaaaccactccacccgggggatccgatgttcctcactctggacggaaagactatcccattgggcggagactgcacggtgtaccctgtatttgttaacgaagcagcatactacgaaaagaaggaagcgttcgctaaaacgaccaagctgacgctgaacgcaaagtcaatccggtgttgtttgcac

SEQ ID NO: 7178 - DNA, 939 bp, synthetic construct
  misc_feature 1..939: note = source = /note="Description of Artificial Sequence: Synthetic coding sequence"
  source 1..939: mol_type = other DNA
atgacgagctgccacatagcagaggagcacatccagaaagtcgccatctttggcggtacccatggtaacgagctgaccggtgttttcctggtcaagcactggctcgagaacggcgctgagattcaaagaaccggtctggaggtcaagccttttatcactaatccaagagcagtgaaaaagtgcacaagatacatagactgcgatctgaatcgcatctttgacctggagaacctagggaagaaaatgtccgaagatttgccatatgaggttcgccgcgcccaggagatcaatcatttgttcggtccgaaagattccgaagacagctacgacatcattttcgatctgcataacacgacgagcaacatggggtgtactctgatcctagaggactccaggaacaatttcctgatccagatgttccattacatcaagaccagcctggcgccactgccttgttatgtgtatctgattgagcacccgagtctgaaatatgccacgactcggagtatcgccaagtacccggttggtattgaggttggcccgcaaccgcagggtgtgctgcgtgcggatatcctggaccagatgcgaaaaatgatcaagcatgctcttgatttcattcatcattttaatgaaggtaaagagtttccaccttgtgccatcgaagtctacaagatcatagagaaagtggactatcctcgtgacgaaaatggtgaaattgcggcaattatccatcctaacttacaggatcaggattggaaacctctccatccgggtgatccaatgttcctgaccctggatgggaagacaattccgctgggcggggactgtaccgtctatccggttttcgtgaatgaggcggcctattacgaaaaaaaagaggccttcgcgaagacgactaagctcaccctgaatgcaaagagcattcgctgttgcctacat

SEQ ID NO: 7179 - DNA, 939 bp, synthetic construct
  misc_feature 1..939: note = source = /note="Description of Artificial Sequence: Synthetic coding sequence"
  source 1..939: mol_type = other DNA
atgactagctgtcacatcgcagaagaacatatccagaaagtcgcaattttcggcggaacccacggcaacgagctcaccggcgtttttctcgtgaaacattggctggaaaatggggctgagatccaaaggactggactggaagtgaaaccatttatcacaaatccccgagcagtcaaaaaatgcaccagatatattgactgtgacctaaatcgaattttcgatctggagaatcttggcaaaaaaatgtctgaagatctgccctacgaagtccgtagggctcaggagatcaaccatttgttcggtccaaaggactcggaggactcatatgacattatcttcgatctacataatactacctccaatatggggtgtacgttgatcttagaagactccaggaacaactttttgatccagatgttccattacattaaaacttcacttgccccgctgccgtgctacgtgtatctcattgaacacccttctctgaagtatgcaacaacccgcagcatcgccaaatatcccgtgggaatcgaggtgggcccccagcctcagggggttctgagggctgatatcctagaccagatgcggaagatgattaagcatgcactcgatttcatacatcacttcaatgaagggaaggaattcccaccgtgcgcaattgaagtgtacaagattatcgagaaagtggattatccaagggacgaaaatggcgaaatcgcagctatcatccatcccaacctgcaggaccaggattggaagccactccaccccggggacccaatgtttctcacgcttgatggtaaaactatcccattgggcggcgattgtaccgtgtatccagtgtttgtgaatgaagctgcctattatgagaagaaagaggccttcgcgaagaccacgaagctgactctgaatgccaaaagcattcgctgctgcctgcac

SEQ ID NO: 7180 - DNA, 939 bp, synthetic construct
  misc_feature 1..939: note = source = /note="Description of Artificial Sequence: Synthetic coding sequence"
  source 1..939: mol_type = other DNA
atgacttcttgccacatagccgaggaacatatccaaaaagtcgcaatattcggaggaacccacggtaacgaactgactggtgtgtttctagtgaaacattggctcgaaaatggagcagaaatccagagaactggactagaagtgaagcccttcattactaatccgcgggctgtcaagaagtgcactcgttatatcgactgtgaccttaaccgtatcttcgacctggaaaatctgggcaagaaaatgtccgaggatctgccatatgaggtaagacgagcgcaagagatcaatcatctgtttggacctaaggactccgaggattcatatgacataatatttgatttgcacaatacaactagcaatatgggctgtaccttgatcctggaagattctcgaaataactttctcatacagatgtttcattacatcaaaacctctctggctcccctgccctgttacgtctatcttattgagcacccctccctgaagtacgcaaccacccgcagtatcgctaagtacccagtcggaatcgaagtggggccccagccccaaggggttctccgcgccgacatcctggaccaaatgcgcaagatgataaaacatgcccttgattttatccatcacttcaacgagggcaaggaattcccaccatgtgctattgaggtgtacaagattattgagaaggttgattatccgagagacgagaatggagagattgctgcaatcatccatccgaatctgcaggaccaggactggaagccactgcatcccggagacccaatgtttctcactctggatgggaagaccattccgctggggggggattgtacagtttatccggtcttcgtgaacgaagctgcttactacgagaaaaaggaagctttcgccaagactacaaaactgacgctgaatgcaaaatctatcaggtgctgcctccac

SEQ ID NO: 7181 - DNA, 939 bp, synthetic construct
  misc_feature 1..939: note = source = /note="Description of Artificial Sequence: Synthetic coding sequence"
  source 1..939: mol_type = other DNA
atgacatcctgccacattgctgaagaacatatacagaaagtagccatctttggcggcacccatgggaatgaattaacaggcgtctttttggtgaagcattggctggagaacggagccgaaatccagcggacggggctggaagtaaagcctttcattacgaatcccagagccgtcaagaagtgcacacgttatatcgattgtgacctgaaccgcatcttcgacctggagaacctggggaagaagatgtctgaagatcttccctacgaggtgcggagagcgcaggaaatcaaccatctgtttggcccaaaggattcagaggacagttacgatattatattcgacctgcataatactaccagcaatatgggttgcaccctcatcctcgaggattcccgcaataacttcctgatccagatgttccactatatcaaaacgtcacttgcacccttgccatgctatgtctatctgattgagcaccccagcctgaaatatgctacaacgcgctccatcgccaagtaccccgttggaattgaggtgggaccccagccccagggggtcctgcgtgcagacattcttgatcagatgaggaaaatgattaagcacgctcttgattttatccatcatttcaatgagggcaaagaattcccaccatgcgcgatcgaagtatacaagattatcgaaaaggtcgactaccctagggatgagaatggtgagatcgctgccattattcatccgaacttacaagatcaagactggaaacctcttcatccaggtgaccctatgtttctgacactggacggtaaaaccatccccctgggaggtgactgcactgtttaccccgtgtttgttaacgaggccgcatattatgagaaaaaagaggccttcgccaaaaccaccaaattgaccttgaatgccaaaagcatcagatgttgtcttcac

SEQ ID NO: 7182 - DNA, 939 bp, synthetic construct
  misc_feature 1..939: note = source = /note="Description of Artificial Sequence: Synthetic coding sequence"
  source 1..939: mol_type = other DNA
atgacatcctgtcacattgcggaggagcatatccagaaggtcgcgatttttggcggcacacacggtaacgagctgacaggtgttttcctggtcaaacattggctggagaacggagcagagattcaacggacgggcttggaagtgaaaccctttattactaacccgagggctgtgaaaaagtgtactcgttatatagactgcgatttgaaccgcatatttgacctcgagaacttgggcaagaaaatgtccgaagatctgccgtatgaagtccgaagagcccaggagatcaaccatctgttcgggccaaaagatagcgaagacagctacgacatcattttcgacctccataatacgacgagtaacatgggatgcaccctcatccttgaggattcgcgtaataatttccttatacagatgttccactacatcaagacctctttggctcctcttccttgctatgtctacctcatcgagcacccctccctgaaatacgccaccacccgttcaattgccaagtatcctgtgggtatagaggtgggaccccagccacagggggttctaagagctgacatccttgatcaaatgagaaagatgataaagcacgctctggacttcattcatcattttaacgagggtaaagaattccccccgtgtgcaattgaagtgtacaaaattatcgaaaaagttgattacccccgggacgagaatggtgagatcgcagccattatccaccccaatttgcaggatcaggattggaagccgttacaccccggagaccctatgtttctgacgcttgacggtaaaaccattcccctcggcggcgattgcaccgtgtaccccgtgtttgttaacgaggcggcttactatgaaaagaaggaggcttttgccaagactactaaacttacgctaaatgcgaagtctataagatgctgcctgcat

SEQ ID NO: 7183 - DNA, 939 bp, synthetic construct
  misc_feature 1..939: note = source = /note="Description of Artificial Sequence: Synthetic coding sequence"
  source 1..939: mol_type = other DNA
atgaccagctgccacattgccgaggaacacatccaaaaggtcgcaattttcgggggaacgcatgggaacgaacttaccggagtgttccttgtgaaacactggctggagaacggagcagaaatccagagaactggactggaggtgaagccgttcattaccaatccccgcgcggtcaagaaatgcactcggtacatcgattgcgacctgaaccggatcttcgacctcgaaaatctggggaagaagatgtcggaggacctgccgtacgaagtcagaagagcccaagaaatcaaccacctgttcggaccaaaggactcagaagatagctacgatatcatcttcgacttgcacaacaccacctctaacatgggatgtactctgatcctggaagattcccggaacaacttcttgatccaaatgtttcactacatcaagaccagcctggctcccctcccgtgttacgtgtacctcatcgaacacccaagcctgaagtacgccactactcgctcgattgcaaagtacccggtcggaatcgaagtcggtccgcaacctcaaggggtcctgagagcggacatcttggaccagatgagaaagatgatcaaacacgcgctggacttcatccaccactttaacgagggtaaagagttccccccgtgcgctatcgaggtgtacaagatcatcgaaaaggtggactacccacgggacgaaaacggcgagattgctgccatcatccacccaaacctccaagatcaggactggaagcctctccacccgggcgatccgatgtttctgacgctggacggaaagaccatcccgcttggaggcgactgcaccgtttaccccgtgttcgtgaatgaagcagcttattacgagaagaaagaagcattcgcaaagaccaccaagctgactttgaacgcgaagtcgatcagatgctgcctccac

SEQ ID NO: 7184 - DNA, 939 bp, synthetic construct
  misc_feature 1..939: note = source = /note="Description of Artificial Sequence: Synthetic coding sequence"
  source 1..939: mol_type = other DNA
atgacctcttgtcacatcgccgaagagcacatacagaaagtcgccatttttggaggtactcacgggaacgagctgacaggcgtattcttggttaagcactggctagagaatggagcagagattcagcgcacggggctagaggtgaaaccattcataaccaacccgcgagcagtgaagaagtgtactcggtacattgattgcgacctgaatcgcattttcgacctggagaatctgggtaagaagatgagtgaagatctcccatacgaagtacggagggcccaagagatcaaccatctcttcggccccaaggactctgaagatagttacgacattatattcgacctgcacaacaccaccagcaatatgggatgcacattgatcctagaggatagtagaaacaactttctcattcagatgtttcattacatcaagacttctctcgcaccccttccatgttacgtgtaccttatcgagcacccgagtctcaagtacgctaccacacgctctatcgccaagtacccagtggggatcgaggtcggcccccagccccaaggtgttctcagagcagacattctggaccagatgagaaaaatgatcaaacacgccttggatttcatacatcactttaacgagggcaaggagttccccccatgcgctatcgaagtgtacaagatcatcgaaaaggtggactaccccagggatgaaaacggtgagatagccgcaataatacatcccaacttgcaggatcaagactggaagccactgcacccaggcgacccaatgtttttgacattggatgggaaaaccatcccactgggcggggattgcacagtgtaccccgtgttcgtgaatgaggcggcatactatgagaagaaagaggcgttcgccaagaccaccaagttgacgctgaacgcgaagagtattcgctgttgcctgcac

SEQ ID NO: 7185 - DNA, 939 bp, synthetic construct
  misc_feature 1..939: note = source = /note="Description of Artificial Sequence: Synthetic coding sequence"
  source 1..939: mol_type = other DNA
atgacttcatgtcatatagccgaagagcatatccagaaggtggccatttttggcggcacgcatggaaatgaactcactggagtgttccttgtcaaacactggcttgaaaacggggccgagattcaaaggaccggacttgaagtgaaaccatttatcaccaatcctcgagccgtgaagaaatgtactaggtacatagattgcgatctgaacagaatcttcgatctggaaaacctcggaaaaaagatgagcgaggacctgccttacgaggtccgccgagcacaagagattaatcatttgtttgggccaaaagatagcgaggactcctatgacatcatattcgaccttcacaacacgacttcgaacatgggttgcacccttatccttgaagattcacggaacaactttctgattcagatgttccattacatcaagacgtccctggcaccacttccgtgttacgtgtaccttattgaacatccatctctcaagtatgcaactactcgctcaattgcaaagtatccagtcggaattgaagtgggtccacaaccgcagggagtgctcagagcagatatcctcgatcagatgcgtaagatgataaagcatgccctggactttatccatcacttcaatgagggcaaagagtttcccccatgtgccatcgaggtatacaagattattgagaaagttgactacccgagagatgagaatggtgagattgcagctatcattcacccgaacctccaggaccaagactggaagccactgcaccctggcgacccgatgttccttacccttgacggtaagaccattcccctgggtggagactgtactgtgtacccagtctttgtgaacgaagctgcctactacgagaagaaggaagcatttgccaagaccaccaagttgaccctgaatgcaaaatcgatccgctgctgtctccac

SEQ ID NO: 7186 - DNA, 939 bp, synthetic construct
  misc_feature 1..939: note = source = /note="Description of Artificial Sequence: Synthetic coding sequence"
  source 1..939: mol_type = other DNA
atgacgagctgtcatatcgctgaggaacacatccagaaggtggctatattcggaggcacccacggaaatgaactgacaggcgtgtttctcgttaagcactggcttgagaatggcgccgagatccagcggacaggtctggaggttaagccttttattactaatccgagggccgtgaagaagtgcactcggtacattgactgcgacctcaataggattttcgatctggagaacctcggaaaaaagatgtcggaggatctgccttatgaggtcagaagagctcaggagattaatcacctgtttggacctaaagattccgaagattcttatgacattatcttcgacctgcacaataccacatcaaatatgggctgcacattaattttggaggattcacgaaataactttcttatacagatgtttcattacataaagacctctctggcgcccctgccctgttatgtgtacctgatcgagcatcccagtctgaaatacgcaactaccagatctatcgctaaataccccgtgggtattgaggtcggcccacagcctcagggtgtgctcagggcagatatacttgatcagatgcgcaaaatgataaagcatgccctcgactttatccatcatttcaacgagggaaaagagttccccccttgtgctatagaagtatacaagattatagaaaaggtggactaccctagagatgaaaacggcgaaattgccgcgattatccaccccaacttacaggatcaggattggaaacccctccatccaggggaccccatgttcctcacccttgacgggaaaaccatccctctggggggcgactgcaccgtgtaccccgtttttgtcaatgaagcagcatattatgagaagaaagaggcgtttgcaaaaacaacaaagctgaccttaaatgcgaaatcaataagatgctgcctgcat

SEQ ID NO: 7187 - DNA, 939 bp, synthetic construct
  misc_feature 1..939: note = source = /note="Description of Artificial Sequence: Synthetic coding sequence"
  source 1..939: mol_type = other DNA
atgacgtcgtgtcatatagcggaagaacatatacaaaaagttgcgatatttggtggtacgcatggtaatgaattaacgggtgtttttctagtaaaacattggctagaaaatggtgcggaaatacaacgtacgggtctagaagttaaaccgtttataacgaatccgcgtgcggttaaaaaatgtacgcgttatatagattgtgatttaaatcgtatatttgatctagaaaatttaggtaaaaaaatgtcggaagatctaccgtatgaagttcgacgagcgcaagaaataaatcatctatttggtccgaaagattcggaagattcgtatgatataatatttgatctacataatacgacgtcgaatatgggttgtacgttaatactagaagattcgcgaaataattttttaatacaaatgtttcattatataaaaacgtcgctagcgccgttaccgtgttatgtttatttaatagaacatccgtcgctaaaatatgcgacgacgcgttcgatagcgaaatatccggttggtatagaagtaggtccgcaaccgcaaggtgttttacgtgcggatatactagatcaaatgcgaaaaatgataaaacatgcgttagattttatacatcattttaatgaaggtaaagaatttccgccgtgtgcgatagaagtatataaaataatagaaaaagttgattatccgcgagatgaaaatggtgaaatagcggcgataatacatccgaatttacaagatcaagattggaaaccgttacatccgggtgatccgatgtttttaacgctagatggtaaaacgataccgctaggtggtgattgtacggtatatccggtttttgtaaatgaagcggcgtattatgaaaaaaaagaagcgtttgcgaaaacgacgaaattaacgctaaatgcgaaatcgatacgatgttgtctacat

SEQ ID NO: 7188 - DNA, 939 bp, synthetic construct
  misc_feature 1..939: note = source = /note="Description of Artificial Sequence: Synthetic coding sequence"
  source 1..939: mol_type = other DNA
atgacatcgtgccacattgctgaggagcatatacagaaggtggcgatcttcggggggacacatggcaatgaactgactggcgtttttctggttaagcactggctggagaacggtgccgagattcagcggactggactcgaagtaaaacctttcattaccaacccccgagcagtcaagaagtgtacgcgatacatcgactgcgatttgaataggatatttgatctggagaacttgggcaagaagatgtctgaagatctgccctatgaggtacgccgggcacaggagatcaatcatctgtttgggccaaaggatagtgaagatagttacgatatcatctttgacctgcacaatacgacaagcaacatggggtgtaccctcatcctagaagattcacgaaacaatttcctgatccagatgttccattacatcaagacttccttggcgccactcccttgctacgtctatttgattgagcacccgagcttgaaatacgccacgacccgaagcattgctaagtaccctgtcgggatcgaggtaggtcctcagccgcagggcgtactgagagcagacattttggaccagatgcggaagatgataaaacacgccctggactttatccatcactttaacgaagggaaagagtttcctccgtgtgccatcgaagtctataaaataatcgagaaggtagattaccctcgggacgaaaatggagagatcgccgctatcattcacccgaacctgcaagaccaggactggaaacctttgcatcctggcgatccaatgtttctgacgctggacggcaaaacaattcctctgggaggggattgtaccgtatatccagtctttgtgaacgaagctgcctactatgaaaagaaggaagcattcgctaagaccacgaagctgacacttaacgcgaagtccatccggtgttgcctccac

SEQ ID NO: 7189 - DNA, 939 bp, synthetic construct
  misc_feature 1..939: note = source = /note="Description of Artificial Sequence: Synthetic coding sequence"
  source 1..939: mol_type = other DNA
atgacttcatgccatatcgcagaggaacacatccagaaagtggctatcttcggtgggactcatggaaacgagctcacgggagtctttctggtgaagcattggctcgaaaacggagccgaaatccagcgcaccgggctcgaagtcaagccgtttatcaccaaccccagagcggtcaaaaagtgtacgagatacatcgactgcgacctgaaccgcatcttcgatctggaaaaccttggaaagaagatgagcgaagatctcccatacgaggtccggcgtgcgcaagaaatcaaccacttgttcggccctaaagattcggaggactcgtacgatatcatattcgacctgcacaatactacctcgaacatgggatgcaccctgatcctggaggacagccgcaataactttctcatccagatgttccattacatcaagactagcttggcgccactgccttgttacgtgtacttgatcgaacacccatcgttgaagtacgcaaccactcggagcattgctaaatacccagtgggaatcgaggtgggaccacaacctcagggagtgttgcgcgctgacatcctggatcaaatgcgcaaaatgatcaaacatgccctggatttcatccaccacttcaacgaggggaaagagtttcccccctgtgcgatcgaagtgtacaagataatcgaaaaggtggattacccacgggacgaaaacggcgaaatcgcagcaattatccatccgaatctccaagaccaggactggaaaccgctgcaccctggcgacccaatgttccttaccctcgatggaaaaacgatcccgctgggaggcgactgtaccgtctacccggtctttgtgaacgaagcggcctactacgagaaaaaggaagcattcgctaagactactaagctcaccctgaatgcgaagtccatccgctgctgcctccat

SEQ ID NO: 7190 - DNA, 939 bp, synthetic construct
  misc_feature 1..939: note = source = /note="Description of Artificial Sequence: Synthetic coding sequence"
  source 1..939: mol_type = other DNA
atgactagctgccacatcgcagaggagcatatccagaaagtagctattttcggcgggacccacggcaatgagctgaccggcgtgtttctcgtcaaacactggctggagaatggagccgaaatccagaggactggcctggaggtcaaacccttcattaccaatccccgcgcagtcaagaaatgcacacgatatatcgattgcgatcttaacaggattttcgatcttgaaaatctgggaaagaagatgagcgaagaccttccctatgaggttagacgtgcacaagagattaatcacctatttgggccaaaagactctgaggatagctacgacattattttcgatctccataacaccacctctaacatggggtgcacattaatcttagaggattctaggaacaatttcctgattcaaatgttccattatattaagacctctttggcgcctctgccctgctacgtatacctgatcgagcacccttctctgaagtacgccaccaccagaagcatcgctaaatacccagtggggattgaggtaggacctcagccacagggggtattacgggctgatatcttagaccagatgcgaaagatgatcaaacatgcccttgattttattcatcattttaatgaagggaaggagttccctccttgtgctatcgaggtgtacaagatcattgagaaggtggattaccctagagatgaaaacggtgaaattgctgcgatcattcatcccaaccttcaagaccaggattggaagccactgcaccctggggatcctatgtttttgaccttagatggtaagacaattcccttgggcggagattgtacagtgtatcctgtgttcgtgaacgaagcagcttattatgagaagaaagaggcattcgctaagacgacgaagctgaccctcaatgcaaaaagcattaggtgctgtctgcat

SEQ ID NO: 7191 - DNA, 939 bp, synthetic construct
  misc_feature 1..939: note = source = /note="Description of Artificial Sequence: Synthetic coding sequence"
  source 1..939: mol_type = other DNA
atgacctcctgtcacatagcagaagaacatatacagaaggtggcgatttttggcggaacgcacggtaatgaactcaccggagtctttctggtgaagcactggcttgagaacggagccgagattcaaagaaccggactcgaagtgaagccctttatcactaacccacgagccgtcaaaaagtgtacccggtacatcgactgcgacctgaataggattttcgatctggaaaatctcggaaaaaagatgtctgaggacctgccatatgaggtccgcagagcccaagaaatcaatcatctctttggccctaaagattccgaggatagttacgatatcatttttgaccttcataacaccacctccaacatgggatgtacgcttatactggaggattccaggaataactttctcattcaaatgtttcattacatcaagacctcccttgcccctcttccttgctacgtgtacttgattgaacatcctagcctgaaatacgcaaccacccggtcgatcgcgaagtacccagtgggcattgaggtcgggccacaacctcagggagtcctgcgggcagacatcctcgatcaaatgagaaagatgattaagcatgcactggactttattcatcactttaatgaaggaaaagaatttccgccttgtgccatcgaagtgtacaagatcattgagaaggtcgactacccgcgagacgaaaatggcgaaatagccgccatcattcatcctaatcttcaggaccaggattggaagccactccatccaggggatcccatgtttctcactctggatggtaaaactattcccctggggggtgattgcaccgtgtaccctgtgttcgtcaacgaagcggcatactacgagaagaaggaagcattcgcgaaaaccacgaagctgaccctgaacgcaaagagcatcaggtgttgtctgcac

SEQ ID NO: 7192 - DNA, 939 bp, synthetic construct
  misc_feature 1..939: note = source = /note="Description of Artificial Sequence: Synthetic coding sequence"
  source 1..939: mol_type = other DNA
atgacctcgtgtcacatagcggaagaacatatacaaaaagttgcgatttttggagggacccacgggaacgagcttactggtgtgttcctggtgaagcactggcttgagaatggtgcagaaatccagcgcaccgggcttgaagtcaaaccattcattaccaatcctagagctgtgaagaagtgcactaggtacattgattgcgacctgaaccggatctttgaccttgagaacctgggaaagaagatgtcggaggaccttccatacgaggttagacgagcccaggagattaaccatctgtttggaccaaaggactctgaagattcttatgatatcattttcgacctccacaacaccacctccaacatgggatgtactttgatactggaggatagccgcaataacttccttattcaaatgtttcattacattaagacgtcacttgcacctctcccctgctacgtgtacctcatcgagcacccttcgctcaagtacgccaccactcggagcattgctaagtacccagtcggtatcgaggtggggcctcagcctcaaggagtgctgcgcgctgatatacttgatcaaatgcggaagatgattaagcacgcgctcgactttattcatcatttcaacgaaggtaaagaatttcctccctgtgcaatcgaagtctacaaaatcatcgagaaagtggattacccaagggacgagaacggagaaattgccgcgatcatccatcctaatctgcaggatcaagattggaagccgctgcaccctggtgaccctatgtttcttaccctcgatggaaagactatcccattgggcggtgattgtactgtctatccagtctttgtgaacgaagccgcatactatgagaagaaggaagccttcgcaaaaacgaccaagctgacccttaatgcgaagagtatcaggtgttgtctgcac

SEQ ID NO: 7193 - DNA, 939 bp, synthetic construct; identical to SEQ ID NO: 7151
  misc_feature 1..939: note = source = /note="Description of Artificial Sequence: Synthetic coding sequence"
  source 1..939: mol_type = other DNA

SEQ ID NO: 7194 - DNA, 939 bp, synthetic construct
  misc_feature 1..939: note = source = /note="Description of Artificial Sequence: Synthetic coding sequence"
  source 1..939: mol_type = other DNA
atgacatcctgccacatcgccgaggaacatatacagaaagttgccattttcgggggaacacatgggaatgaattaactggggtgttcctagtgaagcattggttggagaacggtgcggaaatccagagaactggacttgaagtgaagcccttcattacgaacccccgcgctgtcaagaagtgtacccgctatattgactgtgatctgaaccggattttcgacctggaaaatctgggcaagaaaatgagcgaagatcttccctacgaagtccgccgtgcgcaggaaattaaccatctgttcggtcccaaggactccgaggatagctatgacattatctttgaccttcataacactacctcgaacatgggatgtaccttgatactggaggactcccgcaacaattttctcatacagatgttccattatattaagacatcccttgcgcccctcccctgctatgtctatctgatcgagcacccgtcactgaagtacgcaacaacaagatccatcgccaagtatccagtgggcattgaggtgggaccccagccacagggcgtcctacgtgccgatatcttagaccaaatgcggaaaatgatcaagcacgccctggacttcatacatcattttaacgagggaaaagagttccccccctgtgcaatcgaggtatacaagattattgaaaaggttgattacccacgcgacgaaaacggcgagatagccgcaatcatacatccaaatctccaggaccaggactggaagccccttcaccctggcgatccgatgttcctcacactggatgggaagaccatcccacttggaggtgattgcacagtataccctgtgttcgtcaacgaagccgcctactatgagaagaaggaggcgttcgccaagacaactaagcttactcttaacgccaagtctataagatgttgcctgcac

SEQ ID NO: 7195 - DNA, 939 bp, synthetic construct
  misc_feature 1..939: note = source = /note="Description of Artificial Sequence: Synthetic coding sequence"
  source 1..939: mol_type = other DNA
atgacttcctgtcatatcgcagaagagcatatacagaaagtagctatctttggaggaactcatggaaatgagttgacaggggtgtttctagtaaaacactggctggaaaacggggccgaaatccagcgaacaggactcgaagtcaagcctttcataactaaccctcgcgctgtcaagaaatgtactaggtatatagattgcgaccttaacagaatatttgatcttgaaaacttggggaaaaaaatgtctgaagacctcccatacgaagtgcggcgcgcccaggaaatcaaccatctgttcggacccaaggacagtgaagatagttacgatatcatcttcgatctgcataatactacttccaacatgggatgcactcttatcctcgaagattctcgcaacaactttctaatacagatgtttcattatataaaaacttctctggccccactcccatgttatgtgtatctcatcgaacatcctagtctcaagtacgcaacaactagatctatcgccaaatatcccgttgggatcgaagttgggccacagccccaaggggtgttacgggccgatatactagatcagatgagaaagatgattaaacacgcactcgattttatccaccattttaacgaagggaaagaattccccccctgcgccatcgaagtttataagatcatcgagaaagttgattacccccgggatgagaacggagaaatagcggcaatcattcacccaaacctgcaggatcaggattggaaaccactgcatcccggggatcccatgtttctcacacttgatgggaaaactattcccttaggaggggattgtacagtataccctgtgtttgtgaacgaagcagcttactatgaaaagaaagaagcttttgccaagacgactaagctaactctgaacgccaaatcaatacgctgttgtttacac

SEQ ID NO: 7196 - DNA, 939 bp, synthetic construct
  misc_feature 1..939: note = source = /note="Description of Artificial Sequence: Synthetic coding sequence"
  source 1..939: mol_type = other DNA
atgacatcttgccatatcgccgaagaacacatccagaaagttgccatcttcggtggaacccacggcaacgagttgactggcgtcttcctagtgaagcattggctggaaaacggggcagaaatacagaggaccgggctggaagtaaagccttttataacgaacccacgtgccgttaagaaatgcactagatatattgactgtgacctcaaccgtatatttgatttggagaatcttggcaagaagatgtctgaagatctaccttacgaagtacggagagcccaggagatcaatcacctgtttggccctaaagattcagaggactcatatgacatcatcttcgacttgcacaatacgacgagtaatatgggatgcaccctgatactggaggattctcgcaataacttcctgatccaaatgttccattacatcaaaacttctctcgcccccttgccgtgttatgtctacctaattgaacacccttctctgaagtatgcgaccaccagatccatcgcgaagtatcctgtgggaatcgaggttggtccgcagccccagggggtgttgcgtgcggacattctcgaccaaatgcgaaagatgatcaagcatgctttggatttcatacatcattttaatgaaggcaaggaattcccaccctgcgcaattgaagtctataaaataattgaaaaggttgattatccacgggacgagaatggtgaaatcgccgctataatccatccgaatctccaggaccaggattggaagccccttcatcccggtgatcccatgtttcttacactggatggaaagaccatccccctagggggtgattgcacggtttaccctgttttcgtgaatgaggcagcttattatgagaaaaaagaggcttttgcaaaaaccacaaaattgactctcaacgctaagtcgatacgctgttgccttcac

SEQ ID NO: 7197 - DNA, 939 bp, synthetic construct
  misc_feature 1..939: note = source = /note="Description of Artificial Sequence: Synthetic coding sequence"
  source 1..939: mol_type = other DNA
atgacctcctgccacatcgcagaggagcatatccagaaggtggcaatctttggcggaactcacgggaatgaactgaccggggtattcttggtgaaacattggttagagaacggagcagagattcaaaggacaggtctggaggtcaaacctttcattaccaaccccagggctgtgaagaagtgcacgaggtatattgactgcgatctcaacaggatcttcgatctggaaaaccttggcaagaaaatgtccgaggacctgccatacgaagtgaggcgcgctcaggagatcaatcatctttttggtccaaaggactccgaggactcgtatgacatcattttcgatctgcacaacacgacatctaacatgggctgcaccctgatcctcgaggatagccgaaataactttctgatccaaatgtttcattatatcaaaacttctcttgctcctcttccctgctatgtttatctaatcgagcaccccagtctgaaatatgccaccacacgctctatagccaagtaccctgtcggaatagaggtaggcccccagcctcagggcgtcctcagggctgatatcctggaccaaatgaggaagatgatcaagcacgcattagattttattcatcatttcaacgagggcaaagaattccccccgtgcgcaatcgaggtgtataagatcatagagaaagtggactatcctcgggatgagaatggcgaaattgccgcaataatacatccaaacttgcaagatcaggattggaagcctctgcatcctggggatcccatgtttttgacccttgacggcaagacgatcccattgggaggcgactgcaccgtttacccagtttttgttaatgaagctgcatactatgaaaagaaggaggcattcgctaagaccaccaagttgactttgaacgccaaatccattcgctgctgtctgcac

SEQ ID NO: 7198 - DNA, 939 bp, synthetic construct
  misc_feature 1..939: note = source = /note="Description of Artificial Sequence: Synthetic coding sequence"
  source 1..939: mol_type = other DNA
atgaccagctgccatatcgccgaagagcatattcagaaagtggctatttttggcggaacacacggaaatgagctaaccggggtcttcctggtgaaacactggctcgagaacggcgccgaaattcaacggacaggcctagaagttaaacccttcattacaaatcctcgagccgtcaaaaaatgtacccgttatatcgattgtgatctgaatcggatcttcgacctggaaaacttgggcaagaagatgtcagaggatctcccttacgaggttagaagggcacaggagattaatcacctgttcgggcctaaggacagtgaggactcttacgacattatttttgatctgcacaacactacctccaacatggggtgtacactgatcctggaggactccagaaacaacttcctgattcaaatgttccactatataaaaactagtttggcccccctaccatgctacgtctatttaatcgagcatccaagtctgaagtatgctactactcggtctattgctaagtaccctgtggggatcgaggtgggaccccagccccagggggtcttacgcgccgacattctggatcagatgcgcaaaatgatcaagcacgccttggattttatacatcactttaatgagggaaaagagtttcccccctgcgccatcgaagtttacaaaattatcgaaaaggtggattatcccagggatgagaatggcgagatagcagccattattcatcccaacttgcaggatcaggattggaaaccactgcatccaggcgaccctatgtttctgacactggacggcaaaaccatcccactgggcggcgactgtacagtgtaccctgtgttcgtgaacgaggcagcatactatgagaagaaggaggcctttgcaaaaacaaccaagttgacactgaacgccaaatcaatccgttgttgtctgcac

SEQ ID NO: 7199 - DNA, 939 bp, synthetic construct
  misc_feature 1..939: note = source = /note="Description of Artificial Sequence: Synthetic coding sequence"
  source 1..939: mol_type = other DNA
atgacttcgtgccacatcgcagaagagcacatccagaaggtcgccatcttcggagggactcacggtaacgaactgactggcgtctttttggtgaagcattggttggaaaacggcgcagaaattcagcggaccggactcgaggtgaaacccttcatcaccaacccgcgggcagtcaaaaagtgtactcgctacatcgattgtgatctgaatcggatcttcgacctcgagaacctggggaaaaagatgtcggaggatctgccatatgaggtgagacgggctcaggagataaatcacctcttcggcccgaaagatagcgaggattcctacgacattatcttcgacttgcataacactacctccaatatgggctgtacccttatcctggaggattcgcgcaacaactttctcattcagatgtttcattacatcaagacctcgctggcaccactgccatgctacgtgtacctcatcgagcacccgagcctcaaatacgctaccactcgctccatcgcgaagtacccagtgggaatcgaagtcgggccacagccccagggagtgctccgggcggacatcctggaccaaatgcgcaagatgatcaaacatgcgctggacttcatccatcactttaacgagggaaaagaattcccgccctgtgccatcgaggtgtacaagatcatcgagaaggtggactacccacgggacgagaacggcgagatcgcagctatcattcacccgaacctgcaggaccaagattggaagccgctgcacccaggggaccctatgttcctgactctcgacggaaagaccatccctctgggaggagactgcactgtctacccggtgttcgtgaacgaagccgcgtactacgaaaagaaggaagcgttcgctaagaccactaaactgaccctgaacgccaagagcatcaggtgttgccttcat

SEQ ID NO: 7200 - DNA, 939 bp, synthetic construct
  misc_feature 1..939: note = source = /note="Description of Artificial Sequence: Synthetic coding sequence"
  source 1..939: mol_type = other DNA
atgacttcttgccacatcgctgaggaacacattcagaaagtggccatctttggcggtactcacggtaatgagcttactggcgtgttcttggttaaacattggctagagaacggtgccgagattcagcgcacggggctggaggttaagccctttataaccaaccccagagcagttaagaagtgcactcggtacatagactgtgacttgaacaggatcttcgacttagagaatctcggtaagaagatgagcgaggatcttccctatgaggttcggagggctcaggagatcaatcacttgttcggtcctaaggatagtgaggatagttatgacataattttcgacttgcacaacactacctctaatatggggtgtactctgattctagaggacagtcgcaataacttcctgattcagatgttccactacatcaaaactagccttgcgccgctaccctgctacgtctatctcatcgaacacccaagcctaaagtacgctacgacacggtctatcgccaagtatcctgttggcatcgaggtgggacctcagccgcagggcgttctgagagccgatatcctggaccagatgagaaaaatgataaaacacgctttggactttatacaccattttaacgaaggtaaggagttcccaccctgtgccatcgaggtatacaagataatcgagaaggtcgactaccccagagatgaaaacggtgagatcgcagcgattatacaccctaatctacaggaccaggactggaagccgctgcatccaggggatcctatgttccttacattagatggcaagacaattcccctcgggggggattgcaccgtttatccggttttcgtcaacgaagcagcatactatgagaagaaggaggcctttgcgaagacaacaaaactgaccctgaacgcaaagtcaattagatgttgtttgcat

SEQ ID NO: 7201 - DNA, 939 bp, synthetic construct
  misc_feature 1..939: note = source = /note="Description of Artificial Sequence: Synthetic coding sequence"
  source 1..939: mol_type = other DNA
atgacttcctgtcatattgcagaagaacatatccaaaaagtcgccatctttggcggaacccatgggaatgaactcactggagtctttctggtcaagcattggcttgagaacggagcagaaattcagcgtactggactcgaagtgaaaccttttatcactaatcctagagctgtgaaaaagtgtactcgctacattgactgtgatctcaatagaatctttgacctggaaaacctggggaagaaaatgtccgaggaccttccttacgaagtgagaagggcacaggagattaatcacctgttcggaccaaaggattcagaagatagctacgacattatctttgatctgcacaataccacgagcaatatgggctgtaccctgatcttggaagattccaggaacaactttcttatccagatgttccattacatcaaaacttccctcgcgcctctgccctgttatgtgtacctgattgaacatccatcccttaagtatgctaccaccagatcgatagcgaagtaccctgtgggaatcgaagtcggaccccagcctcaaggtgtgctgcgcgcggatattcttgatcagatgcgcaagatgattaagcatgcacttgactttatccaccactttaacgagggaaaggagttcccaccatgtgcaattgaagtgtacaagataattgagaaagtggactaccccagagacgaaaatggagagatcgcagccatcattcatcctaacctgcaagaccaggactggaagccccttcatcctggtgatccaatgtttctgacgcttgatggcaagactatcccactgggcggagattgcactgtgtacccagtgtttgtgaatgaagctgcctactacgaaaagaaggaagcgttcgcaaagaccactaaacttaccctgaacgcgaagtcgatcaggtgctgcctgcat

SEQ ID NO: 7202 - DNA, 939 bp, synthetic construct
  misc_feature 1..939: note = source = /note="Description of Artificial Sequence: Synthetic coding sequence"
  source 1..939: mol_type = other DNA
atgacctcatgtcacatcgccgaggagcacattcagaaggtggctatctttggcggaacgcacgggaatgagctaaccggagtgtttctggttaagcattggctggagaacggggccgagattcagaggactggactggaagtcaaaccattcatcaccaacccacgcgccgtgaaaaagtgtacgcgctacattgactgtgaccttaatagaatttttgacctcgagaatctgggtaagaagatgtccgaagacctgccatacgaagtacgccgggcacaggaaattaaccacctgtttgggcccaaggattctgaggactcctatgatattatttttgacctccataataccacttcaaatatgggctgcaccctgattctagaggactcccgcaacaacttcttgattcagatgtttcattatatcaagacatcgctggccccactgccatgttatgtgtatctcattgagcacccctctctcaagtacgctaccacaaggtcgattgccaagtaccccgtggggatcgaagtcgggccccagccccagggagtgttaagggctgacatcctcgatcagatgaggaaaatgatcaaacacgcactggatttcatccatcacttcaatgagggcaaagaatttcccccttgtgctatagaagtctataagattattgagaaagttgactacccccgtgatgaaaacggcgaaatcgccgcaatcatacaccccaacctacaggatcaggattggaaacctcttcaccctggggatcccatgttcctgaccttagacgggaaaactatcccactcggcggagattgcacagtgtatcctgtgttcgttaatgaggcggcctactacgagaaaaaagaagcctttgccaaaaccacgaaactaaccttgaatgctaagtccatacgatgctgtctccat

SEQ ID NO: 7203 - DNA, 939 bp, synthetic construct
  misc_feature 1..939: note = source = /note="Description of Artificial Sequence: Synthetic coding sequence"
  source 1..939: mol_type = other DNA
atgacgtcctgccacatcgccgaagagcacattcagaaggtcgctattttcggtgggactcatggaaatgaactcaccggcgtgttcctcgtgaaacattggctagagaatggggccgagatacagaggactggcctcgaagtgaagccctttattaccaacccgagagctgttaagaagtgtaccagatacatcgactgtgacctgaaccgcatatttgatctcgagaacctgggcaaaaaaatgagcgaggacttaccctacgaggtaagacgggctcaggaaatcaaccatttatttggccctaaagattcggaggattcatacgacatcatttttgacctgcataacaccacaagcaacatgggctgtactctgatccttgaggattcacgcaataattttctcatccagatgttccactatatcaaaaccagtcttgccccattgccctgttacgtttatctgatcgagcaccccagtctgaagtacgcaactacccgcagtatcgccaaatatccagtgggaatcgaggtcggacctcagcctcagggcgttctcagagctgatatactggaccagatgcgtaaaatgatcaagcatgcactggacttcatacaccacttcaacgaaggaaaggaattccccccctgtgcaatcgaggtgtacaaaatcattgagaaagtggattatccccgagacgaaaacggtgagattgctgcaataattcatcctaatctgcaggatcaggactggaagcctctgcacccaggagaccctatgttcttgacattagatggcaagaccattcctctagggggagattgtaccgtgtacccagtgttcgttaacgaagcagcctattatgaaaagaaagaggcctttgctaagactacgaagctgacgttgaatgcaaaatccatccgatgctgcctccac

SEQ ID NO: 7204 - DNA, 939 bp, synthetic construct
  misc_feature 1..939: note = source = /note="Description of Artificial Sequence: Synthetic coding sequence"
  source 1..939: mol_type = other DNA
atgaccagttgtcatattgccgaagaacatatccaaaaagttgccatctttggagggactcacggtaacgaattgactggagtttttcttgtgaagcattggttggagaatggggcagagatccagcgtaccggcttggaagtgaagcctttcattaccaacccaagggcagtgaagaaatgcacgcgctatattgactgtgatctgaacagaatctttgatctggaaaaccttggcaaaaagatgtccgaagatcttccttacgaagtccggcgtgcccaagagataaatcatctgtttggacccaaggatagcgaggattcctatgatatcattttcgaccttcataacactacctccaacatggggtgtacgctgatcttggaagattcgcgaaacaactttctgatccagatgtttcactacattaagacttccctcgcaccattgccgtgctacgtgtacctgatcgagcatccttcgctgaaatacgctaccactaggagcattgcaaagtacccggtggggatagaggtgggccctcaaccacaaggagtcctccgcgcagacatccttgatcagatgagaaaaatgattaagcatgcgctcgactttatacatcactttaatgagggaaaagagttcccaccgtgtgccatcgaagtgtacaagattattgaaaaggtggactacccaagggatgaaaacggagaaattgcagcaatcatacacccaaatcttcaagatcaggattggaaaccgctccaccccggtgatcccatgttcctgactctggacggtaagactatcccccttggtggcgattgtactgtctaccccgtgttcgtaaacgaagctgcgtactacgagaaaaaggaggcgtttgcaaagactaccaagctgaccttgaatgcaaagtcgattagatgctgtctccat

SEQ ID NO: 7205 - DNA, 939 bp, synthetic construct
  misc_feature 1..939: note = source = /note="Description of Artificial Sequence: Synthetic coding sequence"
  source 1..939: mol_type = other DNA
atgacctcatgtcacattgcagaggaacatattcagaaagtcgcaatctttggaggcacccatggtaacgagctcaccggagtctttcttgtgaagcactggcttgagaatggcgccgaaatacagcgtactggattggaggttaagccctttattaccaaccctcgcgccgtgaaaaaatgcacccgctacattgattgtgacttgaataggattttcgacctggagaacctgggtaagaagatgtctgaagatctcccttacgaagtgagaagggctcaagaaatcaatcatctgttcggccctaaggattctgaagactcttacgacataatatttgacttgcataatacaactagcaacatgggctgcactctgattctggaggactcaaggaacaacttcttgatccaaatgttccattacataaagacctctctggcccctctgccctgctacgtgtacctgatagagcatccctcactgaaatatgcaacaactagaagcattgctaaataccctgttggcattgaggtcggcccccaacctcagggcgtgcttagagcagatatcttggatcaaatgaggaaaatgattaagcatgctctggactttattcaccacttcaacgaaggtaaggagttccccccttgcgccatcgaggtctacaagataattgaaaaagtggactatcccagagatgaaaatggcgagatcgccgctatcattcatcccaaccttcaagaccaggactggaagcccctccacccaggtgaccccatgttcctgacattggatggcaaaaccatcccattgggaggtgattgcacagtgtaccctgtgttcgtgaacgaagccgcctattatgagaagaaggaagctttcgccaaaactacaaagctgaccctgaatgccaaaagcattcgctgttgcctccac

SEQ ID NO: 7206 - DNA, 939 bp, synthetic construct
  misc_feature 1..939: note = source = /note="Description of Artificial Sequence: Synthetic coding sequence"
  source 1..939: mol_type = other DNA
atgacctcttgccatatcgccgaggagcatattcagaaagtggcgatttttggaggtactcacggcaatgagctgacaggggtgtttctggtcaagcattggcttgagaacggcgcggaaatccagcgcaccggactcgaggtgaagcccttcataaccaacccccgtgccgtcaaaaagtgtactagatacatcgattgcgatctgaatagaatttttgatttggagaacctcggaaagaagatgagcgaagacctcccttatgaggtgcgacgcgcacaagagataaatcatctgttcgggcccaaggattctgaggacagctacgatatcatttttgacctgcataacacaacttcaaacatggggtgtaccctgatcctcgaagactcacgcaacaacttcctcatccagatgtttcactacatcaagaccagcctcgcccccctgccgtgctacgtgtatctgattgaacacccttccctcaaatacgctacaactaggtcaattgctaagtaccccgtcggaatcgaggtgggaccacagccacagggcgtcttgcgggctgacatcttagatcaaatgcgcaagatgattaagcacgccctagattttatacaccatttcaatgaaggaaaggagtttcctccctgtgcaatagaggtgtataagattatagagaaggtggattaccctcgcgacgaaaatggagagatcgcagccattatccatcccaacctgcaggaccaggattggaagcccctacaccccggcgaccccatgttcctcacactagacggcaagacaattcccctgggcggtgactgtaccgtatatccggttttcgtgaatgaagcagcatactatgaaaaaaaagaggcattcgccaaaactacgaagttaactttaaacgcaaagtctataaggtgctgtcttcat

SEQ ID NO: 7207 - DNA, 939 bp, synthetic construct
  misc_feature 1..939: note = source = /note="Description of Artificial Sequence: Synthetic coding sequence"
  source 1..939: mol_type = other DNA
atgactagctgccacatcgcggaagagcatatacaaaaggtggccatatttggtggaacgcacggcaatgagctgaccggggtgttccttgtgaagcactggctcgaaaatggggcagagattcagcgcaccggactcgaagtaaagccctttattacaaatcccagagcagttaaaaagtgcactaggtatatcgactgtgacctgaaccgcatttttgaccttgaaaacctggggaagaaaatgtctgaagatcttccctacgaggtccgccgagcacaagagatcaaccacctgtttggccccaaagactcagaagacagctacgatatcatatttgacctgcataacaccacgtccaacatgggatgcacactgattctcgaagactctaggaataattttttgatccagatgtttcactatatcaagacgagcctggcccccctcccctgttacgtctacctcatcgaacacccaagcctgaaatatgccacaaccaggtccattgcgaaataccccgtgggcattgaagtcggaccccagccccagggcgtgttgagggccgacattttggaccagatgcggaagatgataaaacatgctctcgattttatccaccacttcaatgaggggaaagagttccccccatgtgccatcgaggtttataaaatcatcgagaaggtggactaccctcgagatgagaatggcgaaatcgctgcaattatccatccaaacctgcaggatcaagactggaagccccttcatccaggcgatccaatgtttctgaccctggacggcaagacgatccccctcggcggagattgcactgtgtaccctgttttcgtaaacgaagcagcttactatgagaagaaagaggctttcgcgaagacaactaagcttaccctcaatgcgaagagtatcaggtgttgtctgcac

SEQ ID NO: 7208 - DNA, 939 bp, synthetic construct
  misc_feature 1..939: note = source = /note="Description of Artificial Sequence: Synthetic coding sequence"
  source 1..939: mol_type = other DNA
atgacatcctgccatatcgcggaagaacatatccagaaggtggctatcttcggcgggacccatggaaacgaactcactggggttttcttggttaaacactggctcgaaaatggggctgaaatccagcggacaggcctagaggtgaaaccttttatcacaaacccgcgtgccgtgaaaaagtgcaccagatatattgactgcgacctaaataggatttttgacctagagaatcttggaaagaagatgagcgaggatttgccctacgaagtgcggagggcacaggagattaatcacctgtttggtcctaaggattctgaagatagctatgacataatattcgatctgcataacacaacaagtaatatggggtgtacgctcattctggaagattcaagaaataatttcctgatccagatgtttcattatatcaagacctctcttgctccgctgccctgttacgtctatctaattgaacacccatctttgaagtatgccaccactagatccatcgctaaataccctgtaggtattgaggttggcccccagcctcagggagttctgagagctgacatactggatcaaatgaggaagatgatcaagcacgccctcgacttcatacatcacttcaacgaagggaaagaatttcctccatgtgctattgaggtgtacaagattatagagaaagtagactatcctcgggacgaaaacggagagatagccgctatcattcatcctaatttgcaggatcaggattggaagcctctccacccaggggacccgatgttccttaccctggatggcaaaacaatccctttagggggagactgcactgtctatcccgtgtttgtgaatgaggcagcgtactacgagaaaaaagaagctttcgcaaaaacaacaaaacttaccctgaatgctaagtcaatccgatgttgcctgcac

SEQ ID NO: 7209 - DNA, 939 bp, synthetic construct
  misc_feature 1..939: note = source = /note="Description of Artificial Sequence: Synthetic coding sequence"
  source 1..939: mol_type = other DNA
atgacttcttgtcacatcgcagaggagcatatccaaaaggttgccatattcggaggcacccatggtaatgaacttacaggtgtattcttggtcaaacattggctagagaatggggcagagattcaacggactgggctggaggtaaaaccattcatcacgaacccaagagctgtcaaaaagtgtacaagatatatcgattgtgatttgaatcggatttttgatttggagaaccttgggaaaaaaatgagcgaggatttaccatatgaagttagacgtgctcaagaaatcaatcatctcttcggtcccaaagactctgaggattcttacgatataatttttgatttacataataccacatctaacatgggttgcacacttattttggaggatagcaggaacaacttcttgatacaaatgttccattatattaaaactagtctcgcaccacttccatgctacgtttatttgatcgaacatccatctctcaaatatgctaccactagatcaatagcaaagtaccctgtgggtattgaagttggtccacaaccgcagggagttcttagagctgatatccttgatcagatgaggaaaatgatcaagcatgctttggactttatccatcactttaatgaaggaaaggagtttcctccatgcgcaattgaggtgtataagattatagagaaagtggattatcctagggatgaaaacggagagatcgctgccattattcatcctaatcttcaagatcaagattggaagccactgcatcctggcgatccaatgttccttactctggatggcaagaccatcccactgggcggtgattgtaccgtctatccggtttttgttaacgaggccgcttactatgaaaagaaagaggcttttgctaagacaaccaaattaacgcttaatgctaaatcaataagatgttgtttgcat

SEQ ID NO: 7210 - DNA, 939 bp, synthetic construct
  misc_feature 1..939: note = source = /note="Description of Artificial Sequence: Synthetic coding sequence"
  source 1..939: mol_type = other DNA
atgacctcctgtcatattgccgaagagcatattcagaaggtggcaatctttggtgggactcatggaaacgaacttactggggtctttctggtgaagcattggctcgagaacggcgcagaaattcaaagaactggactggaagtgaagccgttcattacgaacccacgtgcagtgaagaagtgtaccagatacatcgactgtgacctgaacagaatctttgaccttgagaatcttggaaagaagatgtccgaagatctcccctatgaagtgcggcgggctcaagaaatcaaccaccttttcggaccaaaagactcggaagatagctacgacatcatcttcgacttgcacaatactactagcaacatgggatgcactcttatccttgaggattcccggaacaactttcttattcaaatgttccactacatcaagacctcgcttgcaccactcccatgctacgtgtacttgattgaacatcctagcttgaaatacgcaacgactagatccattgccaagtaccctgtgggtattgaggtgggcccgcagcctcaaggtgtccttcgggcagacatcctcgaccaaatgcgtaagatgataaagcatgccctcgatttcattcaccatttcaatgaaggaaaagagtttccaccatgtgccatagaggtctacaagatcattgagaaggtggattacccaagggacgagaacggagagattgcggcaattatccatcctaacctgcaggatcaggattggaagcctcttcatcccggagatcctatgtttctgactcttgatggtaagaccatccctctgggaggagactgtactgtctacccagtgttcgtgaatgaagcggcctattacgagaagaaggaagccttcgccaagaccaccaagctcacccttaacgccaaatcaatccgttgctgtctccat

SEQ ID NO: 7211 - DNA, 939 bp, synthetic construct
  misc_feature 1..939: note = source = /note="Description of Artificial Sequence: Synthetic coding sequence"
  source 1..939: mol_type = other DNA
atgacttcctgtcatatcgcagaagagcacatccagaaggtcgcaattttcggcggaacccacggaaacgagctgaccggggtgttcctggtgaagcactggctggagaacggcgctgagatccaacgaaccggactcgaagtgaaaccattcatcaccaaccctcgggcggtgaagaagtgcacgcggtacatcgattgcgacctcaaccggattttcgaccttgaaaacttggggaagaaaatgagcgaagatctgccatatgaggtgaggcgcgcgcaggagatcaatcacctgttcggtccgaaagacagtgaggactcgtacgacataatcttcgacctgcacaataccacttcaaatatgggatgcacgttgatcttggaagattcaagaaataactttctgattcaaatgttccactacataaagacgtccctggcgcccctcccttgctacgtgtacctgattgaacacccgagcctgaagtacgcgactacccggtcaatcgcaaaatacccggtcggaatcgaggtcggcccgcaaccacagggggtgctgagagccgatatcttggatcaaatgcgcaagatgatcaagcatgctctggatttcatccaccatttcaacgaaggtaaggagttccctccgtgcgctatcgaagtctataagattatagaaaaggtggactaccctagagatgaaaacggagaaatcgcagctatcatccacccaaatctccaggaccaggattggaagcctctccatccgggtgaccccatgttcctgacgttggatggaaagactatcccgcttggaggcgactgtactgtgtacccagtgtttgtcaatgaagcggcctactacgagaagaaagaggcctttgccaagactactaaactcaccctgaatgccaagtctattcgctgctgccttcat

SEQ ID NO: 7212 - DNA, 939 bp, synthetic construct
  misc_feature 1..939: note = source = /note="Description of Artificial Sequence: Synthetic coding sequence"
  source 1..939: mol_type = other DNA
atgacctcttgtcatattgctgaggaacatatccaaaaggtggcgatcttcggaggaacacacggtaacgaattgactggtgtctttttggtgaagcactggcttgaaaacggagctgaaatccagcgtacagggcttgaagttaaaccatttatcacaaacccaagggctgtcaaaaagtgcactcggtacatagattgtgatcttaaccgcatcttcgacctggaaaatttggggaagaaaatgagtgaggatctgccatacgaggtcaggagagcacaggagatcaaccacttgtttggacccaaagatagtgaggactcatacgacatcatatttgacctgcacaataccacctccaacatgggatgcactctaatccttgaggattctcggaacaatttcctcatccagatgttccattacatcaaaactagcttggcacctttaccttgctacgtgtacctgatagaacacccttctctgaaatatgccaccaccaggagcatagcaaaatatcctgtgggcattgaggtcggcccccagccccagggagtcttgcgcgccgacatccttgaccagatgcgcaagatgataaaacatgctctcgatttcattcatcattttaacgagggcaaggaattcccaccctgcgccattgaagtgtacaaaattatagaaaaggtggattaccccagggacgagaatggtgagatcgccgccatcatccacccaaatctgcaggatcaagattggaaacccctgcatccaggtgaccctatgttcctcacactcgacggcaagaccatcccccttgggggagactgtaccgtctaccctgtattcgtgaacgaggcggcctactacgagaagaaggaagcgttcgcaaaaactacaaaactgaccttgaacgcaaagtcgatccgatgttgccttcac

SEQ ID NO: 7213 - DNA, 939 bp, synthetic construct
  misc_feature 1..939: note = source = /note="Description of Artificial Sequence: Synthetic coding sequence"
  source 1..939: mol_type = other DNA
atgacctcctgtcacattgctgaagaacacattcagaaggtggcgatctttggcggcacccatggaaatgagttaacaggagtgtttcttgtgaagcactggcttgaaaacggcgccgaaatccagcggacgggcctagaggttaaacccttcattacaaaccctcgagctgtaaaaaagtgcaccagatatatcgattgcgacctgaataggatttttgacttagagaacttaggcaaaaagatgtccgaggacttgccttacgaggtgcggcgcgcccaggaaattaatcatctttttggcccaaaagacagcgaggattcttatgacatcatcttcgatctgcacaacaccacgtccaatatgggctgcacactgattctcgaagattcaagaaataattttctcatccagatgttccactacataaagacaagtctagcccctctgccatgttacgtatacttgatcgaacaccctagcctgaagtacgcaaccactagatccattgcgaaatatcccgtgggaattgaagtcggcccacaaccccagggggtgctgagggctgatatcctcgatcagatgaggaagatgatcaagcatgcgttggacttcatccatcactttaacgaagggaaggagtttcctccatgcgccatcgaggtatacaaaatcattgagaaagtcgactaccctagggatgagaacggagagattgccgctattatacatcccaatctccaggatcaggattggaaaccattgcaccccggtgatccaatgtttctgacgctggatggtaagaccattcccctgggcggggactgcacagtctatccagtgtttgtaaacgaagctgcctattacgaaaagaaagaggccttcgccaaaacaactaagctgacgctcaatgctaaaagcatacggtgttgtttacac

SEQ ID NO: 7214 - DNA, 939 bp, synthetic construct
  misc_feature 1..939: note = source = /note="Description of Artificial Sequence: Synthetic coding sequence"
  source 1..939: mol_type = other DNA
atgacttcttgccatattgccgaggaacacatccagaaagttgcaatcttcggagggacacatgggaatgagttgactggagtcttcctagtgaaacattggctcgaaaatggggcagagatccagcggactgggctcgaagtcaaacctttcataacaaatcctagagccgtaaaaaaatgcacacgatatatcgattgtgatctgaataggatattcgacctcgaaaacttgggaaagaaaatgtcagaggatttaccatatgaagtccggagagctcaggaaatcaatcatctctttgggcctaaggatagtgaagattcatatgatataatctttgatcttcataacactacttcgaatatgggatgtactctcatccttgaggattctaggaacaactttttaatccagatgtttcattatataaaaacgtccctagctcctttgccctgttatgtctacctcatagagcatccatctcttaaatacgctacaactcgcagtattgccaagtatcccgtcgggatagaagtcgggccacagccccagggggtgctgcgggctgatattcttgatcagatgaggaagatgataaagcacgctctcgattttatacatcattttaatgaaggaaaagaattccctccgtgcgccatagaagtgtacaaaataattgaaaaagtcgactacccccgggacgaaaatggagagatagctgctatcattcaccctaatctacaggatcaagattggaaacccctgcacccaggggatccgatgttccttactctagatgggaaaacgatccccctagggggggattgcactgtgtaccccgtcttcgtaaacgaggcggcctattatgaaaaaaaagaagcattcgcaaaaacaactaagcttacactcaatgctaaatccattagatgttgcctgcat

SEQ ID NO: 7215 - DNA, 939 bp, synthetic construct
  misc_feature 1..939: note = source = /note="Description of Artificial Sequence: Synthetic coding sequence"
  source 1..939: mol_type = other DNA
atgacttcctgccatatcgccgaagagcatatccaaaaggtcgccatctttggaggcacccacggaaacgaactcaccggagtctttctggttaaacactggctggaaaacggcgccgaaatccagcgcactgggctcgaggtcaagccgttcatcactaacccccgcgcggtgaagaagtgcactagatacatagattgtgatctcaatcgaattttcgatctggaaaatcttggaaagaaaatgtcagaggacctgccttacgaagtaagacgcgcccaagaaatcaatcacctcttcggaccaaaagattccgaggactcatacgacatcatctttgatctgcataacactacctcgaatatgggatgcaccctcattctggaagattcacggaacaacttcctgatccagatgttccactacatcaaaactagcttggcaccgcttccgtgttacgtgtacttgattgaacacccgtctctcaagtatgcaactaccagatcgattgccaaatacccggtcggcattgaggtggggcctcagcctcaaggagtgctgcgagctgacattctggaccaaatgcgcaagatgatcaagcatgctctggactttatccaccatttcaacgagggaaaggagttcccgccatgcgcaatcgaggtgtataagatcatcgaaaaagtggattacccccgggatgaaaatggggagatagcggctatcatccatccgaacctccaggaccaagattggaagcctctgcaccccggggacccgatgttcttgaccctggatggaaagaccatcccgttgggtggagactgtaccgtgtaccccgtgtttgtcaacgaagcagcatactatgagaagaaggaagcgttcgccaagaccaccaaactcacgctgaatgcgaagtcaattaggtgttgcctccat

SEQ ID NO: 7216 - DNA, 939 bp, synthetic construct
  misc_feature 1..939: note = source = /note="Description of Artificial Sequence: Synthetic coding sequence"
  source 1..939: mol_type = other DNA
atgaccagctgccacatcgcagaagaacatatccagaaggtcgccatattcggggggacacacggcaacgagctgaccggcgtgttcctggttaaacactggcttgaaaacggagcagagattcagcgcacaggtttggaggtcaaaccattcatcacaaatcccagagccgtcaagaagtgcacacggtacattgattgcgatctgaaccgcattttcgatttagaaaatttgggcaagaagatgagtgaggacctgccctatgaagtgcgtcgtgcccaggaaattaaccacctctttggcccgaaagattctgaagatagctacgatattatcttcgatctccacaataccacctccaatatgggttgtacactgattctagaggactcaagaaacaatttcctgatccagatgttccactacattaaaacaagcctagctcctctcccatgttacgtctacttgatagagcacccctcactgaaatatgccactactcgttcgattgcaaagtatccagtggggatcgaagtggggcctcagcctcagggtgtccttcgagcagatatccttgatcagatgagaaaaatgattaagcacgcccttgatttcatacaccatttcaatgaaggcaaggaattccccccctgtgcaattgaggtgtacaagatcatagaaaaagtggattacccaagagacgagaatggggagatagctgccatcatccaccctaatctacaggaccaggactggaaacctctccatcccggcgaccccatgttcctcactctggatggaaagactatccctctgggcggggactgcacagtgtatccagtcttcgtgaacgaggccgcttactacgaaaagaaagaagcgtttgccaaaacgaccaaactgacgctcaacgccaagtccatccggtgctgcctccac

SEQ ID NO: 7217 - DNA, 939 bp, synthetic construct
  misc_feature 1..939: note = source = /note="Description of Artificial Sequence: Synthetic coding sequence"
  source 1..939: mol_type = other DNA
atgacatcatgccacattgccgaggaacacatccagaaggtggccatcttcgggggcactcacggcaatgagttgaccggtgttttcctcgtgaagcattggctggagaatggtgccgagatccagcgaactggccttgaggtgaagccattcatcactaacccccgggctgtcaagaagtgcacgcgctacatcgattgcgatcttaaccgcatcttcgatctcgagaacctgggcaagaagatgagcgaggatttgccgtatgaggtccgccgggcccaggagatcaaccacttattcggacccaaggactcggaggactcgtacgacatcattttcgacttacataacacaacttccaacatgggttgcacacttatccttgaagactcccgtaacaactttctcatccagatgttccactacattaagacctcgctggcgcctctcccgtgctacgtgtatctcattgagcacccctcactgaagtacgcgacaacccgcagcattgccaagtatccagtcggaatcgaggtgggccctcaacctcagggcgtattgcgggcggatatcctggaccaaatgagaaagatgatcaagcacgccctcgattttatccaccacttcaacgagggcaaagagtttcctccctgtgctatagaggtctataagatcatcgagaaagtggactacccccgtgatgagaacggcgagattgccgccatcattcatccgaacctccaggaccaggactggaaacccctccatccaggtgacccgatgttcctgaccctcgacggtaagaccattcccctgggcggggattgtaccgtttaccctgtcttcgttaacgaggccgcttactacgagaagaaggaggcctttgctaagactaccaagctgaccttgaacgctaagtcgattcgttgttgtcttcac

SEQ ID NO: 7218 - DNA, 939 bp, synthetic construct
  misc_feature 1..939: note = source = /note="Description of Artificial Sequence: Synthetic coding sequence"
  source 1..939: mol_type = other DNA
atgacgagctgccatatagctgaagagcatatccagaaagtcgccatatttggaggcacccacggaaacgagttaactggcgtttttctcgtgaagcactggcttgaaaatggagctgagatccagcgaacgggcctggaagtgaaaccattcatcaccaacccaagggctgtcaagaagtgcaccaggtatatagattgcgacctgaaccgtattttcgacttagagaacctcggcaaaaaaatgagcgaggatttaccgtacgaggtgcggagagcccaggaaataaaccatttgttcggccccaaggactccgaagacagttacgatattatttttgacctgcacaacactacttccaatatgggatgcaccctgattctggaggatagtcgtaataacttcctgatccaaatgttccattacataaaaacttcccttgctcccctgccatgctacgtctatctcattgaacatccctcactcaagtacgctacgactcgcagtatcgcaaaataccccgttgggatagaggtgggacctcagccacaaggagttctcagggccgatattttggatcagatgcggaagatgatcaaacacgcgctggatttcatccatcactttaacgaaggcaaggaattcccaccctgcgctattgaggtatataaaatcatagagaaagttgattatccgcgggatgagaatggggagattgccgcgatcatccaccccaatctccaggaccaggactggaagcccttacaccctggagatcccatgtttcttaccttggatggaaagacaatccctttagggggggactgcacagtataccctgttttcgtgaacgaggctgcctattacgagaaaaaggaagccttcgctaagaccacaaaattaacactgaacgccaaaagtatcagatgttgcctccac

SEQ ID NO: 7219 - DNA, 939 bp, synthetic construct
  misc_feature 1..939: note = source = /note="Description of Artificial Sequence: Synthetic coding sequence"
  source 1..939: mol_type = other DNA
atgacctcatgccacattgcagaagagcacatccaaaaggtcgccatcttcgggggcactcacgggaacgagctgaccggagtgttcttggtgaagcactggctggagaatggagccgaaatacagcggactgggctggaggtgaaaccgttcatcaccaacccgcgcgctgtcaagaagtgcacccggtacattgattgtgacctgaaccgaattttcgatctggagaatctcggcaagaagatgtctgaggacctcccttacgaagtgcggcgggcacaggaaatcaaccatctgttcggaccgaaggactccgaggactcgtatgatatcatcttcgacctgcacaataccactagcaacatgggatgcaccctcatcctggaggactcccggaacaactttctgattcagatgttccactatatcaagacctcactcgctccactgccgtgttacgtgtacctgatcgaacatccgtcgctcaaatatgccactactcgctcgatcgcgaaatacccagttggaatcgaagtcggaccgcagccgcagggtgtgctgcgagccgacatccttgatcaaatgcgcaagatgataaagcatgcactggatttcatccatcactttaacgagggaaaggagtttccaccatgcgcgattgaagtctacaaaatcattgagaaggtagactaccctagagatgaaaacggtgagatcgctgccattatccatccaaatcttcaagatcaggattggaagccgctccaccccggtgaccccatgtttctgacccttgacggcaagactattcctctcggcggcgactgcaccgtgtacccggttttcgtcaatgaggccgcatactacgaaaagaaagaagcatttgcaaaaaccaccaaactcactctcaacgctaagtccatccgctgctgtctccat

SEQ ID NO: 7220 - DNA, 939 bp, synthetic construct
  misc_feature 1..939: note = source = /note="Description of Artificial Sequence: Synthetic coding sequence"
  source 1..939: mol_type = other DNA
atgacaagctgccatatcgccgaggagcatatccagaaggttgcgatctttggcggaacccacggcaacgaattgacgggcgtatttctggtcaagcactggctggaaaacggagcggagattcagcggaccggactggaagtgaaaccatttatcacgaatccacgcgcggtgaaaaagtgtacgaggtacattgattgcgatctgaaccggatattcgacctggagaatctaggaaagaaaatgtcggaggatttgccctatgaagtccggcgggcccaggagatcaatcatctgtttggcccgaaagatagcgaagactcatacgatatcatattcgatctgcacaacaccacgtcgaatatgggctgcaccctgattctcgaggatagccgcaacaactttctaattcagatgttccactacattaaaacatccttggcgcccctgccctgctatgtgtatttgatcgagcacccatctcttaaatacgccactacgcgttcgatcgccaagtacccagtcggaattgaggtgggcccgcagccccaaggtgttctgcgagcggatatccttgatcaaatgaggaaaatgatcaagcacgcgttggacttcatacaccactttaatgagggaaaggaattccccccgtgcgctatagaggtctacaagatcatagagaaagtcgattatccacgtgatgaaaacggcgaaatcgctgctattattcaccccaatcttcaggatcaagactggaagcccctgcatccgggagaccccatgttcctcaccctcgatgggaagaccataccgttgggcggcgactgtaccgtgtacccagtgtttgttaacgaagccgcctactacgagaagaaggaggcctttgccaaaacgacaaagcttaccctgaacgccaaatcgatccgatgttgtctgcac

SEQ ID NO: 7221 - DNA, 939 bp, synthetic construct
  misc_feature 1..939: note = source = /note="Description of Artificial Sequence: Synthetic coding sequence"
  source 1..939: mol_type = other DNA
atgacttcgtgccatatcgccgaggaacatatccagaaggtggcaattttcggcggcacccacgggaacgagctgaccggagtgttcctggtgaaacactggctcgaaaacggggccgaaatccaacgaacgggtctggaagtgaagccctttatcactaatcctagggcggttaagaagtgcactagatacatcgactgtgacctcaataggatttttgaccttgaaaatctcggcaagaagatgagcgaggacctgccgtatgaagtgcggcgcgcacaggagatcaaccaccttttcggaccgaaggattctgaggactcctacgacatcatattcgatctgcacaataccacttcaaacatgggttgtaccctcatattggaggattcccggaataacttcctgattcagatgttccattacatcaaaacctccctcgcaccacttccttgctacgtgtacttgatcgaacatccgagcttgaagtacgccactacgcgctcgatcgctaaatacccagtgggcatcgaagtgggaccccagccacaaggtgttctgcgcgcggatatcctggatcagatgcgcaagatgatcaagcatgcgctggactttatccaccatttcaacgagggaaaggagttcccgccatgcgccattgaagtgtacaagattatcgaaaaagtcgactacccgcgggatgagaacggagaaatagcggctatcatccatccaaatctccaagaccaggattggaaacctttgcacccgggcgacccaatgtttctgaccctcgacggtaaaactatcccgctcgggggagattgcaccgtgtacccagtgttcgtgaacgaggccgcctactacgagaaaaaagaagcgtttgccaagacgactaagctgaccctcaacgcaaagtcgatcagatgctgtctccac

SEQ ID NO: 7222 - DNA, 939 bp, synthetic construct
  misc_feature 1..939: note = source = /note="Description of Artificial Sequence: Synthetic coding sequence"
  source 1..939: mol_type = other DNA
atgacttcctgtcatatcgcagaagaacatattcaaaaggtagccatctttggaggcacacacggtaatgagctgaccggcgtgtttctggtaaagcactggttggagaacggggccgagatacagcgcactgggctggaggttaagccatttatcaccaaccctagagctgtcaagaaatgcacaagatacatagattgtgatctgaaccggatcttcgacctggagaacctgggaaaaaagatgagtgaggatctcccctatgaggtgaggcgtgcccaggagataaatcatctatttgggccaaaagattctgaggactcgtacgatattatctttgaccttcataacacaacgtcaaatatgggctgcacactgattctggaggattcacgcaataactttctgatacagatgtttcattacatcaaaacttcactagccccactcccgtgctatgtgtacctgatcgaacatccgtctttgaaatatgccactacccgcagcatcgctaaatatccagtgggaattgaagtcgggcctcagccacaaggagtcttgcgggccgatattctggaccaaatgaggaagatgattaaacacgccctggatttcatacatcatttcaatgaggggaaggagtttcccccttgcgccatcgaggtgtacaagatcatagagaaggtggattaccctcgggacgagaatggcgagatcgctgccataatccaccctaatttgcaagaccaggattggaagccacttcaccccggagatccgatgtttctgaccctcgacggtaagacgatacctctgggcggagattgcacagtttatccagtttttgtaaatgaggccgcatactacgagaagaaagaggcatttgccaagacaaccaaactgaccctgaacgcaaagtcgataaggtgctgtcttcat

SEQ ID NO: 7223 - DNA, 939 bp, synthetic construct
  misc_feature 1..939: note = source = /note="Description of Artificial Sequence: Synthetic coding sequence"
  source 1..939: mol_type = other DNA
atgacttcgtgtcatattgctgaagaacatatccaaaaggtcgcgatttttggaggcactcacggaaacgaattaactggtgtttttctagtaaaacactggctggaaaacggagccgagatccagcgtaccggtctggaagtcaaaccttttattacaaatcctcgcgccgtcaagaaatgtacaaggtacattgactgcgatctgaaccgtatttttgatctggaaaacctgggaaagaagatgtctgaggacctcccttacgaagtccgtcgggcccaggagatcaaccatctgtttgggcctaaggattctgaagacagctacgatattatctttgacctgcataataccactagcaatatgggttgcactcttatcctcgaagactctcgcaacaattttctaatccagatgtttcattacattaagacatctcttgcccccttgccttgttatgtatacttgattgagcatcctagtttaaagtatgccaccacccggtctatagccaagtatccggtgggaattgaagttggtcctcaaccccaaggcgttttacgggcggatatactcgaccaaatgcggaagatgatcaaacacgctctcgacttcatccaccactttaatgagggaaaggaatttcctccctgtgctattgaagtgtataagataatcgagaaggtggactatcctagggatgagaacggggagatcgcagcaataatccaccccaatctccaggatcaggattggaaacccctccaccccggagatcctatgttcctgacactcgatgggaagactatacctctggggggggattgcaccgtgtaccctgtgtttgttaacgaggccgcatattatgagaagaaagaagccttcgccaaaaccaccaaactgactctcaacgcgaaaagcatccggtgttgcttgcac

SEQ ID NO: 7224 - DNA, 939 bp, synthetic construct
  misc_feature 1..939: note = source = /note="Description of Artificial Sequence: Synthetic coding sequence"
  source 1..939: mol_type = other DNA
atgactagctgtcacatcgcggaagagcacattcagaaagtcgcaatcttcgggggcactcatggtaacgaactgaccggcgtgttcctggtcaaacactggctggagaacggagccgagatccaaagaaccggactggaggtgaagccgttcataactaacccacgggccgtcaagaagtgcaccaggtacatcgactgtgatctgaacagaattttcgacctggagaacttgggaaaaaagatgtccgaggacctcccgtacgaggtgaggcgagcccaagaaattaaccacctcttcggccctaaagattccgaagactcctacgacatcatcttcgatctgcacaacactacttctaatatgggatgcaccttgatccttgaggactcgagaaacaattttctgatccaaatgttccattacattaagacgtcactcgctccactcccctgttacgtctacctgatcgaacacccctccctgaagtacgccactacgcggtctatcgccaagtatccggtcggaatcgaggtgggaccccagccacaaggtgtgttgcgcgcggatatcctggaccagatgcgcaagatgatcaaacacgctctcgatttcatccaccatttcaatgagggcaaagaattccctccgtgcgcaatcgaagtctacaaaatcatcgagaaggtggattacccgcgtgacgaaaacggagaaattgcagcgatcatccacccaaatctgcaggaccaggattggaagccgcttcaccctggggacccaatgttcctgaccttggacggaaaaactatcccgttgggcggagactgcactgtgtacccagtgttcgtgaacgaagcggcgtactacgagaaaaaggaggcgttcgcaaaaactaccaagctgactctgaatgcgaagtcgatccggtgctgtctccac

SEQ ID NO: 7225 - DNA, 3753 bp, synthetic construct
  misc_feature 1..3753: note = source = /note="Description of Artificial Sequence: Synthetic coding sequence"
  source 1..3753: mol_type = other DNA
atgtccacggaacgggattctgaaaccaccttcgatgaagattcccagcccaatgatgaagtcgtgccctacagcgatgatgaaaccgaggatgaactggatgaccagggttccgcggtggaaccagaacaaaatcgtgttaaccgcgaggcagaagaaaaccgggagccgtttagaaaggagtgtacttggcaagtcaaagcgaacgatcgcaaatatcatgaacaacctcatttcatgaacactaagtttctgtgcatcaaggaatcgaagtatgctaataacgccattaagacttataagtacaacgcctttacctttatcccgatgaacttgtttgaacagtttaaacgcgcggcaaatctttactttcttgcacttctcattctgcaagcggtgccacaaatttcaaccctcgcgtggtacactactctcgtgcccctgcttgtagtgcttggagtcactgcaatcaaagacctggtggacgatgttgcaagacataagatggacaaggagattaacaataggacttgtgaagtcattaaagatggaagatttaaggtggccaagtggaaggaaatccaagtaggcgatgtgataaggttgaagaagaatgactttgtgcccgcggacattctgctccttagctcgagcgaaccgaattctctttgctacgtggaaactgctgagctggatggtgaaaccaaccttaagtttaagatgtcgttggaaatcaccgatcaatacctgcagagagaggatacccttgcaacctttgatggctttatagagtgtgaagaacctaataaccgtctggataagttcactggaacccttttttggcgaaacacttctttcccccttgatgccgacaaaattctgctccgcggttgtgtcatacggaatactgatttctgccatggcctggtgatctttgcaggagcagataccaagattatgaaaaactcgggaaaaacccgctttaaacgtacgaagattgattatctgatgaattacatggtgtacactattttcgtggtcctgatactcctgtcggcaggtctggcaatcggccacgcctactgggaggcccaagtcggaaattcctcgtggtatctgtacgatggagaagatgacaccccctcgtatagaggcttccttatcttttgggggtacatcatcgtgttgaatactatggtgcctatcagcctgtacgtgagcgtggaagtgattcgcctgggccagtcgcacttcattaactgggaccttcaaatgtactatgccgaaaaggacactccagccaaggcccgaacgaccaccctgaacgagcagttgggtcagatccactacattttcagcgacaagactggaactctgactcaaaacatcatgacgttcaagaagtgttgtattaacggtcagatctatggagatcatcgtgatgcctcccaacataaccataacaagattgaacaagtggatttttcctggaacacttacgcagacggcaagttggcattttacgaccactaccttattgaacagatccagagtggaaaagagccagaagtcaggcaattcttcttcctgcttgccgtctgtcacaccgtcatggtggacaggaccgatggacagctgaattaccaagccgcttccccggacgagggcgcgttggtcaacgccgcaagaaatttcggttttgcttttcttgccagaactcagaacactatcaccatttcggaattgggaactgaacggacctacaacgtgctcgccatactcgactttaacagcgatagaaagcggatgtcaattatcgtgagaacccctgaaggtaacattaagttgtactgtaagggggcggacaccgtgatttacgaaagacttcaccgcatgaacccaaccaagcaagagacgcaggatgcattggacatctttgcaaatgagactctgcgaaccctctgcttgtgctacaaagagatagaggagaaggaatttacggagtggaacaagaaattcatggcagcctcagtcgcgagcactaaccgggatgaagcgcttgataaggtgtacgaggaaatcgaaaaggacctcatcctccttggggccactgctatcgaagataagctgcaagatggagtgccagagactatatcgaaacttgcaaaagcagacattaagatttgggtgctcacgggcgacaaaaaggaaactgcagagaacattgggtttgcctgtgaactgcttaccgaagatacgaccatttgctacggagaagatatcaactcacttcttcacgcacggatggagaaccagagaaatagaggaggggtgtacgctaagttcgcgcctccagtgcaagagagcttttttccaccgggaggtaaccgagcgctgattatcactggttcctggctcaatgagattctgttggaaaagaaaaccaaaagaaataagattcttaagctgaaattcccaagaactgaagaggagaggagaatgcggactcagtccaaacgtaggcttgaagcaaaaaaggaacagcgccagaagaacttcgtggatctcgcatgcgaatgttcggcagtgatctgttgtagggtcacccctaagcagaaagcaatggtggtagatctcgtcaagcgctacaaaaaggctattaccttggcaattggggatggcgcaaatgatgtcaatatgattaagaccgcacatatcggtgtcgggatttcgggtcaagaaggaatgcaagcagtgatgtcatccgactactcgtttgcacaatttcgatacctgcaacggcttctcttggtgcatggacgttggtcgtacatcaggatgtgtaagtttctgcgatactttttctacaaaaactttgcatttacccttgtccatttctggtattcatttttcaacggatactcagcccagaccgcgtacgaggactggtttatcaccctgtacaacgtgctgtacacctcccttcctgttcttctcatgggactgctcgatcaagacgtgtccgataagttgtccttgagattccctgggctttacattgtgggccagcgagatctgctgttcaactacaagcggttttttgtttcgttgttgcatggtgtactgacctccatgatcctgtttttcatccctctgggtgcataccttcagaccgtgggacaagacggtgaagcaccgagcgactaccagtccttcgcagtcaccattgcatcagcgttggtcattactgtcaatttccagataggtctggatacttcgtactggacctttgtgaacgccttctcgatttttggaagcatcgcactctactttggcataatgtttgactttcattcggcaggaatacacgtgctttttccctctgcttttcaattcaccggaactgcctcaaacgcactccgacaaccttacatctggctgacgatcattctggccgtggccgtgtgccttctccctgtcgtggcaattagatttctgagtatgaccatctggccaagcgagtcggataagattcaaaagcatagaaaacggctcaaggcggaagaacagtggcaacggagacagcaagtgttccggcggggtgtgtcaacccgcaggtcagcatacgcattctcccaccagcgagggtacgctgatttgattagcagcggcaggagcatccgcaaaaagcggtccccgctcgacgccattgttgcagacgggactgcagagtaccgccgcaccggagattcg

SEQ ID NO: 7226 - DNA, 3753 bp, synthetic construct
  misc_feature 1..3753: note = source = /note="Description of Artificial Sequence: Synthetic coding sequence"
  source 1..3753: mol_type = other DNA
atgtctactgaacgagactctgaaactacgttcgatgaggattcccagcctaacgatgaagttgtaccctactctgatgatgaaactgaagatgaacttgatgaccagggatcagctgtcgagcccgagcaaaatagggtgaacagagaggccgaagaaaaccgcgaacccttccggaaggagtgcacctggcaagtaaaggccaatgaccgtaaatatcacgagcagccccacttcatgaatactaagttcctgtgcatcaaagagagtaaatacgccaataacgccatcaaaacatacaaatacaacgcattcaccttcattccaatgaatctgtttgagcaatttaagcgagcagccaatctgtatttcttagccctgcttatactgcaggcagttccccagattagcacactagcttggtataccactctggtccctctgctggtggtgttgggggtaaccgcaattaaggacctggtagacgatgtagccagacataagatggataaggaaatcaataatcggacgtgtgaagtcattaaagatggtcgctttaaggtggctaagtggaaggaaatccaggtaggcgacgttattcgcctcaagaagaacgatttcgtgccagccgacatcctgcttctgagttcgagcgagcccaactctctctgttatgtagaaacggcagagttagacggcgaaactaatctgaaattcaaaatgtctctggagatcaccgatcagtacctccagcgggaagatactctggccactttcgacgggttcattgaatgcgaagaacctaacaatcggctcgacaagttcactgggaccctattctggagaaataccagctttccccttgatgctgataagatactgctgcgcgggtgcgtgatcagaaacaccgacttctgccacggtttggtgattttcgcgggggctgacaccaagatcatgaagaattcagggaagaccagatttaaacgcacgaaaatcgattatttgatgaactacatggtgtatactatctttgtggtactgattctgctctcagctgggctggccattggtcacgcttattgggaagctcaagtaggcaattctagctggtatctgtatgacggcgaagacgacacaccatcatataggggtttcctgatcttttggggctatattattgtcctgaataccatggtgcctatttcgctgtatgtgtctgttgaagttatcaggctggggcagagccacttcattaactgggacctgcagatgtactacgctgagaaagacacaccagcgaaggctcgaactactaccctaaatgagcagcttggtcagatccattatattttttctgataaaacgggaactttaacacaaaatattatgaccttcaagaagtgctgcattaacggtcagatttacggagaccatagagacgcttcccaacacaaccataataaaatcgagcaggtggacttcagctggaacacctatgccgatggcaagctggctttttatgaccattacctgattgagcagatccagagtgggaaggaacctgaggttcggcagtttttctttcttctggccgtatgtcacacagttatggttgatcgaacagacggccagctcaattatcaagccgcttccccagatgaaggcgcattggtcaacgctgcgaggaacttcggctttgcattcctcgctcgcacgcagaacacaatcaccataagcgagctcggtacggagcgaacctataacgtgctcgccatactcgattttaacagtgatagaaagcgcatgtccataatcgtgcgcacccctgagggtaacattaaactatactgcaagggtgctgatacagtgatttacgaacgattacacaggatgaaccccaccaaacaggaaactcaggatgccttagatatcttcgcaaatgaaacgctgaggacgctgtgtctttgttataaggagatcgaagaaaaggaattcactgaatggaataagaaattcatggctgcatctgtcgcttcaaccaatagggatgaggctttagacaaggtgtatgaagaaatcgagaaggacctcatcctgcttggcgcaacagcgatcgaagataaactgcaggatggcgtgcctgaaaccatctcaaagctggcgaaggccgacatcaaaatttgggtgctcacaggagacaaaaaagaaaccgcagagaacattggcttcgcgtgcgaactgctgactgaggataccacaatctgctatggcgaggacatcaacagcctattgcatgcgcggatggagaatcaacggaatcgtgggggagtgtacgccaagttcgctcccccagtgcaggagtcgttctttcccccaggcggcaacagggccctgattatcacggggtcctggctcaacgagatcttgttagagaagaaaactaagaggaacaaaatcctcaagttgaaatttcccaggactgaagaagaaaggagaatgcgcacgcagagtaaacgccggctggaagcgaagaaggaacagcggcagaaaaatttcgtagatctggcatgcgaatgctctgcggtgatatgttgccgagtgacccctaagcagaaagcaatggtcgttgaccttgttaagcgatacaagaaggccattactctggccattggagatggggctaacgacgtgaacatgatcaaaactgctcacattggggtgggaataagtgggcaagagggcatgcaggcagtgatgtccagtgattacagcttcgcccagttcaggtatctgcagagactcttgctggttcatgggcggtggtcttacatcaggatgtgtaagttccttaggtacttcttttacaagaacttcgcattcaccctggtgcatttctggtactcattcttcaacggctactctgcgcagaccgcctatgaagactggttcatcacactgtacaacgtgttgtacacttcgttaccagtcctgctcatggggttgctcgaccaggacgtgagtgacaaacttagcctaaggtttcccggtctgtatatcgtgggacagagggacctgctgttcaattacaagaggttttttgtttctcttctacatggggtgctgacctctatgatcttattttttattcccctgggtgcatatctgcagactgtcggtcaggatggggaagcccccagtgactaccagagtttcgccgtgacaatcgcgtcagctttagtaatcaccgtgaactttcagatcgggcttgataccagctattggacctttgtgaacgctttttcaatttttggaagcatagctctttattttggcattatgtttgacttccacagtgctgggatccatgtattgtttccctctgcctttcaatttacaggtacagccagcaatgctttgcgccaaccttacatctggctgaccatcattctcgctgtggccgtgtgtctgctgccagttgtcgctattcggtttctttcgatgaccatttggcctagcgaatctgataaaatacagaaacaccggaagcgcctgaaggctgaggaacagtggcagcgccgtcagcaagtgttcagacggggcgtgtctacgcggagatctgcctacgcatttagtcaccagcgaggctacgccgatcttattagttctgggaggagcattagaaagaagagatccccgctggatgccatcgtcgcagacggcacagccgaataccggagaaccggagacagt

SEQ ID NO: 7227 - DNA, 3753 bp, synthetic construct
  misc_feature 1..3753: note = source = /note="Description of Artificial Sequence: Synthetic coding sequence"
  source 1..3753: mol_type = other DNA
atgagcactgagcgcgatagcgaaaccacgtttgatgaagatagccagcctaatgatgaagtggtcccgtactcggacgacgaaaccgaagatgaactggacgaccaaggatcagcagtggagcccgaacaaaaccgggtgaaccgggaagcggaggaaaatcgcgagcctttcagaaaggagtgtacctggcaggtgaaagcgaacgatagaaaataccatgaacagcctcatttcatgaataccaaatttctgtgtatcaaagaatcgaagtacgcgaataatgcaattaagacgtacaagtacaacgcgttcaccttcattccgatgaacctcttcgagcagtttaagcgggccgcgaacctgtacttcctcgccctcctgatcctgcaagcggtgccccaaatctcgaccctcgcgtggtacactaccctcgtcccgctgctggtggtcctgggagtgacggccataaaagatctcgtggacgatgtcgctcggcacaagatggacaaagagatcaataacagaacctgcgaggtcatcaaagatggaagatttaaggtggccaagtggaaggagattcaagtcggagacgtgatccgcctgaaaaagaacgactttgtgccggcggatatcctgctgctctccagctcagaaccaaactcgctgtgctacgtggaaacggccgagctggacggagaaactaacctgaagttcaaaatgtcgcttgaaatcactgatcagtacctccaacgggaggacactctcgccactttcgacggattcatcgagtgcgaggaaccaaacaatagactggacaagttcacggggacccttttctggcgcaacacttcttttccactggatgcagacaaaattctcctgcgagggtgtgtgattaggaacactgatttctgccacggactggtcatctttgcaggagcagacactaaaatcatgaagaactcggggaaaactcgctttaagcggaccaagatcgactacctgatgaactacatggtctacaccatcttcgtggtcctgatcttgctgtccgcgggactggctatcgggcacgcctactgggaggcacaagtggggaacagctcgtggtacctgtatgacggagaggacgatacgccgagctaccggggcttcctgatcttctggggatacatcatcgtcctcaacaccatggttccaatctccctttatgtgagcgtcgaagtgattcggctgggacagagccacttcatcaactgggacctgcagatgtactacgcggaaaaagacactccagccaaggcgcggaccaccaccctgaatgaacagcttgggcaaattcattacattttctccgataagaccggcaccctgactcagaacatcatgaccttcaaaaagtgctgcatcaacggacagatctacggggaccaccgggacgcctcccaacataatcacaataagattgagcaagtggacttttcttggaacacctacgcggacggaaagctggcattttacgaccattacctgatcgagcagatccagtcaggaaaagaaccagaggtgcggcagtttttctttctgttggccgtgtgccacactgtcatggtggatagaaccgacggccagctgaactatcaggctgcttcgcctgatgagggagccctcgtgaatgcggcacgcaacttcggtttcgcgttcctcgccagaacccagaataccatcacgatctccgagctcggcacggagcgcacctacaacgtgttggccattctggatttcaattcggatcggaaacgtatgtccatcatcgtgcggaccccggaaggtaacatcaagctctactgtaagggagcagacaccgttatctacgaacggctgcaccggatgaaccctaccaagcaagaaactcaggatgctctcgatatcttcgcaaatgagactctgcgcaccctctgtctgtgttataaggaaattgaagaaaaggaattcaccgaatggaataagaaattcatggcagcctccgtggcgtctaccaacagagacgaagcgttggacaaagtgtacgaagaaatcgagaaggatctgatcctcctgggagccactgccatcgaagataagctgcaggatggagtcccggaaactatctcgaagctcgccaaagcagacatcaaaatctgggtgttgactggagataagaaggaaacggcggaaaacattggattcgcctgtgaactgctgactgaggacacgactatctgctacggtgaggacattaacagcctgctgcacgcacggatggagaaccagcgtaatagaggaggcgtgtacgcaaagtttgctccccctgtgcaggaatcattcttcccgcccggcggcaaccgggccctcatcattactggctcatggctgaacgagatcctgctggagaagaaaactaagcgcaataagatcttgaagctgaagttcccccgcaccgaagaggaacggcgtatgcgaacgcagtcgaaaagaaggctggaagccaagaaggaacagcgccagaagaacttcgttgatctcgcctgcgaatgttccgccgtcatctgttgcagggtgactccgaagcagaaggcgatggttgtggacctggtcaagaggtacaagaaggcaatcaccctcgccataggcgacggagcgaatgacgtgaatatgatcaagaccgcacatatcggcgtgggcattagcgggcaggagggcatgcaagccgtcatgagctcagattactcattcgctcaatttcggtacctccagcggctgctgcttgtccacggacggtggagctacatccgcatgtgtaagttccttaggtacttcttttacaagaattttgccttcacgttggtgcacttttggtactcctttttcaacggatacagcgcccagacggcgtacgaggactggttcatcactttgtataacgtgttgtacaccagcttgcccgttctcctgatggggctcctcgaccaggacgtgtccgacaaattgtcccttcgattccccggcctgtatatcgtgggtcagagagatcttctgttcaactacaaacggttcttcgtatcgctcctccacggagtcctgacctcaatgatcctgttcttcatcccactgggagcctaccttcaaactgtgggccaagacggtgaggcaccgtcggactaccagtcgtttgccgtgacgatcgcaagcgcgctggtcatcaccgtgaacttccagatcggcctggacacgtcttattggactttcgtcaacgccttttcaatcttcggtagcatcgccttgtactttggaatcatgtttgatttccattcggccgggattcatgtgctcttcccctcggcattccaatttaccggtaccgcttccaatgccctccggcaaccgtacatctggctcactattatcctcgcggtggcggtgtgcttgctcccggtcgtggctatccggtttctctcgatgacgatttggccgtccgagtcggacaaaatacagaagcaccggaagagactgaaggctgaagaacagtggcagcggcggcagcaggtctttcgccggggcgtctccactagacggtccgcctacgctttttcacaccaaaggggatacgcagacctcatcagctcaggaaggtcgatccggaagaagcgttcaccgctcgatgctatagtggctgacggtactgccgagtaccggcggactggagactca

SEQ ID NO: 7228 - DNA, 3753 bp, synthetic construct
  misc_feature 1..3753: note = source = /note="Description of Artificial Sequence: Synthetic coding sequence"
  source 1..3753: mol_type = other DNA
atgagtacagagcgagattcagagaccacctttgatgaagactcacagccaaatgacgaggtcgtgccttactccgacgacgaaacagaggatgaacttgatgaccaggggagcgccgtggagcctgagcagaatcgggttaatagagaggcagaggagaaccgagagccgtttcggaaagaatgcacttggcaggtgaaagctaatgaccgcaaatatcacgaacagcctcattttatgaacaccaaattcttatgtatcaaagaatcaaaatatgccaataacgcgattaaaacctataaatacaatgctttcaccttcataccaatgaacctgttcgagcagttcaagcgcgctgctaacttatacttccttgccctactgatattgcaggctgtacctcagatctctactctagcatggtacactacccttgtccctctccttgtggtgctcggcgtcactgcaattaaagacttggtggacgatgtggctagacataagatggacaaggagattaataaccgcacctgcgaggtgattaaagatggtcggtttaaagtggccaagtggaaggagatccaggtcggggatgtgatcaggttaaagaagaacgactttgtacccgcggatattttgctgctgtcgtccagtgagcccaattccctgtgttacgttgagacggctgagttggatggggagaccaacctgaagttcaagatgagtctggaaataacagaccagtacctgcagcgggaagacaccttggcaacttttgacggttttattgagtgtgaggagccaaacaatcgtctggataaattcacaggaaccctcttctggcgtaacacatcctttccgctggacgccgataagatcctgctacgcggatgtgtgataagaaatacagacttttgccatggattagtcatcttcgctggggctgacactaagattatgaagaactcaggtaagacgaggttcaagaggacgaaaattgattacctgatgaattatatggtgtacacaattttcgtggtcctgatccttctgagcgcaggattagccatcggacatgcttattgggaagcccaggtgggcaactcatcttggtatttgtacgacggcgaagatgacacaccttcctaccggggattccttattttttgggggtacatcatcgtgctgaacactatggtgccaatcagcctttacgtaagcgtcgaagttatcaggctgggacagagccatttcatcaattgggacctgcagatgtattacgcggaaaaagacaccccggccaaagctcgcacaaccaccctgaacgaacaactgggccaaatccattacatcttctcagataaaaccggtaccctcactcagaatattatgaccttcaaaaagtgttgcataaatggccagatctacggcgaccatcgcgatgcaagtcaacataatcataacaagattgaacaggtcgactttagctggaatacctacgctgatgggaagctggctttctacgaccactacttgattgagcagatccagtccggcaaggagccagaggttcggcagtttttcttccttctggccgtgtgtcataccgtgatggttgacagaaccgacggccaactgaactatcaggccgctagtcccgacgaaggggccctggttaatgctgcccggaattttggcttcgcattcctcgctaggacccagaatacaatcaccatttccgagctcggtaccgaacgaacatataacgtgctggcaattctggacttcaattccgatcgtaaacggatgtctatcattgtaaggacaccagaagggaatatcaaattgtattgtaaaggtgctgacactgtgatttacgaaaggttgcatcggatgaatccaacaaagcaggaaactcaggatgccctggatatctttgcaaatgaaaccctgcgaaccctctgcttgtgctacaaggagatcgaggagaaagagtttactgagtggaacaaaaagttcatggccgcatctgtggccagcacaaaccgggacgaagctcttgataaggtctacgaggagatagagaaagacctgattctgttaggcgccactgccatcgaggacaaactgcaagatggcgtacccgagactatctcaaaactggccaaggctgatataaagatttgggtcctaacaggagataagaaggagactgcggagaacattgggttcgcatgtgagcttctgaccgaggacaccacaatctgctatggcgaagacatcaattcattactgcatgcaaggatggagaatcagcggaacaggggaggagtgtatgccaaattcgctcctcctgtacaggaatctttctttccacctggcggaaacagagccttgattatcactggtagctggctaaacgagatcttgctggagaaaaaaaccaagcggaacaagattttgaagctaaagttcccccgcacagaggaggaacggcgcatgcgcacccagtcgaagagaaggctcgaggctaagaaggaacaacgtcaaaaaaatttcgtcgatttggcttgtgagtgttccgccgtcatctgctgcagggtaacccccaaacagaaggccatggtagttgatttggttaaaagatacaaaaaggctattacactggcaataggggacggggcgaacgacgtgaatatgatcaagacagcccatataggggtgggaattagtgggcaggagggaatgcaggccgttatgtccagcgattacagtttcgcccagtttagatacctgcaaaggctgctattggtccatgggcggtggagctacatccggatgtgtaaattcctacgatactttttctataagaatttcgcgttcacccttgtgcatttttggtacagtttcttcaacggatactctgctcaaacggcgtatgaagattggttcatcactctgtacaatgtgctctatactagcctgccagtcttattgatgggcctcttggatcaggacgtgagcgataaactgtcacttaggtttccgggtctgtatattgtcgggcagcgggacctcctgttcaattataaaagatttttcgtttcactcctccacggtgttctcacctctatgatcctatttttcataccactcggtgcgtacctgcagaccgtgggccaggatggtgaagccccctctgattaccagtctttcgctgtaacaatcgctagcgcactggttatcaccgtcaactttcagatcggactggacacatcatactggaccttcgtcaacgctttctctatattcgggtccatcgctttatatttcggaatcatgttcgactttcactccgctgggattcatgtcctgttcccatcagcctttcagtttacaggtacagcgtccaacgcgctgcggcagccatacatctggttgaccattattctggcagtggctgtttgcctgctaccagtcgttgcaattcggtttttgtccatgactatatggccaagtgagagcgacaagattcagaagcatagaaagagactcaaggcggaggagcagtggcagaggaggcagcaagtctttcgccgcggtgtcagtacacgccgcagtgcgtacgccttctctcatcagcgcggctacgccgatttgatttctagtggacgtagtatccgaaaaaagagatcacccctggacgcgatagtggctgacgggaccgccgaatacagaagaaccggtgactct

SEQ ID NO: 7229 - DNA, 3753 bp, synthetic construct
  misc_feature 1..3753: note = source = /note="Description of Artificial Sequence: Synthetic coding sequence"
  source 1..3753: mol_type = other DNA
atgtcaaccgagagagatagcgagacaaccttcgacgaggacagccaacccaatgatgaagtggtgccatatagcgatgacgaaaccgaggacgagctcgacgaccagggctctgccgtggaacccgagcagaatcgggtgaaccgcgaagccgaggagaacagagaacccttccgaaaagagtgtacttggcaggtgaaagctaatgacaggaagtatcacgagcagcctcacttcatgaataccaaattcctgtgcataaaagagtctaaatacgcgaacaatgctattaagacatacaagtacaatgccttcacattcatccctatgaatctgtttgagcagttcaaacgggccgccaacctgtacttcctggccctcctcatcctgcaggcagtgccccagatttccacactcgcttggtataccaccctcgtccccctgcttgtcgtcctgggcgtgaccgccattaaggatttggtggatgacgtggctaggcacaagatggataaggagataaataatcgaacatgcgaagtcattaaggacggccgatttaaagtggcaaaatggaaggaaatccaggtcggcgatgttattcggttgaagaaaaacgattttgttccagccgatatcctgctgctgtcttcctccgaacccaatagcctctgctatgtcgagacggctgagctcgacggggaaactaaccttaaattcaagatgagcttggagatcaccgaccagtatctgcaaagagaggataccctcgcaacctttgacggcttcatcgagtgcgaggagcccaataatcgcctggataagttcaccggcacactcttctggcgaaatactagcttccccctggacgccgataagatactgcttcggggctgtgttatccgaaacacggacttttgccatggtcttgtgatcttcgcgggcgccgataccaagattatgaagaacagcgggaagactcgctttaaaagaacaaagatcgattacctcatgaattatatggtttatactatcttcgtggtactgatcctgctgtccgcagggttggccatcggtcacgcttactgggaggcacaagtggggaattcctcatggtatctgtatgacggggaggacgacacaccaagctaccgcggattcctcatattttggggctacataatcgttctgaataccatggtgcccatttctttgtacgtcagcgtcgaagttattcgccttggtcagtcacatttcattaactgggatcttcaaatgtactacgccgagaaggacacaccggccaaagcgaggactaccacgctcaatgaacagttgggccagattcactacatattctcagacaaaaccggaaccctgacccagaatatcatgacattcaagaagtgttgcatcaatggccagatttacggggaccaccgggacgcttcacaacataaccataataagattgaacaggtagatttttcctggaatacatacgccgatgggaagcttgccttctacgaccactacctgattgagcagatacagtcaggtaaagagccagaggtgcggcagttcttcttcctgctcgccgtttgtcacacggtgatggtggaccggactgacggtcagttgaattaccaagccgcctcccctgatgaaggggcccttgttaacgctgccaggaatttcggattcgctttcctcgctcgaacacaaaataccataactatcagtgaactggggacggaaaggacctacaatgtgttggcgattttggatttcaacagtgatcgcaagaggatgtctatcatagtgaggacaccagagggcaacatcaagctgtattgcaaaggtgcagatacagtcatctatgaacgcctccatcgcatgaaccccacaaaacaggaaacccaggacgcgctcgacatattcgccaatgagactcttcgcactctctgcctttgctataaagagatcgaggaaaaggagtttacagagtggaacaagaaatttatggccgcatccgtggcaagcaccaatcgggacgaggcgctggacaaggtgtatgaggaaatcgagaaagacctgatccttctgggggccaccgccattgaggataagttgcaggacggggtcccagaaactataagtaaactcgcaaaagcagacattaagatttgggtattgactggggacaagaaagaaaccgcagagaatattggctttgcatgcgaacttctgacggaggatacgacaatttgctatggagaggatatcaacagtctgctccacgcccggatggaaaatcagcgcaatcggggtggggtctacgcaaagttcgccccccccgtacaagaaagcttcttcccacccggtgggaaccgggctctgattatcacaggttcctggctgaacgagatcctcttggagaagaaaacaaaacgcaacaaaatcctgaaactcaagttcccacgcacagaagaggagagaagaatgagaacacagagcaagcgcagactcgaggccaaaaaggaacagcggcagaagaatttcgtcgacctggcctgcgagtgctcagccgtgatatgttgccgggtgacgcctaagcagaaggctatggtagtggacctggtgaagagatacaaaaaagctattactcttgccatcggcgatggcgcaaacgacgtcaatatgattaaaacggctcatattggtgttgggatcagcggtcaggagggcatgcaagctgtgatgagtagcgattattcattcgctcagttcagatatctgcaacgactgctgttggtgcatggccggtggagctacatccgcatgtgcaagttcctgagatacttcttttacaaaaactttgcatttacccttgtgcacttctggtacagcttttttaatgggtattccgctcagaccgcgtatgaggactggtttatcaccctttataacgttctttatacttccctccctgttctgctgatgggtcttctggaccaggacgtatccgacaagctgagtctccgattccccggcctgtacatcgttggacagcgggatctgctgtttaattataagagattcttcgtgagcctgttgcacggcgtgcttactagcatgattctgttcttcattccgctcggcgcctatcttcagaccgtggggcaagatggagaagcgcctagtgattatcagtcctttgctgtgacaatcgcatcagctctggtgatcacagtgaactttcagattgggctggacactagctattggactttcgtcaatgcattctccattttcggttctatcgcgttgtactttggcattatgtttgacttccattccgcaggcatccacgtgctgtttccatcagccttccaatttaccggaacggcatccaatgcgcttcgccagccgtatatttggctcacgataattcttgccgtggcggtttgcctgctgcccgtcgtggctatccgcttcttgtctatgactatctggccaagtgaaagtgataagatacagaagcatcggaagagactgaaagcggaggaacagtggcagcgaagacagcaagtgtttcgcagaggtgtgtctacgcgacggtctgcatatgcgttctctcatcaaagagggtacgccgaccttatctcttcaggtagatcaattcggaagaaaaggtctccactggatgcgatcgtggccgatggtactgcagagtacagacgaactggagacagt

SEQ ID NO: 7230 - DNA, 3753 bp, synthetic construct
  misc_feature 1..3753: note = source = /note="Description of Artificial Sequence: Synthetic coding sequence"
  source 1..3753: mol_type = other DNA
atgtctactgagcgggatagcgagactaccttcgacgaagacagccagccaaacgatgaggtggtgccctattccgatgacgaaactgaggacgaacttgatgatcagggctcagcagtagagccagagcagaaccgggtaaatcgggaggctgaggaaaatcgagaaccttttagaaaagagtgtacctggcaggtgaaagctaacgatagaaaatatcacgaacagcctcatttcatgaacaccaaatttctctgcatcaaagagtctaaatacgccaataatgcaatcaagacatataagtacaatgcatttacattcattccgatgaacctattcgagcaattcaaacgggccgcgaacctgtattttcttgccttgctgattttacaggcagttccgcagatttctactctggcgtggtataccacgctcgtgccgctgctggtggttctgggggtcacggccatcaaagatcttgtggacgatgtcgcgcgccacaagatggataaggagatcaacaatagaacctgtgaagtgatcaaagacggccgattcaaggtggccaagtggaaggagatccaggtcggcgacgtgatcaggttgaagaaaaacgattttgtccccgccgatatcttgctgttgtcatctagcgaaccgaactcgctctgttacgtggagacagccgagttagatggggagactaacctgaaatttaagatgtccctcgaaatcactgatcagtaccttcagagagaggataccctcgccacctttgatggcttcatcgaatgcgaggagcccaataaccggctggacaaattcactggcacactgttctggcgcaacacaagctttccgctcgatgcagataagattctgttgcggggttgcgtgattcgtaacacggatttttgccacggtctagtgatattcgcgggtgcagacacaaagatcatgaagaactcagggaaaactcgcttcaaacgtaccaagatcgattacctcatgaactacatggtctacacaatcttcgtcgtgctgattttgctgagcgctggtctggcgatcggccatgcatattgggaggcgcaggtcgggaattcctcatggtatctttatgacggagaagacgacacccctagctatcgcggctttctgatattctggggctatataatagtccttaatacaatggtgcccatctctttgtacgtgtcagtggaagttatccgcctgggacagagccacttcatcaattgggacttgcagatgtattacgccgaaaaagacacacccgccaaggccaggaccacaacactcaacgaacagctaggacaaatccactatatatttagcgataagaccggtactctcacacagaatatcatgactttcaagaagtgttgcataaacggacagatctacggggaccatcgcgatgccagccagcacaaccataacaagatcgaacaagttgacttttcctggaacacatatgctgatggaaagctcgctttctacgaccattacctaattgaacagattcagagcggaaaggagccagaggttcgccagtttttcttcctgctggctgtatgccacacagtgatggttgacagaaccgacggccaactgaactaccaggcagctagtccggatgagggggcccttgtaaatgccgcccgcaatttcggctttgccttcttggcccgcacacaaaacactattacgatcagtgaattgggaactgagcgtacctacaatgtattagcgatactggactttaattctgaccggaagaggatgtcaatcatagtgagaacaccagaggggaatataaaactgtactgtaagggggccgacaccgttatttatgaaagacttcatcggatgaaccccactaagcaggagacccaggatgctctggacatcttcgccaacgagacgctgcggaccttgtgcctgtgttacaaggagatagaagaaaaggaatttactgagtggaataagaaatttatggccgccagcgtcgccagtactaaccgggacgaagccttagataaggtgtacgaggagatagagaaagacctaattctccttggggcgaccgctattgaagacaagctccaggatggcgtaccagaaaccatcagcaagctggcaaaggcggatatcaaaatctgggttctgaccggcgataaaaaagaaacagccgaaaacatcggtttcgcctgcgagctgttaacagaggacacaaccatctgctatggcgaagacattaacagcctgctccacgcccgaatggagaatcagcgtaatcgcgggggggtgtatgctaagttcgcccctcccgtccaggagagcttttttccacccggtggcaatcgcgccttgatcatcacgggtagttggttgaacgaaattttactggagaagaagacaaagcgaaacaagatccttaaattaaagttcccacgaacagaagaggaacggcggatgcgaacccagagtaaaagaaggttggaggcgaaaaaagaacagcgtcaaaagaattttgtggacttagcatgtgaatgttctgcagtgatctgttgcagagtgactcctaagcagaaggcaatggttgttgatttggtcaagcggtacaagaaagccatcactctggcaattggagacggagcaaatgacgtcaacatgatcaagacagcccatatcggagtgggcattagcgggcaggaaggcatgcaggccgtaatgtccagcgattatagcttcgctcaatttcgctaccttcagagactgcttctcgtgcacggaagatggtcatatatcagaatgtgcaaattcctgcgctatttcttttacaagaacttcgccttcaccttggtgcatttctggtacagcttcttcaatgggtattccgcgcagacagcttacgaagattggttcattaccctctataacgtgctgtacacctccctaccagtgctacttatgggactcctcgatcaggacgtaagtgataaactcagtttaagattccccggcctgtacatagtggggcaacgcgacctgttatttaattataagcgcttctttgtttcactcttgcacggggtgttaacctcgatgattctcttcttcatccccctgggggcttacctgcaaaccgtaggacaggatggcgaggccccctctgactaccagtcatttgccgtaaccatcgcctctgccctggtgattacggtgaactttcagatagggctggatacctcatactggacgtttgtcaatgcctttagtatttttggctctattgccctgtatttcggcatcatgttcgacttccattctgctggtattcatgtgctctttccatccgcctttcagttcaccggcactgcatcaaacgccctgcggcagccatacatatggctcaccatcatcctcgccgtagccgtttgtctgctccctgtggtggcaatacgctttctgtcgatgactatctggccctctgaatcagacaagatccagaagcatcgcaagcgcctgaaggcagaagagcagtggcagcgacggcagcaagtgttccggaggggagtcagtacacgcaggtcagcctacgcattctcccatcagcgtggatacgccgatttgataagcagcggacggagtatcaggaagaaacggtcaccactagacgctattgtggcagatgggacagcggagtacaggcggaccggtgactcc

SEQ ID NO: 7231 - DNA, 3753 bp, synthetic construct
  misc_feature 1..3753: note = source = /note="Description of Artificial Sequence: Synthetic coding sequence"
  source 1..3753: mol_type = other DNA
atgagtacggaaagagactcagagactacttttgacgaagacagccaacctaacgatgaggtggtaccctactctgacgacgaaactgaggacgagctggacgaccaaggcagcgccgtcgaacccgagcagaaccgggttaatcgggaggcagaagagaaccgggaaccgtttaggaaggagtgcacgtggcaggtgaaagccaatgaccgcaaataccacgaacagccacattttatgaataccaagttcttgtgtatcaaagagtcaaagtatgctaacaatgcaatcaagacctacaagtacaacgccttcacctttatcccaatgaatttattcgagcagttcaagcgcgccgctaacctttacttcctagccctgttgatcttgcaagcagtgcctcagatctccacactggcatggtataccactctggtccccctcctggtggtactcggcgtgaccgctattaaagacctcgtggacgacgtggcgcgccacaagatggataaagagatcaacaaccgaacctgtgaggtgatcaaggacggacgattcaaggtcgctaagtggaaagagatccaagtgggcgatgtgatccgcctcaagaaaaatgatttcgtgccggccgacatcctgttgctgtcgagttctgagcccaattctctgtgctacgtcgaaacagccgaacttgatggtgaaaccaacttgaaatttaagatgagtttggagatcactgatcagtatttgcagcgcgaagatacactcgccacctttgacgggttcatcgagtgcgaagagccaaataatcgcttggacaagttcaccgggaccctgttttggcggaacacaagttttcctctagatgccgataaaatacttctgcgtggctgcgtcatccgcaacacggatttttgccacgggctggtgatattcgcaggtgcggacaccaaaatcatgaaaaattctgggaagacccgtttcaagagaaccaagatagattaccttatgaattacatggtctataccatcttcgttgtacttattctgttgtcggcgggccttgcaatcggacatgcttattgggaggctcaagtgggcaactcatcctggtacctctacgacggcgaggatgatactccatcttaccggggttttttaatattctggggatacatcattgttcttaacactatggtcccaattagcctgtacgtgagcgtggaggtcatcagactaggccagtctcactttattaactgggaccttcagatgtactatgcagagaaagatacaccagccaaagccagaactactactcttaacgagcaactaggtcagatccactatattttctccgataagactggtaccctgacacagaatatcatgactttcaagaagtgttgtatcaacggacaaatatacggggaccaccgtgatgccagtcagcacaaccataataagatcgaacaggtggatttcagctggaatacttatgcagatggtaaattggctttttatgatcattatctaatcgagcaaatccaatcaggaaaggaaccagaagtccgccagttttttttcctgcttgctgtgtgtcacactgtgatggtagatagaactgacgggcaactcaattaccaggcagctagcccagacgaaggagccttagtgaacgcggcacgcaactttgggttcgccttcctggctcgaacacagaatacgatcaccatctccgaattaggcacagaacggacttacaacgtcctggccattttggacttcaattctgatcgaaagcggatgtctattattgtgagaacccctgaagggaatataaagctttattgtaagggtgcagatacagtgatttacgaacggctacatcgcatgaatcctacaaagcaggaaacccaggacgctctcgacatcttcgctaacgagacattgagaacactgtgcctttgctataaggagatcgaggagaaagagtttactgagtggaacaagaaattcatggccgcgagcgtggcttccactaaccgcgacgaagccctcgataaggtatacgaggaaatcgagaaagacctgattctcttgggggctaccgcgattgaagacaaactgcaggacggcgtcccagagaccatctccaaactggcaaaggctgatatcaagatctgggttctaacgggggataaaaaggagaccgctgaaaacattgggtttgcatgtgagctacttaccgaggacacaaccatttgctatggcgaagatattaacagtctgctgcacgcacgcatggagaatcaacggaacagaggtggggtgtatgccaagtttgcgccccccgtacaggagtccttttttcctcccggcggcaacagggctctgattattaccgggagctggctcaatgagatattgcttgaaaagaaaacgaagcgtaacaaaattctgaagctgaaattcccacggacagaggaagaaaggagaatgaggacgcagagcaaacggcgactggaggccaaaaaggaacaacgccaaaagaattttgtagacttggcttgtgagtgctccgccgtaatctgctgtcgcgtcacgcctaagcagaaagcaatggtggtcgacttggttaagagatataaaaaggcgattacactagccatcggggatggagccaatgacgtcaacatgattaagacagcccatatcggcgtgggcatcagcgggcaggaaggcatgcaggcagtgatgtcatccgattacagcttcgctcagttcagatatcttcaacggctgctgctggttcatgggaggtggagttacatccggatgtgcaaattcttaaggtatttcttctataagaatttcgccttcacactagtgcatttttggtattccttcttcaatggatattctgcccagactgcctacgaagattggtttattactctgtataatgtcctatatacctcacttcccgtgctcctgatgggcctcctcgaccaggatgtaagtgataagctctctctccggttcccaggcctgtacattgtgggccagcgagatctgcttttcaactataaacgcttctttgtttcactccttcacggagttctgacgtccatgatcctcttctttataccgttgggagcatatctgcagacggtgggacaggacggtgaagctccgagtgactaccaatcattcgccgtgaccatcgccagtgctctggttattaccgtaaatttccagatcgggctcgatacatcttattggacatttgtgaatgctttttccatattcgggagcatagccctttactttggcataatgtttgattttcatagcgctgggattcacgtactgttcccgagcgccttccaatttacgggaaccgcaagcaacgcgctaagacagccctatatctggctcaccatcatcctcgcagtcgcagtctgtcttctgcccgtggtggccatccggtttctgagtatgaccatttggccatctgagtcggataagattcaaaagcaccgtaagagactgaaagcggaggaacagtggcaacgacggcagcaggtgttcagacgcggcgttagtacccggcggagcgcatacgcattctctcatcaaagaggctacgccgacttgatctcttctggccgtagcattaggaagaaacgcagccctcttgatgctatcgtggctgacgggactgcagagtataggcggacaggcgatagc

SEQ ID NO: 7232 - DNA, 3753 bp, synthetic construct
  misc_feature 1..3753: note = source = /note="Description of Artificial Sequence: Synthetic coding sequence"
  source 1..3753: mol_type = other DNA
atgtctacagaacgggattcagaaactacatttgacgaggattctcagcccaatgatgaagtcgtcccatattcagatgatgaaacagaagatgagctcgatgatcagggatccgccgtcgagccagaacagaatcgggtgaatcgggaagcagaagagaacagggaacccttcaggaaggaatgtacttggcaggtgaaggctaacgaccggaaatatcatgaacagccccattttatgaatactaaatttttgtgcattaaagagtccaagtacgcaaataacgctattaagacttataagtataatgcattcacattcatccccatgaacctatttgaacagttcaaacgggccgccaacctctatttcctagccctacttatacttcaggctgtgccgcagatatcaactctcgcctggtatacaactctcgtgcccctcctggtggtactcggagtgacggctattaaagatttggtggatgacgtggctagacacaagatggataaagaaattaacaaccggacttgtgaagtcataaaagatggacgcttcaaagttgcaaagtggaaagaaatacaggttggggacgtaatcaggctcaaaaaaaatgatttcgtacctgcagatatcttacttctttcaagttccgaaccaaactccctctgctatgtggaaactgcagaactcgatggggaaacaaatctaaaattcaaaatgagtttagagataactgatcagtatcttcagagggaagatactcttgcaacattcgatgggttcatagaatgtgaagaaccaaataacaggctggataaatttactggaactctcttctggaggaacacatctttcccactggatgcagataaaatcctgctccggggatgcgtaatacgaaatactgatttctgtcatggattagtgatattcgctggagctgatacaaaaattatgaaaaactctgggaaaactcggttcaaacggactaaaatagactatttaatgaactacatggtttatactatcttcgtagtgctcatactgctgtccgccgggcttgcaatcggacatgcttattgggaagcccaggtgggaaattcatcatggtatctgtatgatggagaagatgatactccatcataccgaggatttctgatcttctgggggtatataatagtgctcaacacgatggtgcctatatctctttatgtatctgttgaagtaatccgccttggacaatcccactttataaattgggacctgcaaatgtactacgcagaaaaagatacacctgccaaagcaaggactactactctcaacgagcagctcgggcagatacactatatctttagtgataaaacaggaacactcactcagaatattatgacattcaagaaatgttgtatcaatggacagatctatggggatcaccgagatgcttcccagcataatcacaataaaatcgaacaagtggacttctcatggaatacatatgcagatgggaaactagctttttatgatcactatctcatcgaacagatacagtccgggaaagaacccgaagttcggcagttctttttcctgctcgcagtttgccacacagtgatggtggaccgcacagatgggcagctaaattaccaggccgcttcacctgatgaaggagctctagtcaacgctgcgaggaatttcggatttgcctttttggccaggactcagaatactatcacaatctccgaactcggaactgaaaggacgtacaacgttctagccatccttgattttaattctgataggaaaagaatgagtatcatcgttaggactcctgaaggaaacataaaactctattgtaaaggggctgatacagtgatatatgagcggctacacaggatgaatccaacaaaacaggaaactcaggacgcattagatatctttgcaaacgaaacacttcggactctttgtctttgctacaaagagatagaggaaaaagagttcacagaatggaataaaaaatttatggccgcttccgtcgcttcaactaaccgcgatgaagccctcgataaagtgtatgaagaaattgaaaaagacctaatcttgctcggggccactgccatcgaagataaactgcaggatggagtgcccgagacaatctctaaacttgccaaagccgatattaagatctgggtcctaacaggggataaaaaggaaacagcagagaatatcggattcgcttgtgagcttctcactgaagatacgacaatatgctatggagaagatatcaacagtttgctacacgcgcgaatggaaaatcagcggaatcgaggaggggtctatgcaaagttcgcacctcctgtgcaggaatccttctttccccccggagggaatcgagctttaataatcactggatcctggctgaatgaaatcctactagaaaagaaaactaaaagaaacaaaatcctcaaattgaagtttcctcggacagaagaagaaagaaggatgaggactcagtcaaaacggcgtctggaagccaagaaagagcagcgccagaaaaattttgtggatctggcctgcgagtgttccgctgtgatatgctgtagggttacaccaaaacagaaagcaatggttgtggatctggtaaaaagatataaaaaagcaattactctggcaatcggagatggagcaaatgatgttaacatgatcaaaactgcccacatcggagtaggaatttccgggcaggaagggatgcaggccgtaatgtcttctgattattccttcgctcagtttagatacctgcagaggctgttgcttgtgcacgggcgttggtcctatatccggatgtgtaagttcctcagatactttttttataaaaattttgccttcactttggttcatttctggtattcatttttcaacggatattcagcccagacagcttatgaagactggtttatcacattgtataatgtgctgtatacaagtttgcccgtattactcatggggctgctagatcaggatgtcagtgataaacttagtctcaggtttccagggctatatatagtgggacagagggatcttctgtttaattataaacgcttctttgtgtccctgctccatggagtccttacaagtatgattctcttctttatcccactgggagcctacctacagacggtggggcaggatggggaagctccttcagactatcagtcattcgccgtcacaatagcctccgcactcgtaataacagttaatttccagatcggactggatacgagttattggacgttcgtgaacgccttctccatatttgggagtatcgccttgtactttgggatcatgtttgattttcattccgctgggatacatgtgctgtttccctctgcctttcagtttactgggactgcaagtaacgctctcagacagccctatatctggctaacgattattctggcagtggctgtctgtctgctcccagtcgtggccataaggtttctatcaatgactatctggccatccgaatctgataagatccagaaacacagaaagaggctgaaagccgaagaacagtggcagcggagacagcaggtatttaggcgtggggtttcaactcggaggtctgcttatgccttctctcaccagcgagggtatgccgatctaatctcctccggacgctcaatccggaaaaaaagatctcccttagatgccatcgttgccgatgggacagctgaatacagacggacaggggattcg

SEQ ID NO: 7233 - DNA, 3753 bp, synthetic construct
  misc_feature 1..3753: note = source = /note="Description of Artificial Sequence: Synthetic coding sequence"
  source 1..3753: mol_type = other DNA
atgtccaccgaacgggattcagaaaccacttttgacgaggatagccagcctaatgatgaggtggtgccttactccgacgatgaaaccgaggacgaactcgatgaccaaggatcagccgtggagcctgaacagaatcgcgtgaaccgggaggccgaagaaaacagagagccttttcgcaaagagtgtacttggcaagtcaaggcaaacgatagaaagtaccatgagcagcctcacttcatgaacactaagtttctttgtattaaggagtcgaaatacgcaaacaacgccatcaaaacctacaagtacaacgcttttaccttcataccaatgaacctctttgaacagttcaagagggcagcgaacctgtactttttggcactgcttatcctgcaagcagtcccccagatcagcaccctcgcatggtacaccactctcgtccctctgctcgtcgtgctgggagtcactgccattaaggatctggtcgatgatgttgcaagacataagatggataaggagatcaataacagaacctgtgaagtcattaaagatggaaggtttaaggtggccaaatggaaggaaattcaagtgggcgatgttatccggcttaagaagaacgacttcgtgcctgcagacatacttctgctttcgtcaagcgagccaaactcactttgttacgtcgaaactgccgaacttgacggagaaaccaacctgaagtttaagatgtcccttgaaatcactgatcaatacctgcagcgggaggatacgctggcaaccttcgatgggtttatcgaatgcgaagaaccgaacaatagactggacaagttcacgggtacgcttttttggcgcaacaccagcttccctttggatgcagataagattctgctgcggggttgtgtgatccgtaacaccgatttttgtcacggtcttgtgatttttgcaggagcggataccaagattatgaagaattcaggtaaaacccgctttaagcggactaaaatcgattacctgatgaactacatggtgtatacgatttttgtggtgctgatccttctgagcgccggcctggcgatcgggcacgcctactgggaagcacaggtgggtaacagctcctggtacctttacgatggagaggatgatacgccgtcctacagaggttttctgattttctggggatatatcatcgtgctcaatactatggttcccatttccctttacgtgtcagttgaagtgatccgcttgggacaatcacactttatcaactgggatctgcagatgtattatgcagaaaaggataccccagcaaaggcacgtactactacccttaacgagcaactgggccagattcattacatcttttccgacaaaactggaaccctgacccagaacattatgacctttaagaagtgttgcatcaacggacagatttacggcgaccatagagacgcatcgcagcataaccacaataagatagaacaggtggacttttcgtggaacacctacgccgacggcaaactcgcattctacgaccactaccttatcgagcaaattcagtcgggtaaggaacctgaagtgaggcagtttttcttccttctcgcagtctgtcatactgtcatggtcgatagaacggacggtcaactgaactaccaagccgcgtcaccggatgaaggggccttggtcaacgcagcacggaattttggatttgcatttttggcaagaacccagaacactatcactatctcagaactcgggaccgaacgcacctacaacgtgctggccatcctcgatttcaatagcgaccgaaaaagaatgtccataatcgtgcgtacgcctgaggggaacataaaactttactgcaagggagccgacaccgtcatttacgagaggcttcacaggatgaacccgacgaaacaagaaacccaagatgcacttgatatcttcgccaacgaaacgcttcgaactctttgcctgtgctacaaggaaatcgaagagaaggaatttaccgaatggaataagaaattcatggcagcatcagtggcttctacgaacagggacgaagcactggacaaggtgtacgaggaaatcgaaaaggatctgatcttgcttggagctacggcaatagaggacaagctgcaggacggagtccctgaaactatttccaagttggcaaaggcggacattaagatttgggtgctcactggagataagaaagagactgcagagaacattggcttcgcgtgcgaacttctgaccgaggacaccaccatttgctacggagaggacatcaactcattgctgcacgcaagaatggaaaaccaacgcaaccggggcggagtgtacgccaaatttgcgccaccagtgcaggaatccttttttcctccgggtgggaacagagcactgatcattaccgggtcctggctgaatgaaattctgctggagaaaaagactaagcgcaacaagattctgaagctcaagtttcctcggactgaagaggaacggcgaatgcgcactcaatcaaagagacgtctcgaagcgaagaaagagcagcgtcagaagaactttgtcgacctggcatgtgaatgcagcgctgtcatttgttgtagagtgacccctaaacaaaaggccatggtcgtggatctggtgaaacggtacaagaaagcaatcactctggccattggcgatggagccaatgacgtgaacatgataaagaccgcacatattggagtgggcatctcaggtcaggaaggaatgcaggctgtcatgtctagcgattactcattcgcgcaattccggtacctccagagacttctcttggtgcatggacggtggtcgtacattcggatgtgcaaatttctgagatactttttctacaagaactttgcatttactctcgtccacttctggtactccttctttaacggctacagcgcgcaaacggcatatgaggactggtttatcactctgtacaacgtgctttacactagccttccggtgctcctgatgggactgcttgaccaggacgtgtcggataagctgtcgctgcgctttccaggactctacattgtcggacaacgggaccttctgttcaattacaaacgcttttttgtttcgctgctgcacggagttctgacttcaatgattttgtttttcattcccctgggagcatatcttcaaacggtgggccaagatggtgaagcccccagcgattaccagtcctttgcagtgaccattgcaagcgccctggtcatcactgtgaactttcagatcggtcttgatacctcgtactggactttcgttaatgcattctccatttttggttcaatcgcattgtatttcggcattatgtttgattttcactcagcagggattcatgtgcttttcccttcggccttccaatttactggtaccgcgtccaatgcactgaggcaaccttacatctggttgaccatcattctcgcagtcgctgtgtgtctgcttccagtggtggcaatccgttttctctcgatgaccatttggccgagcgaatcggataagattcaaaagcaccgtaagaggcttaaggcagaagaacagtggcagcgcagacagcaggtctttcgtaggggcgtctcaactagacgctccgcatacgcgttttcgcatcagcgagggtacgctgatcttatctcgtcgggacgctccatacgaaagaaaaggagccctctcgatgccatcgtggcggatgggactgccgaataccggcggactggtgattcc

SEQ ID NO: 7234 - DNA, 3753 bp, synthetic construct
  misc_feature 1..3753: note = source = /note="Description of Artificial Sequence: Synthetic coding sequence"
  source 1..3753: mol_type = other DNA
atgtcaaccgagcgcgatagtgagactacctttgacgaggactcccaaccaaatgatgaagtggtgccatactctgatgatgagactgaggacgaattggatgatcagggttcagcagtcgagccagaacaaaaccgcgtgaaccgcgaggcagaagaaaaccgggaaccttttcggaaggagtgtacctggcaggtgaaagccaacgacagaaagtaccacgagcaaccacatttcatgaacactaagtttctttgtatcaaggaatccaagtacgcaaacaatgccattaagacttacaagtacaatgcctttacttttatccccatgaacctttttgaacaattcaagagagcggccaacctctacttccttgcactcctgatactgcaagccgtgccgcagattagcacgcttgcatggtacactactctggtccctctcctcgtggtgctgggtgtgaccgccatcaaagatctggtcgatgacgtcgccagacacaaaatggataaggaaatcaacaacaggacctgcgaggtcattaaggatgggcgtttcaaggtcgcaaagtggaaagaaattcaggtgggtgacgtgatccgtttgaaaaagaacgatttcgttcccgcagacatccttctcctttcgtcatccgagcctaactcgctgtgttacgtggagactgcagaacttgacggtgaaactaacctgaagttcaagatgtcgcttgaaattaccgatcaataccttcaaagggaagatactctggcaacctttgacggattcatcgaatgtgaagaaccaaacaaccggctggataagtttactggcacgcttttttggagaaatacttcgtttcctctggacgcagacaagattctgctgcgaggctgtgttattcgtaacaccgacttttgtcacgggcttgtcatttttgccggagcagataccaagatcatgaagaattcgggtaagactcggttcaagcgcaccaaaatagattacctcatgaactatatggtttacacgatttttgtcgtactgatacttctctcagctggtttggccattggacatgcgtactgggaagcacaggttggaaactcctcctggtatctgtacgatggagaagatgacactcccagctaccgtggtttcctcattttctggggatacataattgtacttaatactatggtgccaatttcgttgtacgttagcgtagaagttatcagacttggacaatcccactttatcaattgggatcttcagatgtactacgcagagaaagatacccctgcaaaggcaaggaccaccacccttaacgagcagctcggacaaattcattacatcttctcagataagacgggaactctgacccaaaacattatgacctttaagaagtgctgtattaacggccagatttacggcgaccatagagatgcctcccaacataatcataacaagatcgaacaggtcgatttttcatggaacacttacgcagacggcaagctggcattttacgatcattacctcattgaacaaatccagtcgggtaaagagcctgaagtgcgccagttcttttttcttctggcagtgtgtcacaccgtcatggtcgaccgcaccgatggtcagcttaactaccaagccgcaagccctgatgaaggcgcactggtgaatgccgcacggaattttgggttcgccttcctggcacggactcagaacactattactatttccgaactgggtaccgaacggacctacaacgttctggcaattctggactttaactcagatcgcaagaggatgagcattattgtaagaaccccggaaggcaacattaaactttactgtaagggggcagataccgtgatttatgagcgtctgcatcgcatgaaccctactaagcaggaaactcaagatgctctggacatttttgcaaacgaaaccctcaggacgctgtgcctgtgctataaggagatcgaagaaaaggagtttaccgaatggaataagaagtttatggctgctagcgtggcgtccactaatcgcgatgaagcactcgataaagtttacgaggaaatcgaaaaagacttgattcttctcggagccaccgctattgaagataaacttcaagacggggtgccagaaactatttctaaacttgcaaaagcagatatcaagatatgggtccttaccggtgacaaaaaagagacggctgagaatatcggatttgcttgcgagctgctgacggaagataccactatctgctacggagaggacataaacagtctcctgcatgccagaatggaaaaccaacgcaatagaggaggagtctatgctaagttcgcacctccggtgcaggagagcttttttccgcctggtggaaaccgagcactgattatcaccggatcatggctgaatgagattttgcttgagaagaaaaccaagagaaacaagatcctcaagctgaagttccccaggactgaggaagagcgccgaatgaggactcaatcgaaaaggagacttgaagcaaaaaaggaacagcggcagaaaaactttgtggatcttgcctgtgagtgttccgcagtgatatgttgtagagtgacccctaaacaaaaggcgatggtggtggatctcgtgaagcgctacaaaaaggccattacccttgcgatcggcgacggagccaacgatgtcaatatgataaagaccgcacacatcggagtgggaatttcgggtcaagaaggcatgcaggccgtgatgtcgtcagattactcgttcgcccagtttcgctatcttcaacggctgttgcttgtacacgggagatggagctacattaggatgtgcaagttcctccgttacttcttctacaagaattttgcgttcactctggtgcatttttggtattcattctttaacgggtacagcgcacaaacggcatacgaagattggttcataaccttgtacaatgtcctttacacttcgcttccagtgcttctgatgggactcctcgatcaggatgtgtcagataagctctcccttagattccctggtttgtacatcgtaggtcagcgtgacctgctctttaactataagcgattctttgtgtcgcttcttcatggagtgctgacgtcgatgatcctcttctttatcccactcggtgcatacctgcaaactgtcgggcaagatggagaggcaccttccgactaccaatcctttgcagtgaccatcgcgtccgcactggtgataaccgtgaattttcagattggactcgacacctcctactggacctttgtgaatgcgttttccatctttggtagcatcgcactgtactttggaattatgttcgactttcattcagcgggcattcatgtgttgtttcccagcgcattccaattcaccggtaccgcatcgaatgccctcaggcagccatacatttggctcactattatcctggcggtcgccgtgtgcctcttgcccgttgtcgctattaggttcctgtctatgactatatggccaagcgaaagcgataagatacaaaagcatcgtaaaaggctcaaagcagaagagcaatggcagagacgtcagcaagtctttagacggggcgtctcgaccagacgatccgcgtacgcgtttagccaccaacggggctacgccgatcttatttcgtctgggcgatcaatccggaagaaacgctccccccttgacgcaattgtggctgatggcactgcagagtacagacggaccggggattcg

SEQ ID NO: 7235 - DNA, 3753 bp, synthetic construct
  misc_feature 1..3753: note = source = /note="Description of Artificial Sequence: Synthetic coding sequence"
  source 1..3753: mol_type = other DNA
atgtctaccgaacgagactcagagactacgtttgacgaggattcccagccgaacgacgaggtggtcccctactccgacgatgaaactgaggatgagctcgacgaccagggttctgccgtggagccagaacagaatagagttaaccgcgaagcagaggagaatcgcgagccgttccggaaagagtgcacttggcaggtgaaggccaacgatagaaagtaccatgagcagcctcactttatgaataccaaatttctctgtatcaaggaaagcaagtacgcgaataatgccatcaaaacctacaagtacaacgcctttacctttatcccaatgaacctgtttgaacagttcaaaagagcagcgaacctgtactttctcgccctgctgatcctgcaggccgtcccacaaatttccactctcgcgtggtacacgactctggtgcctctgctcgtggtcctgggcgtgactgcgattaaagacctggtggatgacgtggcgcggcataagatggacaaggagatcaataaccgcacctgcgaggttatcaaagacggacgcttcaaagtggctaagtggaaggaaattcaggtgggcgatgtgatcaggctgaagaagaacgacttcgtgccggccgacatcctgctgctgtcctcatcggagcctaactcgctgtgctacgtggagactgcggaactggacggagagactaacctcaaattcaagatgtcacttgagatcactgaccaatacctgcagagggaggacacgctcgcaacttttgacggattcatcgaatgcgaggaaccaaataaccgcctcgataagtttaccggaactctgttctggaggaatacttcgttcccccttgacgcggacaaaatactgctccgggggtgcgtgatcagaaacactgacttttgtcacggactcgtgatcttcgcgggagcggacactaagatcatgaagaactcaggaaagacccggtttaagcggaccaaaatcgattacctgatgaattacatggtctacaccatattcgtggtgctcatcctgctgtcagctgggctggccattggacacgcgtactgggaggcgcaggttgggaacagctcttggtacctgtacgatggcgaggatgacaccccgtcataccgcggattcctcatcttttggggttacatcatcgtcttgaatactatggttccgatttcactgtacgtgtccgtggaggttatccgcctcgggcagtcacacttcatcaactgggacctgcaaatgtactacgccgaaaaggacaccccagcaaaagccagaaccaccactctgaatgaacagctggggcaaatccattacatcttctcagacaaaaccggaaccctgactcagaacatcatgactttcaagaaatgttgcattaacggccagatctacggagatcaccgagatgcgtcgcaacacaaccacaacaaaatcgagcaagtggacttctcgtggaatacttacgcggacggaaagctggccttttacgaccattacctgattgaacagatacaatccggaaaagaacccgaagtccgtcaattctttttcctgttggcagtgtgccatactgtcatggtcgatcggacggatgggcaactgaactaccaggcggcttcgcctgatgaaggagctctggttaacgcagcaagaaatttcggcttcgcatttctcgcccggacccagaacaccatcactatctcggaactgggcaccgagaggacttacaatgtgctggcgatccttgatttcaattccgatcgcaagcggatgtccattatcgttcgcactcccgaaggaaacatcaagctgtattgcaagggagcagacaccgtgatctacgagcggctgcaccggatgaacccaaccaaacaggaaacgcaggatgctctcgacatctttgcgaacgaaaccctccggaccctgtgcctgtgctacaaggagatcgaagagaaggagttcactgagtggaataagaagttcatggccgcgtcggtggcgtctacgaaccgggacgaagcactggacaaggtgtatgaggaaatcgaaaaggacctcatcctgctcggagctactgccatcgaagataagctccaggatggagtcccggaaaccatctccaaactggctaaagctgacatcaagatttgggttctgaccggagacaagaaggaaaccgctgagaacatcggattcgcctgtgaactgttgaccgaggataccactatctgttacggggaggacatcaacagcctgctccatgcgcgtatggaaaaccaaagaaacagaggaggcgtgtacgccaaatttgcaccaccggtccaagagtcattcttcccgcccggcggaaaccgggcgctgatcatcactgggtcctggttgaacgaaatcctgctcgagaagaaaaccaagcgcaataagatcctgaaactgaagttcccgcggaccgaggaggaaagacgcatgcgcacccagtcaaagagaagattggaagcgaagaaagaacagcggcaaaagaatttcgtcgaccttgcatgcgagtgcagcgccgtcatctgttgtcgcgtcaccccgaagcagaaggccatggtggtcgatctcgtgaagcgctacaagaaggcgatcactctcgctattggcgacggcgctaacgatgtgaatatgatcaaaaccgcccacatcggagtgggcattagcggccaggagggcatgcaggcagtgatgagcagcgattattcgtttgctcagttccgctacctgcagcgcctgcttctggtgcacggacggtggtcatacattaggatgtgcaaatttctgagatacttcttctacaagaatttcgccttcactctggtccacttttggtactcattcttcaatggttactccgcacagaccgcgtacgaggactggttcatcaccctgtacaacgtgctgtacacctcgctgccggtgctcctgatgggacttctcgatcaggacgtgtcagataaactttcacttcgattcccaggactctacatcgtgggacaacgcgatctcctgttcaattacaagcgcttcttcgtgtcgctgctgcatggagtgttgaccagcatgatcctgtttttcattccacttggagcatatctgcagaccgtggggcaggacggagaggcccctagcgactaccaatccttcgcggtgaccatcgcctcggccctcgtcatcaccgtcaattttcaaattggactggacaccagctattggacctttgtcaatgctttctcgatcttcggaagcatcgctttgtacttcggcatcatgtttgatttccacagcgctggcatccacgtcctcttccctagcgcctttcaattcactgggaccgcctcaaacgccctgagacagccgtacatttggctcactatcatcctcgccgtcgcggtgtgcttgctccctgtggtggcaatacgtttcctctcaatgaccatctggccttcggagtcggacaaaatccagaagcacaggaaacgcctcaaggcagaagagcagtggcaaagacggcagcaggtgtttcggcggggcgtgtcaacccgcagaagcgcctacgcattttcccaccagcgcggatacgccgacctcatcagctctggcagaagcatccggaagaagcgcagccctcttgatgcgatcgttgccgacggtactgcggagtacagaaggactggtgattca

SEQ ID NO: 7236 - DNA, 3753 bp, synthetic construct
  misc_feature 1..3753: note = source = /note="Description of Artificial Sequence: Synthetic coding sequence"
  source 1..3753: mol_type = other DNA
atgtcaacagaaagagattctgaaacaacgttcgatgaggattcccagccaaatgatgaagtggtgccttattccgacgacgagactgaagatgaactggacgatcagggatcagccgtcgagcccgaacagaaccgcgtcaacagggaggccgaagagaacagggaaccgtttcgtaaagaatgtacttggcaagtgaaagctaatgatcggaaatatcacgaacagccccactttatgaatactaaatttctatgtatcaaagagtctaaatatgccaacaacgctattaaaacatataagtacaatgctttcacttttatccccatgaatctctttgaacagttcaaaagggccgccaacctctatttcttagcccttctgattctgcaggcggtgccccagatctctactctggcctggtatacaactctggtccccctgttagtggtcctgggggtgactgccatcaaagatctcgtagatgatgtagcccgacacaaaatggataaagagattaataacaggacatgcgaagtcatcaaagatggaaggtttaaagtcgctaaatggaaggaaatacaggtcggagatgtgataagactcaaaaaaaacgatttcgttcccgctgatatactcctcctctcgagttcagaacccaattctctgtgttacgtggaaactgcagaacttgatggagaaacaaaccttaaatttaaaatgtcactcgaaatcactgatcagtatctgcaacgggaagatacactggctacgtttgatgggtttatagaatgtgaagaacccaacaacagactggataaattcacaggaacacttttctggcgcaacacatctttccctcttgatgccgacaaaatacttctacggggatgcgtcatccgcaatactgacttctgtcatgggctcgtcatctttgcaggagcagatactaaaattatgaagaactccggaaagactaggtttaagcggactaaaattgattacctaatgaattatatggtatacactatcttcgtggtactaatacttctgtccgcggggcttgcaattggacacgcctattgggaagcccaggtgggaaattcctcatggtatctatatgatggagaagatgatacacctagttatagaggatttctcatattctggggatatattatcgtactgaatacaatggtacccatcagtctttatgtgtcagtggaggtgatcagattggggcagtcacacttcattaattgggatctgcagatgtactatgccgaaaaagatacacctgccaaagccaggactactacacttaacgaacagcttggacagatccactatatcttctccgataaaactgggacactcacacagaacataatgacttttaagaaatgctgtataaacgggcagatctacggagatcatcgggatgcatctcagcataaccataacaaaatagaacaggttgatttttcatggaatacatatgcggatgggaaattagcattctatgaccattatttaatcgaacagatccagtcgggaaaagaaccagaagttagacagtttttttttcttttggccgtgtgccacacagtcatggttgatcggactgatggacaactaaactatcaagccgcctccccagatgaaggagctctcgttaatgctgctcgaaacttcggattcgctttcttagcacggacgcagaatacaatcactatctctgaacttggaactgagcgaacatataatgtgcttgccatcttagacttcaattcagacagaaaacggatgtcaataatagtaagaacacctgaggggaatataaaactttattgtaaaggagcagatacagtcatctatgaaagattacaccggatgaatcccactaaacaggaaactcaggatgcgctcgacattttcgctaacgaaactctccgaactttatgcctctgctataaagaaatcgaagaaaaagaatttacagaatggaacaagaaatttatggccgccagtgtcgcgtctacaaaccgggatgaggcactggataaagtgtatgaagagatcgagaaagatctgattcttctaggagccacagcaatagaagataaactacaggacggagtgcccgaaactatatccaaactcgctaaagctgatataaaaatatgggtattgacaggagataaaaaggaaacagcagaaaacataggattcgcttgcgaattacttactgaagacactacaatatgttatggggaagatattaatagtctcctccacgcccgaatggaaaaccagcgaaaccgcggaggggtatacgcaaaattcgctccaccagttcaggaaagttttttccctcctggggggaaccgggccctaataataacagggtcttggctaaacgaaattctcctagaaaaaaagactaaacgcaataaaatcttaaagttaaaattccctaggacagaagaagaaagacggatgcggactcagtccaaacgccggttagaagcaaaaaaagaacaaagacagaaaaacttcgtggacctcgcgtgtgaatgttctgcagtcatctgttgtcgggtgacaccaaaacagaaagccatggttgtggatctcgtaaaacggtataagaaggctataacactggccatcggagatggggctaacgatgtgaatatgattaaaactgcccatataggagtggggatctctgggcaagaagggatgcaggcggtgatgtcgtcggactacagttttgcccagtttaggtaccttcagcggctactactagtgcatggaagatggtcatacatccgaatgtgcaaattcctccgatatttcttttacaaaaatttcgcatttactcttgtacatttctggtactcatttttcaatgggtattcagcgcagactgcctatgaagattggtttattactctttacaacgtcctctacacttctctacccgtacttctcatgggactgcttgatcaggatgtgtccgataaactttctttacggtttccagggctctatatcgtggggcagcgcgatcttctgttcaactataaaagattttttgtgtccctcctccacggagtgctgacatctatgattctattcttcattccattaggagcctatttgcaaactgtaggacaggacggggaggcaccctcagattaccagagttttgctgtaacaattgcttctgcactcgtgattactgtgaactttcaaattgggcttgatacaagttattggacattcgtgaatgctttcagtatctttgggtcaattgccctgtattttggaatcatgtttgatttccactctgccgggatccacgtgctgttcccctccgctttccagtttacaggaacagcatcaaacgctcttcgccagccctatatctggctcactataatcctcgccgtcgcagtgtgccttctcccagtggtggccatccgattcctgtccatgactatttggccaagtgaatctgataaaatccagaaacacagaaagaggttgaaagcagaagaacaatggcaaagacggcagcaggtttttcggaggggggtgtccactcggcgctcagcctacgctttctcccatcagaggggatacgccgatttgatcagttcagggcgctccataaggaaaaagcggtccccacttgatgccatagttgctgatggaacagcagaatacaggaggactggggatagt

SEQ ID NO: 7237 - DNA, 3753 bp, synthetic construct
  misc_feature 1..3753: note = source = /note="Description of Artificial Sequence: Synthetic coding sequence"
  source 1..3753: mol_type = other DNA
atgagtactgaacgggattcggagactactttcgatgaagattcgcaaccgaatgacgaggtggtgccctactcggacgatgaaacggaagatgaactggacgaccaggggtcagcggtggagccagaacaaaaccgcgtcaacagagaagctgaagaaaatcgggagccgttcagaaaggaatgcacttggcaggtgaaagctaacgatcggaagtaccacgagcaacctcatttcatgaacaccaagtttctctgtataaaggaaagcaagtacgcaaacaacgcgatcaagacctacaaatacaatgcgttcaccttcattccgatgaacctgtttgagcagttcaagcgggcggccaacttgtacttccttgcactcctgatcctccaggccgtgccacagatctccactctggcatggtacactactctcgtgcccctcctcgtggtgctgggcgtgactgccattaaggacctcgtggacgatgtggcccggcacaaaatggataaggaaatcaataaccggacctgcgaggtcatcaaggatggacgcttcaaggtggccaaatggaaagagatccaagtgggcgacgtgatccggctcaagaaaaacgatttcgtgccggcagacattctgctcctgtcctcatcagagcccaacagcctgtgctacgtcgagactgccgaactggacggagaaaccaacctcaagtttaagatgagcctggaaatcactgatcaatacctgcagcgcgaggacaccctcgctactttcgacggtttcatcgagtgcgaagagccgaataaccgcctcgacaagttcactggaacgctcttctggagaaataccagctttcctctggatgccgacaagatactcctgcggggatgcgtcattcgaaataccgacttctgccatggactcgtgatctttgccggagcagacaccaagatcatgaagaatagcggaaagactcgtttcaagaggacgaagatcgactacctgatgaactacatggtatacacgatctttgtcgtcctgatactcctctccgcgggtttggctatcggccacgcatactgggaggcccaagtgggaaactcgtcgtggtacctgtacgatggcgaggatgacaccccgtcctaccgcggctttctcatcttctggggatacatcattgtgctgaacactatggtgcctatttcgctgtacgtgtctgtggaggtgattaggcttggtcagtcccacttcatcaattgggacctccaaatgtactacgcggaaaaagatacccctgccaaggcacggacgactactttgaacgagcaactcgggcagatccactatatctttagcgataagacgggtacccttactcaaaacatcatgacgttcaagaagtgttgcatcaatggacaaatctacggagatcaccgggacgcctctcaacataaccacaacaaaattgagcaggtggacttttcatggaatacctacgccgatgggaagctcgccttctacgaccactaccttatcgagcagatccagtcgggaaaagaacccgaggtgcgccaattcttcttcctgctggctgtctgccacaccgtgatggtggaccgcacggacggacaattgaactaccaggctgcgtcgccggacgaaggggcactggtcaatgcagctagaaacttcggcttcgcattcctcgctagaactcagaatactattactatctccgagcttggaactgagaggacttacaacgtcctcgccatcctcgacttcaattccgataggaagcgcatgtcaatcattgtgcggacccccgaagggaatatcaaactctactgcaagggagccgacacggtgatttacgaaagactccatcgcatgaacccaaccaagcaggaaacccaggatgctctggacatttttgccaatgaaactctgcgcactctctgcctctgctacaaagaaatcgaagagaaagaattcactgagtggaataagaagttcatggcggcctcggtcgccagcactaaccgtgacgaagcactcgacaaagtgtacgaagaaatcgaaaaggacctcatactgctgggtgccactgcaatcgaggataagctccaggatggcgtgcccgaaactatctcaaagctcgccaaggccgacattaagatctgggtgctcaccggagataagaaggagactgcagaaaacatcggattcgcttgtgagctgctcactgaagataccaccatttgctacggtgaggacatcaactccctgctgcacgctagaatggaaaaccagaggaacaggggcggcgtgtacgcgaagtttgccccgccggttcaagagagcttcttcccgccgggcggcaaccgggccctgatcatcactgggagctggctcaatgagatcctgctggagaagaaaaccaagcgcaacaagatccttaagctgaagttcccgcggaccgaagaagaacggagaatgaggacccaatcgaagcgccgcctggaagccaagaaggaacagcggcagaagaattttgtggatttggcctgcgaatgctcagctgtgatttgctgccgcgttacgcccaagcaaaaggctatggtggtcgacctcgtcaaacggtacaagaaagctattaccctggcgatcggagatggcgcgaatgacgtcaacatgatcaagaccgcccacatcggcgtggggatctcagggcaggaaggaatgcaggcggtgatgtcctccgattattcgttcgcccagttccgctatctgcagcgtctgcttctggttcacggaagatggtcgtacattcgcatgtgtaagtttctgagatactttttctacaaaaactttgcttttactctcgtgcatttctggtactccttctttaatggatactcagcccaaaccgcctacgaggattggttcatcactctgtacaacgtgctgtacacctcactgcctgtcctgctcatgggactgctggatcaagacgtctcggacaagctgtcgctgagattccctggactgtacatcgtgggacagcgggacctcctgttcaactacaagagattcttcgtgtcgctcctccacggagtcttgacttcgatgatcctctttttcatcccgcttggggcttacctccaaacggtggggcaagatggcgaagcaccaagcgactaccagtcattcgcagtgactatcgcttccgcccttgttatcactgtgaactttcagatcggactggatacctcctattggactttcgtgaatgctttttccatcttcggttccatcgccctgtacttcggcatcatgttcgacttccacagcgcgggaatccatgtgctcttcccatccgcttttcagttcactgggaccgcatcgaatgcattgcggcagccctacatctggctcaccatcatcctggcggtggccgtgtgcctcctgccagtagtggcgatcaggttcctgtcgatgaccatctggccatcagaatccgacaagatccagaaacaccggaagaggcttaaagctgaggaacaatggcagcgccggcagcaggtctttcgccgcggtgtctcaacgcgccgcagcgcctacgcgttttcacatcagcggggatatgctgatctcatctcgtcgggcagatctatccgcaagaagcgctcccctcttgatgccatcgtggcggacgggaccgctgagtaccgcagaactggagactcc

SEQ ID NO: 7238 - DNA, 3753 bp, synthetic construct
  misc_feature 1..3753: note = source = /note="Description of Artificial Sequence: Synthetic coding sequence"
  source 1..3753: mol_type = other DNA
atgagcaccgaacgcgactcagaaaccactttcgacgaggacagccaaccaaacgacgaagtggtcccttacagcgacgacgagactgaggacgagctcgacgaccaggggtccgctgtggaacccgaacaaaaccgcgtcaaccgggaagccgaagaaaatagggagccgttccggaaggagtgcacttggcaggtcaaggcaaatgatcggaagtaccatgaacagccccactttatgaacaccaagttcctttgcatcaaggagtcgaagtacgcgaataacgccatcaagacgtacaagtacaacgcatttacgtttatcccgatgaatctgtttgaacaattcaaacgcgccgccaatctgtacttcctcgcccttctcatccttcaagccgtcccgcagatttctactctggcctggtacaccaccctggtgccgctgttggtggtcctgggtgtgactgccatcaaggacctcgtggacgatgtcgcaagacacaaaatggataaggagatcaataaccgaacgtgcgaagtgatcaaggatggacggttcaaggtggcgaaatggaaggagatccaggttggcgacgtgatccgcctcaagaaaaacgactttgtgccggctgacatccttctgctgtcatcatcggaaccgaactcgctctgttacgtggaaaccgccgaactggacggggagactaatctgaagttcaaaatgtctctggaaatcacggaccagtacctccaacgcgaggatacgctggctactttcgatggcttcatcgaatgcgaagagcccaataaccggctggataagtttaccggaacgctcttttggcggaacacctcattcccgctggacgctgataagatcctccttaggggttgcgtgattcggaatactgatttctgtcatggcctcgtcatctttgccggcgccgacaccaaaatcatgaagaattctggaaaaacccggtttaagaggaccaagattgactaccttatgaattacatggtctacactatcttcgtcgtccttatactgctgtcggcgggacttgccatcggtcacgcctactgggaagctcaggttggaaacagctcgtggtacctttacgacggagaagatgacaccccgagctacaggggattcctgatcttctgggggtacatcattgtgttgaatactatggtgccaatctcactctatgtgtcagtggaggtcatccggctggggcagtcacacttcatcaattgggatctccaaatgtactacgccgagaaagatacgccagccaaggcccgtactactactctgaacgagcagctgggacagatccactacatcttctcggataagaccggaacgctgactcagaacatcatgactttcaagaaatgctgcattaatggacagatttacggagatcatcgggacgcttcgcagcataatcacaacaagatcgaacaggtcgacttctcgtggaatacgtatgcggacggaaagctggctttctacgatcactatttgattgagcagatccaaagcggaaaggaaccggaggtgagacaattcttcttcttgctggccgtgtgccacactgtgatggtcgacagaaccgatggtcagctgaactaccaagccgcttcaccagacgaaggcgccctggtgaacgcagccagaaactttggcttcgcctttctggcacgtactcagaacacgatcaccatatcagaactcggcactgaaaggacgtacaacgtgttggctatcctggacttcaattcggatcggaaaagaatgagcattatcgttagaaccccagaaggcaacataaaactgtactgcaagggggcggatactgtcatctacgaaagacttcatcggatgaaccccactaagcaggaaactcaagatgcactggacatcttcgcgaacgaaactctccgcaccctgtgtctctgttacaaggagatcgaggagaaagaatttactgaatggaacaagaagtttatggctgcctcggtggcctccactaatcgggatgaagcgctggacaaggtgtatgaagaaatcgaaaaggatctgatcctcttgggagccactgcgatcgaggacaagctgcaggatggtgtcccagaaactatctccaaactggcaaaggcggacatcaaaatctgggtgctcactggcgacaagaaggagactgcagaaaacattggattcgcatgcgagcttctgaccgaggacaccaccatatgctacggagaagatatcaactccctgctccacgcgcgcatggaaaatcagagaaaccgcggcggggtgtatgcgaaattcgcgcccccggtccaagagtcgtttttcccgccgggaggcaacagagctcttatcatcactggatcctggctgaacgaaatcctgctcgagaaaaagaccaagcgcaacaagattctcaagctgaagttcccgcggaccgaggaagagcggcgcatgcggacccagtctaagcggcgccttgaagcgaaaaaagagcaacggcaaaagaacttcgtggacctggcttgcgagtgctcggcagtgatctgctgcagggtcacccctaaacagaaggcaatggtggtggacctcgtcaaacgttacaaaaaggcgatcaccctggcaatcggtgacggcgccaatgatgtcaatatgatcaagactgcacatattggagtgggcatctcgggacaggaaggtatgcaagccgtgatgagctccgactacagctttgcgcaattcaggtatctccaacgcctcttgctggtgcatggtagatggagctacatcagaatgtgtaagtttctcagatacttcttctacaagaattttgctttcaccctggttcacttctggtacagctttttcaacggatacagcgcgcagaccgcatacgaggattggttcatcaccctgtacaacgtgctgtacacgtccctgccagtgctgctcatgggtctgcttgatcaagatgtgtcggataagctgtccctcagattccccggcctgtacatagtgggccagcgcgacctgctcttcaactacaaaaggttcttcgtgtccctgcttcatggcgtgctcacctccatgatcctgttctttatcccgctcggagcatacctccagaccgtggggcaggacggcgaggcgccgtcggattaccagtccttcgcagtgaccatcgcttcagcgcttgtgattaccgtcaacttccagatcggactcgacactagctactggaccttcgtcaatgcgttcagcatcttcggctcgatcgccctctactttgggatcatgttcgatttccactccgcggggattcacgtgcttttcccatccgcattccaatttaccggaaccgcctcgaacgcgttgcggcaaccttacatttggctcaccatcatccttgcggtggccgtttgtttgctgccggtggtcgccatcaggtttttgtcaatgactatctggccttcggagagcgacaagatccagaaacaccgcaagagactgaaggccgaggaacagtggcagaggcgtcaacaggtgttccggcggggagtctccactcggagatcggcctatgctttctcccatcaacgcggctatgccgacctgatctcgagcggacgcagcatccgcaagaagaggtccccactggatgccatcgtggcagacgggaccgcggagtaccggagaaccggtgactca

SEQ ID NO: 7239 - DNA, 3753 bp, synthetic construct
  misc_feature 1..3753: note = source = /note="Description of Artificial Sequence: Synthetic coding sequence"
  source 1..3753: mol_type = other DNA
atgtcaactgagagggatagcgagaccacttttgatgaggacagtcagccaaacgatgaagtggtgccttatagcgacgatgaaaccgaggacgagctggatgatcagggctcagccgttgaacccgaacagaacagggtgaacagggaggccgaggagaacagggagccatttcgaaaagagtgtacctggcaggtgaaggccaacgacaggaaatatcacgaacagcctcattttatgaacacaaaattcttatgcataaaggagtctaagtacgccaataatgccattaaaacttataagtacaacgcctttacctttatcccaatgaacctctttgaacagtttaagcgcgctgcaaatttatattttctagctctgctgatccttcaagccgttccacagatttccacactcgcatggtataccacactggtccctctgttagtggttctgggcgtcaccgcaattaaagacctagtggacgatgtcgcccggcataagatggataaggagattaataaccgaacctgcgaggtgataaaggatggacgcttcaaggttgccaaatggaaagagatccaagtcggagatgtgatcaggctgaaaaagaacgactttgtacccgctgacattctgttactgtcttctagtgaacccaactccttatgctacgtggaaactgcagagctggacggggaaactaatctgaagttcaaaatgagcctggagattacagatcagtacctgcagcgggaagatactttagccactttcgatggcttcattgagtgtgaagagcctaataacaggctcgacaagtttaccgggaccctgttctggagaaacacctctttccctctcgatgctgataagattctgctacggggttgtgtgatccgtaacacagacttttgccacggactggtgattttcgccggggctgacaccaagattatgaaaaattccggcaaaaccaggttcaaaaggaccaaaatagattatctgatgaactacatggtgtatactatctttgtggtgctcatactcctgtctgccggcctcgctataggacacgcttactgggaagcccaggtgggtaattcctcttggtacctttacgatggtgaggatgacactccaagctacagagggttcctgatattttgggggtacataattgttctgaataccatggtgcccatcagcctgtatgtgtccgtcgaagttatacgcctgggccagagtcactttataaattgggaccttcagatgtattacgccgaaaaagacacaccagctaaggcccgcactaccactctgaacgaacagctgggccagattcactatatcttctctgataagaccggcaccctgacacagaacattatgactttcaaaaagtgttgcataaatgggcagatctacggcgatcacagggacgcaagccaacacaatcacaacaaaatagaacaggtggacttctcatggaacacatacgcagatgggaagctcgctttctacgaccactacctgatagagcagatccagtccggcaaagaaccagaggttcgacagtttttctttctgcttgctgtgtgtcacacagtgatggtcgaccggacagatggccagctgaactaccaagccgcctcccccgatgagggggccctggtgaacgcagcccgcaactttggctttgctttcctggcccggacacagaacaccatcactatctctgagttagggactgagaggacttataatgttctggccatccttgactttaacagtgacaggaagagaatgtcaataattgtgcgaaccccagagggtaacattaagctttattgcaagggcgctgacactgtgatttacgagaggctacacagaatgaacccaaccaaacaggagacacaagatgcactggatatcttcgcaaatgagactctccgcaccctttgtctgtgttacaaggagatcgaagagaaggagtttaccgagtggaacaagaagttcatggctgccagcgtcgcctccaccaacagagatgaggctctggacaaggtctatgaggagattgagaaagacttaattctgctgggagctaccgccatagaggacaaactgcaggacggcgtcccagagacaatctctaagctagcaaaggctgacatcaaaatatgggtgctgacaggggataagaaagagaccgcagaaaacatcggattcgcatgcgaactgctgaccgaagataccacaatttgctatggggaggatataaacagtctgctgcatgctcgtatggagaatcagaggaacaggggaggcgtgtacgccaaattcgcccctccagtacaagaatctttttttccacccggcgggaacagggcactgattattaccgggtcctggctgaacgagattttactggaaaaaaagactaaacggaataagatcctgaagctcaagtttcctagaaccgaggaggagcgcaggatgagaacccagtctaaacggaggctagaggctaaaaaagagcagaggcagaagaactttgtggacctagcctgcgagtgcagtgccgtgatttgctgcagggtgaccccaaaacagaaagccatggtcgtggacttggtaaagcgatacaagaaggccatcacactggcaattggcgacggagcaaatgacgtcaatatgattaagactgcccacatcggcgtgggcattagcggtcaggaagggatgcaagcagtgatgtccagtgattattcatttgctcagttccgatacctgcagcgattactgctagttcacggacgttggtcctatataaggatgtgtaagtttttgagatacttcttttataagaatttcgccttcacactggtgcacttttggtacagcttcttcaatggttactctgcacagaccgcatacgaggactggttcatcacactgtataacgtcctatacacctccttaccagttctgctgatgggcctgctggaccaggatgtttctgataagctgagtcttcgtttccctggtctgtacatcgtgggccagagggacttactatttaattacaagcggtttttcgtcagcctgcttcatggagtgctaaccagcatgatccttttcttcattccactgggagcttatttgcaaaccgtgggccaggacggcgaggccccaagtgactaccagtccttcgccgttactatagctagtgcactggtcatcaccgtgaattttcagattggactggatacttcttactggactttcgttaacgccttttccatcttcggaagcatagccctgtactttggcataatgtttgattttcattctgccgggatccacgtgttgttcccaagtgcctttcagttcactgggactgcctccaacgccctacgccaaccctatatctggctcaccataatcctggctgttgccgtgtgcctgctccccgtcgtcgctattcggtttctgtccatgaccatttggccatccgaatccgacaaaatacagaagcaccgcaagagacttaaagcagaagaacaatggcaaagacggcagcaggtgttccgccgtggcgtgtctactcggcgatctgcctacgccttttcccaccaacgcggttatgccgacttaataagcagcggcaggtctattcggaaaaagcgcagcccattagacgctatcgtcgctgatggaaccgcagagtatagaaggacaggtgactcc

SEQ ID NO: 7240 - DNA, 3753 bp, synthetic construct
  misc_feature 1..3753: note = source = /note="Description of Artificial Sequence: Synthetic coding sequence"
  source 1..3753: mol_type = other DNA
atgagcacagagcgcgatagcgagacaacttttgatgaggactcacaaccgaatgacgaggttgttccgtattccgatgacgagaccgaggacgaattagatgatcaggggtcagccgtcgagccggaacaaaaccgagtgaaccgagaagctgaggaaaatagggaaccttttaggaaggaatgcacctggcaggtgaaggctaatgatagaaagtaccacgagcaaccacatttcatgaacacaaaattcctgtgcattaaggagtctaagtacgcaaataatgccattaagacatataagtacaatgcctttacattcatacccatgaatcttttcgagcagttcaaacgtgcggccaatctctattttctagcgctgctgatcctgcaggccgtcccacagatctccaccctggcttggtacactacactcgtcccgctgctggtggtccttggtgttactgcgattaaagacttggtcgatgacgttgcgagacacaagatggataaagaaataaacaacagaacctgtgaagtgatcaaagacggacgtttcaaggtggcaaagtggaaagagattcaggtaggtgacgttattcgcttaaagaaaaatgactttgttcctgcagatatcctgcttctctcgtcatctgagcccaatagtttatgctatgtcgagactgcggaactggacggagaaactaacctgaaattcaagatgagcctcgagattactgaccagtacctccagagagaggacactctggcgacgttcgatgggtttattgaatgtgaagagccaaacaatcggttagacaagtttactggtaccctcttctggcggaacacttcattcccccttgacgccgataaaattttgttacgggggtgtgtaattaggaacactgatttttgtcacggcctggtgatctttgccggtgccgatacaaagataatgaagaactcaggcaagacccggtttaagcgtactaaaatcgattacttgatgaattatatggtttacactatattcgtggtgctgatcctgctgtccgcgggcctagccattggacatgcctactgggaggcgcaggtaggaaactcttcctggtacctgtacgatggcgaggacgatacgccctcgtacagaggcttcctgatcttctggggatatatcattgttctcaataccatggtgccaatcagcctgtatgtcagcgtggaggtgatccgcctagggcaaagccattttatcaattgggacctgcagatgtactatgccgaaaaggacacacccgcaaaagcgaggaccacaaccctgaatgaacagctgggccagattcattatatcttttccgacaagacagggacgctgactcagaacataatgacatttaagaaatgctgcattaacggccagatatacggagatcacagagatgcaagtcagcacaaccacaacaaaatcgagcaggtggatttttcctggaacacatatgccgatggcaagctggccttttatgatcactatctaatagaacagatccagtctgggaaggagccagaggtccgacagttctttttcctgcttgcagtctgccacactgtgatggttgaccgaaccgatggtcaactgaattatcaagccgcctcccccgacgagggcgctctggtaaacgctgcccgcaactttggattcgcttttttggctagaacgcagaacacaattacaattagcgagctcgggacggagaggacttacaacgtgctggcaatacttgatttcaactcagacagaaagcggatgagcatcattgtgcgcacgcccgagggcaacatcaaattgtactgcaagggagccgacactgtgatctacgaacggcttcaccgtatgaatccaaccaaacaggagacccaggatgccctcgacatctttgcaaatgagaccctgcgtactctgtgcctttgctataaagagatcgaggagaaagaatttacggagtggaacaagaaattcatggcggcaagcgtagcttcgacgaatcgcgatgaggcattagacaaagtttacgaagaaattgagaaagacttgattttgctgggcgccaccgcaatagaagataagctgcaagacggtgtgcccgagactatatctaaactggccaaagccgacatcaaaatctgggtgctcaccggggacaaaaaggaaactgcagaaaacatcggcttcgcctgtgagctgctcacagaagatacaactatttgctacggagaggatataaacagcctgcttcacgcaaggatggagaaccagaggaaccggggaggtgtctacgcaaagttcgcgccccctgtccaggagtccttctttccaccagggggaaaccgagcgctcattataacgggcagctggttgaacgagatcctgctcgaaaaaaaaaccaaacgcaacaagattctaaagcttaagttcccacggaccgaggaagagaggcggatgagaacccagtcgaagagaaggctcgaagcgaaaaaagaacagagacagaaaaatttcgtggacctggcatgtgagtgctctgcggttatatgttgtagggttacgccaaagcaaaaggccatggtggtggacctcgtgaagcgctataagaaggctattacacttgctattggggatggagccaatgacgtgaacatgataaagacagcccatattggggtggggatttctggccaggagggcatgcaggcagtgatgtcctctgattacagtttcgctcagttccggtatctgcagcgcctcctactggttcacggcaggtggtcatatatccgaatgtgcaaattcttgcgctatttcttttacaaaaatttcgcctttacactcgtgcatttttggtattcattttttaacggatactccgcccagactgcctacgaggattggttcataaccctttataacgtgttgtacacctccctgccagtcctattgatgggccttttagatcaggacgtctcagataaactttcactgcgcttccccgggttatacattgtgggccagcgagacttgctgtttaattacaaacggttcttcgttagcctgttgcacggggtactgacttccatgattttgttttttatcccgctcggcgcatacctgcagaccgtgggacaggacggcgaagcccccagcgattaccagtcctttgccgtgaccattgcttccgcactagtaatcaccgttaatttccagataggcctggatacgtcttactggacttttgtgaacgctttttcgatcttcggctctattgccctttattttgggatcatgttcgatttccattccgcaggtatccacgttctgtttccatcagcatttcagtttaccggcacagcatctaacgccctgcgacagccctacatctggcttaccattattctcgcagtggctgtctgcctgctcccagtcgtggctatcaggtttctctccatgacaatctggcctagtgagtctgataagatacagaaacataggaagcggttgaaggccgaggaacagtggcaacgtaggcaacaagtgttcagaagaggagtttcaacgagacgttctgcctatgctttttcacaccaaagaggctacgccgatctgatttcctccggcaggtccatcaggaaaaagcgcagccccctggatgctattgtcgccgatggaacagccgaatatagacggaccggtgattct

SEQ ID NO: 7241 - DNA, 3753 bp, synthetic construct
  misc_feature 1..3753: note = source = /note="Description of Artificial Sequence: Synthetic coding sequence"
  source 1..3753: mol_type = other DNA
atgtccactgaaagggacagcgagaccacctttgatgaggatagccagcccaacgatgaggttgtgccctatagtgatgatgaaactgaggacgaactggatgatcaaggtagtgcagttgagccagaacagaatcgggttaaccgggaggcagaggagaaccgagaacccttccgcaaggaatgtacttggcaggtgaaggcaaacgaccgaaaataccacgagcaaccccacttcatgaacaccaagtttctctgtataaaagagagtaagtatgccaataacgcaatcaaaacttataagtacaacgccttcacgtttatccccatgaatctctttgaacaatttaagcgggccgctaatctgtactttctggcgctgttgatcttgcaggccgtcccgcaaatttccacactcgcatggtataccacactcgtgccccttctcgtcgtgctcggcgtcaccgccattaaggacctggtagacgatgtcgcccggcacaaaatggacaaagaaattaataatcgaacttgcgaggttattaaggacggtaggttcaaggttgcaaagtggaaggagattcaagtgggagatgtgattagacttaaaaaaaacgacttcgtccctgcggacatactgctcctttcttcttccgaaccgaactcactctgttacgtggaaactgcagagctggacggcgagacaaatctgaaattcaagatgtccctcgagatcacggaccaatatctgcagcgcgaggatacccttgcgactttcgatggtttcatcgagtgtgaagagccgaataaccggcttgacaagttcacaggaaccttgttttggaggaatacctcctttccactggatgctgacaagatcctactgcggggatgcgtaatcaggaacaccgacttctgccacgggctggtcatttttgccggagccgacacgaaaatcatgaagaattccgggaaaacccgtttcaaaaggaccaagatagattacctgatgaactatatggtgtatactatatttgtggttctaatcttgctgagcgcaggtctagccatcggacacgcctattgggaggctcaggttggaaatagcagttggtacttatacgacggagaggacgacactccttcatatagaggctttcttattttttgggggtacattattgtgcttaacacgatggtacccatatctctgtacgtcagcgtggaggtgataaggctcgggcagtcccattttatcaattgggatctccagatgtattatgcagagaaagataccccggctaaagctcgcactacgaccctgaatgagcagctcggacaaatacactacattttctccgataaaaccgggacccttacgcagaatataatgacctttaaaaaatgttgcatcaacggacagatatacggtgatcacagggacgcctcacagcacaatcacaacaagattgagcaagtggacttttcctggaatacatatgcagacggcaagttagcgttctatgaccactacttaattgagcagattcagtctggcaaggaacctgaggtgagacaattcttctttctcttggcggtgtgccatacggttatggttgataggactgacggccaactgaattaccaggctgcctctccggatgaaggcgccctggtcaacgcagcccggaactttggatttgcttttctggcccggacccagaacacgattaccataagtgaactgggaacggagcggacctacaacgtgttggctatattagattttaacagtgataggaagaggatgtctatcattgtccggaccccagagggaaatataaaattgtactgcaagggggctgacacggttatatacgaacgtcttcataggatgaacccaacaaaacaggagacccaggacgcgttggatattttcgcaaatgaaactctgcggaccctgtgtctgtgctacaaggaaatcgaagagaaagagtttacagaatggaacaaaaaattcatggctgcttctgtcgcatccactaacagggatgaagcacttgacaaggtctacgaagaaatagagaaggaccttattctcctgggggccactgcaattgaggacaaactgcaggacggagtgcctgagacaatctctaagttggccaaagcggacatcaagatttgggtcctgactggtgacaaaaaagagacggcagaaaacatagggtttgcttgtgaactcctcactgaagacaccaccatatgctacggcgaggatattaattccttattgcatgctcgcatggagaaccagagaaatagaggcggggtgtatgcaaagttcgccccacccgttcaggaatcgtttttccctccaggaggaaatagagctctgataatcaccggctcttggctgaatgaaatactgctagaaaagaaaacgaagagaaataagatcctgaagttgaagttccctcgcactgaggaagaaaggcggatgcgaacacaatccaaacgacgcctggaggctaagaaggagcaaagacagaagaatttcgtggacctggcatgtgagtgttcagctgtgatctgttgtagagtaacacctaagcagaaggcgatggtggtcgacctggtgaaacggtacaaaaaggcgataacactggcaataggcgatggggccaacgatgtgaacatgatcaagaccgctcatattggtgtcggaataagcggccaggagggaatgcaagctgtgatgagtagcgattacagctttgcgcaattccgttatctccagcggctgctcttagtgcacggaagatggagttacatccggatgtgtaagtttcttcgctacttcttctacaagaattttgcctttaccctggtacatttttggtatagtttctttaatggttattcagcccagacggcctacgaggactggtttatcactctgtataacgtgctgtatacctcactgcccgtgctcctcatgggactgctagatcaggacgtgagcgataaattatcattacggttccccgggctttatatcgtggggcagcgggaccttttattcaattataaaaggttctttgtgtcgctcctgcacggcgttctgacaagtatgatcctgttttttattcccttaggtgcgtaccttcagacagttggacaggatggcgaagccccttcggactatcagtcgtttgccgtcacaattgcctccgcgctcgtgattaccgtgaactttcagattggcctcgacacctcttattggactttcgtcaacgcctttagtatatttggatccattgctctctacttcggaattatgtttgactttcactccgctggaatccacgtgctgttcccttccgcattccagtttaccggtaccgcatctaacgcgcttagacaaccatacatatggctgacgatcattttggctgtggccgtgtgcttgctccctgttgtcgccataaggtttctgtctatgacaatctggccgagtgaatccgataagatccagaaacaccggaaaaggcttaaggctgaagagcaatggcagcggaggcagcaggtgttccgcaggggtgtgtcgacacgccgatctgcctatgccttttcccaccagcgaggatatgccgatctgatatctagcggacggtccataagaaagaagcggagcccactcgacgcaattgtcgcagacggcaccgccgaatacaggaggacaggcgactca

SEQ ID NO: 7242 - DNA, 3753 bp, synthetic construct
  misc_feature 1..3753: note = source = /note="Description of Artificial Sequence: Synthetic coding sequence"
  source 1..3753: mol_type = other DNA
atgtctactgaaagagattcagaaaccacatttgatgaagattcacaaccaaatgatgaagtcgttccttattctgatgatgaaactgaagatgaacttgatgaccaaggaagtgctgtagaaccagaacaaaatagagttaatagagaagcagaagaaaatagagaaccatttagaaaggaatgtacatggcaagttaaagctaatgatagaaaatatcatgaacaaccacattttatgaatacaaaatttctttgtattaaggagtctaaatatgcaaacaatgcaattaagacatataaatataatgcttttactttcattccaatgaatttatttgaacaatttaaacgagctgcaaacctatattttcttgcattgttaattttacaagcagtaccacaaatcagtactttagcatggtatacaacattagttccattattagttgttcttggagttactgctattaaagatttagtagatgatgttgcaagacacaagatggataaggaaattaataataggacttgtgaagttataaaagatggaagatttaaggttgcaaaatggaaagaaattcaagttggagatgtaatacgtcttaaaaaaaacgattttgttcctgctgacattttattgctttccagtagtgaacctaattcattgtgttatgtagaaacagctgaattagatggagaaacaaatcttaaatttaaaatgagtttagaaattacagatcaatatcttcaaagagaagatactcttgctacttttgatggatttattgaatgtgaagaaccaaacaatagacttgataaatttacaggaacattattttggaggaatactagttttccacttgatgctgacaagatattgcttagaggatgtgttatcagaaatactgatttttgtcatggtcttgttatttttgctggagctgatactaaaatcatgaagaactcaggaaagactagatttaaaagaacaaaaatagattatttaatgaactatatggtatatacaatttttgtagttttaattcttctatcagcaggattagcaattggacacgcttattgggaagctcaagttggaaatagttcttggtatctttatgatggagaagatgatactccatcatatagaggatttttaattttttggggatatattattgttcttaatactatggttcctattagtttatatgttagtgttgaagttattagacttggacaatcacatttcataaattgggatctacaaatgtattatgctgagaaggatacaccagctaaggcaagaacaacaacgcttaatgagcaattagggcagattcattatatatttagtgataaaactggtacattaactcaaaatattatgacatttaaaaaatgttgtattaatggacaaatatatggtgaccatagagatgctagtcaacataatcataataaaattgaacaagttgatttttcttggaacacatatgcagatggaaaattagctttttatgatcattatcttattgaacaaattcaatctggaaaggaaccagaagtaagacaatttttttttttacttgctgtttgtcatacagtaatggttgatcgtactgacggacaacttaattaccaagcagcatctccagatgaaggtgcattggttaacgctgcaagaaactttggattcgcatttttagcaagaacccaaaatacaattactatttcagaattaggaacagaaagaacatataatgttttagcaattttagattttaattcagatagaaaacgtatgtcaataattgttagaacaccagaaggaaatattaagttgtattgtaaaggagcagatactgttatttatgaaagactacataggatgaatccaacgaagcaagaaacacaagacgcattagatatttttgcaaatgaaactttaagaacactttgtctttgctataaagagatagaagaaaaagaatttactgaatggaacaaaaagtttatggcagcatcagttgcttcaactaatagggatgaggctttagataaagtttatgaagaaattgagaaagacttaattttattaggagctacagcaattgaagataaacttcaagatggagtgccagaaacaataagtaaacttgcaaaagcagatattaaaatttgggttttaacaggagataaaaaagaaactgcagaaaacataggatttgcttgtgaattattgacagaggatactactatttgttatggagaagacattaattctcttttgcatgctagaatggaaaaccaaagaaatagaggaggagtgtatgctaaatttgctcctcctgttcaagaatcgttctttcctccaggaggtaatagggcacttattataacaggatcatggttgaatgagattttattagaaaaaaaaacaaaaagaaataaaattctcaagcttaaattcccaagaaccgaagaggaaagaagaatgagaacacaaagtaaaagacgattagaggcaaaaaaggagcaacgacaaaagaattttgttgatcttgcatgtgaatgttcagcagttatttgctgtagagttactccaaaacaaaaagcaatggttgtagatctagttaaaagatataaaaaggctataacattagcaattggtgatggtgctaatgatgttaatatgattaaaactgcacatattggtgttggtatttcaggacaagagggaatgcaagcagttatgtcatcagattattcatttgcacaatttagatatttacaaagactattattagttcatggaagatggtcatatataagaatgtgtaaatttctacgttacttcttctataagaatttcgcttttacacttgttcatttctggtatagtttttttaatggatatagcgcacaaactgcatatgaagattggttcattacattatacaatgttctttatacttcattgcctgtattactaatgggtctacttgatcaagatgtttcagataaattatcattaagatttccaggattatatattgttggacaacgtgatttattattcaactataaaagattcttcgtatcattacttcatggtgtattgacttcaatgattcttttttttattccattaggagcttatcttcaaaccgtcggacaagatggagaagctccatctgattatcaatcatttgctgttacaattgcttcagctttagttattacagttaattttcaaataggtcttgatacttcttattggacttttgttaatgctttcagtatttttggaagtatagcactttattttggaattatgttcgatttccattcagcaggtattcatgtattatttccatcagcctttcaatttactggaactgctagtaatgctcttagacaaccatatatttggcttacaattattttggctgttgctgtttgtcttttacctgttgtagcaattagatttttatctatgacaatatggccatcagaatctgataaaattcaaaaacacagaaaaagattaaaggctgaggaacaatggcagagaagacaacaagtatttagacgtggagtttcaactagaagatctgcatacgctttttcacaccaaagaggatatgctgatttaatttcttcaggtagatcaattagaaagaaaaggtcaccacttgacgccattgttgctgacggaactgctgaatatagaaggactggggattct

SEQ ID NO: 7243 - DNA, 3753 bp, synthetic construct
  misc_feature 1..3753: note = source = /note="Description of Artificial Sequence: Synthetic coding sequence"
  source 1..3753: mol_type = other DNA
atgtccaccgagcgagatagcgaaaccacgtttgacgaggatagccaaccaaatgacgaagtggtgccatacagcgacgacgaaaccgaagatgaactggatgatcaaggttcagcagtggagccagaacaaaatcgtgtcaaccgcgaagctgaagagaacagagaacccttccgcaaggaatgtacctggcaagtcaaggcgaatgatcgaaagtaccatgagcaaccacatttcatgaacaccaagttcctctgcattaaggagtccaagtatgcaaacaacgccataaagacttacaagtacaacgcatttactttcatacctatgaaccttttcgaacagtttaaacgtgccgctaacctgtactttctcgcactgctgatcttgcaagccgttcctcaaattagcaccctggcgtggtacaccactctggttccgcttcttgtggtgctgggagtcaccgcgattaaagatcttgtcgacgatgtggcgcggcataagatggataaggaaatcaataacagaacgtgcgaggtgattaaggatggccggtttaaagtggcgaaatggaaggaaattcaagtgggcgacgtgattaggctgaagaaaaatgatttcgtcccggctgatattctccttctttcatcctccgaacctaattcactctgttacgtggaaactgcagaacttgacggcgagactaatcttaagtttaagatgtcccttgaaattaccgaccaataccttcagagagaggacacgcttgccactttcgacggttttatcgagtgcgaagagcccaataatcgactcgataagttcaccggtactctcttttggagaaacacctcgtttcccctggacgctgataagattctgctgaggggatgtgtcatacgcaacaccgatttttgtcatggactggtgattttcgccggcgccgacaccaagattatgaagaactctggaaagactcgctttaaacggactaagatcgattaccttatgaactacatggtgtatactatctttgtggtgctcatccttttgtcagcgggactggcaattggtcacgcatactgggaggcacaggtgggaaactcctcctggtacctttacgacggcgaagatgatactccgtcataccgcgggttcttgatcttttgggggtacatcattgtgcttaacacgatggtgccaatttccctgtacgtgtccgtggaagtgattcggctgggtcaatctcacttcatcaattgggatcttcagatgtactatgctgaaaaggacaccccagcgaaagcccgaactactactctgaacgaacagctgggccagatacattacatcttctcagacaagactggcactctcactcagaacattatgaccttcaaaaagtgttgtatcaacggccagatctatggagatcaccgggacgcatcgcagcacaaccataacaaaattgagcaggtggatttttcttggaacacctacgcagatggaaagctggcattttacgatcattacctcattgagcaaattcagtccggaaaggaacctgaagtcaggcagtttttcttcctcctggcagtgtgccacactgtgatggtggaccgcactgacgggcaactgaactaccaagcagcttcaccagacgaaggcgcactggtgaatgcagcacggaactttgggtttgctttcctggccagaacccagaacaccatcaccattagcgagctgggaactgagcggacttacaacgtcctcgccattctcgacttcaattccgatcgcaagcgaatgtccataatagtgcgaaccccagagggaaacatcaagttgtactgtaagggggccgacaccgtgatttacgaaaggctgcatcggatgaaccctactaaacaagaaactcaagatgcgctcgatatctttgcgaatgagactctgcggaccctctgtctctgctacaaagaaatagaagagaaagagtttaccgaatggaacaagaaattcatggcggcatcggtcgcatcgaccaaccgggatgaggctctggataaagtgtacgaagaaatcgagaaagatctgatccttctgggcgcaaccgcaattgaagataaactccaagacggtgtccctgaaaccattagcaaactcgcaaaggccgacatcaagatctgggtgctgaccggggacaaaaaggagacggcagagaacatagggtttgcgtgtgaactcctgaccgaagataccaccatttgttacggggaagatatcaactcgttgcttcacgcaaggatggaaaatcagaggaatagaggaggcgtctacgcgaagttcgcaccccccgtgcaggaatcctttttcccacctggtggtaatagagccctgattatcactggatcgtggcttaacgaaattctgctggagaaaaagacgaagcgcaacaagatccttaagctgaaatttcccagaacggaagaagagagacgaatgagaactcagagcaagcgtcggcttgaggccaagaaggaacaaaggcagaagaatttcgtggatctcgcatgtgagtgttcggcagtgatctgttgtcgggtgacccctaaacagaaggctatggtggtcgaccttgtcaaaagatataagaaagccatcaccctggcgatcggtgacggtgcaaacgacgtgaatatgataaagacggctcatatcggggtcggtatttccggacaagagggtatgcaagctgtgatgtcctcggactactcttttgctcaattccggtaccttcagcggcttcttctggtgcatggaaggtggtcgtatatccggatgtgcaagtttcttcgctacttcttctataagaatttcgcgttcactctcgtccatttttggtactcgttcttcaacggctactcggcacaaacggcgtacgaagattggttcatcaccctctacaatgtcttgtacacttcactcccggtcctgcttatgggactgctcgatcaagatgtgtcggataagctctcactccgatttcccgggctgtacattgtgggccaaagagatctgcttttcaactacaagaggtttttcgtgagcctgctgcacggcgtccttacctccatgatcctcttctttatcccacttggggcatatttgcagacggtggggcaagatggagaagcccctagcgattaccagtcgtttgcagtcaccatcgcctcggcgttggttattactgtgaacttccaaattggcctcgataccagctactggactttcgtgaacgcattttcaattttcggttccattgcactttacttcggtattatgttcgattttcacagcgcaggaatccacgtcctgttccctagcgcattccagtttactggaactgcaagcaacgcactgcggcaaccttacatatggcttacgattattctcgccgtggcagtgtgtctcctccctgtggtggcaattcgttttctgtcgatgaccatctggccttccgaatccgataagatccagaagcaccgtaagcgccttaaagccgaagaacaatggcaacgccggcaacaagtctttagaaggggagtgtcaactcgtagaagcgcatacgcctttagccatcagcgcggttatgcagacctcatttcctcgggacggtccatccgaaagaaaagatcaccacttgacgctattgtggcggacggaactgcagagtaccggaggacgggtgattcc

SEQ ID NO: 7244 - DNA, 3753 bp, synthetic construct
  misc_feature 1..3753: note = source = /note="Description of Artificial Sequence: Synthetic coding sequence"
  source 1..3753: mol_type = other DNA
atgagtacggagagggacagtgaaaccactttcgacgaggactctcaacccaacgacgaggtcgtgccatactccgacgacgagaccgaggacgaactggacgatcagggaagtgctgtcgagccagaacaaaatcgcgttaacagggaggccgaggagaatagggaaccgttcaggaaggaatgcacttggcaagtgaaggcgaacgatcgcaagtaccacgagcagccacacttcatgaacactaaatttttgtgcattaaagagtccaaatacgccaacaacgccattaaaacctataagtataatgcttttacgtttatcccaatgaatctctttgagcagttcaaaagggccgcgaacctgtacttcctggcattgcttattcttcaggccgtgccacagatctcaacacttgcttggtacaccaccttggtgccgctgttggtggtgctcggcgtcactgctattaaggatttggttgacgacgtcgcacgccataaaatggacaaagaaattaataataggacgtgcgaggtcatcaaggacggaaggttcaaagtagccaagtggaaagagattcaggtgggcgatgtaatccgcctgaagaagaacgattttgttcccgccgacatactgctgctcagctcctctgagcccaatagcttgtgttacgttgagactgcagagcttgacggcgagactaacttgaaattcaaaatgtcccttgagatcacagaccaatatttgcagagagaggacacgctggcaacgtttgacggctttatcgagtgcgaggaaccaaacaacagactggataagttcaccggaacactgttctggcgcaatacctctttccccctggacgcagacaaaattcttcttcgcggttgtgtcattagaaacaccgacttctgccatggtctggttattttcgctggcgcagacactaaaatcatgaagaacagcggaaagacaagattcaaaaggacaaaaattgattatttgatgaactacatggtttataccatttttgtggtcctcattctgctgtccgcgggcctggccatcggacacgcctactgggaggcccaagtgggcaattcatcttggtacctgtatgacggagaggatgacaccccgtcataccgcggatttcttatcttctggggctatatcattgtgttgaacacaatggtgcctatttctttgtatgtgtctgttgaagttattaggcttggccagtctcacttcataaattgggacctccagatgtattatgccgagaaggatactccagcaaaggcgaggaccacaaccctcaacgaacagctgggccaaattcactatatattcagcgacaagacaggcaccttgactcagaatattatgactttcaagaagtgctgcatcaacggacaaatttatggtgaccatagagatgcctcccagcataaccataacaaaatagagcaagtggatttttcttggaatacttacgcagatggcaagctcgcgttctatgatcactacctgattgagcaaatccagagcggaaaagaacccgaggttagacagttctttttcctgctcgccgtttgccacaccgttatggtggacagaacagacggccagctgaattatcaggcagcatcacccgacgagggcgccttggtcaatgctgcccgcaatttcggtttcgcctttctggcgagaacacagaatacaatcaccattagtgagctgggtaccgaaagaacttacaacgtccttgccatcctcgattttaactcagataggaagcgcatgtcaatcatcgtgagaaccccggaaggcaacatcaagctttactgcaagggcgctgataccgtcatctatgagagattgcacagaatgaatccaacaaagcaggagacacaagatgctctcgacatcttcgcaaacgagaccctgaggaccctctgtctctgctacaaggaaatcgaggagaaggagttcaccgaatggaataaaaaattcatggccgccagcgtggcttctaccaacagggatgaggctttggacaaagtgtacgaggagatcgaaaaggaccttatacttctgggcgcgactgctattgaggacaaattgcaggacggtgtccccgaaacaattagtaaattggcgaaggctgacatcaagatttgggtgttgaccggcgacaagaaggaaacagctgagaacataggctttgcttgcgagctgctcaccgaggacactacaatatgctatggcgaggacattaatagcctcctccacgcgagaatggaaaatcagagaaataggggaggagtttacgccaaattcgccccccctgtgcaagagtcctttttcccacctggcggaaaccgcgccctgatcattacaggttcctggctgaatgaaatcctcctggagaagaaaaccaagcgcaacaagattttgaaactgaagtttcctagaaccgaagaggagagacgcatgcgcactcagtcaaagaggcgcctcgaagcaaaaaaagaacaacgccagaaaaacttcgttgatttggcttgtgaatgttccgctgttatatgctgccgcgtcactcctaagcagaaggccatggtggtagacctggtgaaacgctacaagaaagcaataacattggctatcggcgatggcgctaacgatgtgaatatgattaagacagctcatattggagtgggcattagcggacaagaaggcatgcaagctgtcatgtctagcgactacagcttcgcgcaattcagatatctgcaaaggctccttctggttcacggacgctggagctacattcgcatgtgtaaattcctgaggtacttcttttataagaattttgctttcaccctggtgcacttttggtacagcttctttaatggctatagcgctcaaactgcatacgaagattggtttatcaccctgtacaatgtgctgtatacttctctccccgtgttgcttatgggtcttctggaccaggatgtcagcgataagctctccctccgctttccgggactgtacattgtgggccaacgcgacctgctctttaactataagagattcttcgtctcactgcttcacggagtgcttacttcaatgattctgttcttcatccccttgggagcctacttgcagacggtaggccaggacggtgaggctcctagtgattatcaaagcttcgccgtcaccattgcgtctgctttggtgatcacagtgaacttccaaatcggactcgatacgtcttattggactttcgtcaacgcattcagcattttcggtagcatcgctctttacttcggtataatgttcgactttcactccgctggaatccacgttctctttccatccgcctttcaattcacaggaactgcatctaatgcactgaggcagccctacatatggctgactattattctggcggtggccgtgtgtcttcttccggtcgtcgccattagattcctgagcatgactatctggccatccgagtcagataagatccagaagcataggaaacgcctcaaggccgaggagcagtggcaacgcagacagcaggtcttccgcaggggtgtgtcaaccagacgcagtgcctatgcgttttcccatcagagaggatacgcggacctgattagctccggcagatctatccgcaagaagaggtccccgctggacgctattgtggccgacggaaccgcagagtacagacgcaccggagatagc

SEQ ID NO: 7245 - DNA, 3753 bp, synthetic construct
  misc_feature 1..3753: note = source = /note="Description of Artificial Sequence: Synthetic coding sequence"
  source 1..3753: mol_type = other DNA
atgtccaccgagcgcgatagcgaaaccacttttgacgaggactcgcaaccaaacgatgaagtggtgccgtactctgacgacgagactgaagatgaacttgacgatcagggatcggcagtggagcctgaacaaaacagagtgaacagggaggcggaagagaacagggaacctttccggaaggagtgtacctggcaagtgaaagccaacgatagaaaataccatgaacaaccccacttcatgaacactaagtttctgtgtatcaaagagtccaaatacgcaaacaatgcaatcaagacttacaagtacaacgcgtttacctttattcctatgaatctcttcgaacagtttaagagagcagcgaatctttacttccttgcactgctgatcctgcaggcagtgcctcagatctcaactcttgcatggtacactaccctggtccccctgcttgtggtgctcggtgtcactgccattaaggaccttgtagacgacgtggcaaggcataagatggacaaggagattaacaatcgaacttgcgaagtgattaaggacggtagattcaaggtggccaagtggaaggaaattcaggtgggcgacgtgatcaggctcaagaaaaatgattttgtgccagcggacatcctgcttctctcgtcaagcgaaccaaatagcctctgttacgtcgaaaccgctgaattggatggcgaaaccaacctgaagtttaagatgtccctggaaataactgaccagtatctgcaaagagaggacacgcttgcaactttcgatggttttatcgaatgtgaagaacctaataacaggcttgacaaattcactggaacgttgttttggagaaatactagctttcccctggacgcagataagatacttctgagaggttgtgtgattcgaaacaccgacttttgtcacgggctggtcatctttgcaggcgcagacaccaagatcatgaagaactccggtaagaccagatttaagcgcaccaagattgattacctcatgaattacatggtctataccatcttcgtggtgcttattctgctgtcagccggtctggcaattggtcatgcctactgggaggcgcaggtgggaaattccagctggtatctctacgatggtgaggacgatactccctcctaccggggtttcctcattttctggggttacattatagtgctgaacaccatggtgccaatttccctgtacgtctccgtcgaagtgataagattgggtcaatcgcatttcattaactgggacctgcaaatgtactacgccgaaaaggatacccccgcgaaagcacgaaccactacccttaatgaacagctgggacagattcattacattttctcggataagaccggtacccttacgcagaacattatgactttcaaaaagtgttgtatcaacgggcagatttacggtgaccaccgtgacgcatcccaacacaatcataacaaaattgaacaagtggacttctcgtggaatacctacgctgatggcaagttggcattttacgatcactacctcatcgaacagattcagagcggaaaagaaccagaagtccggcagtttttcttcctgctggctgtgtgccataccgtcatggtggaccgcactgatggtcagctcaactaccaagccgcatccccagacgagggtgcactggttaacgccgccaggaattttggattcgcatttctcgcaagaacccaaaacactattaccattagcgaactgggtaccgaacggacgtacaacgtcctggcaattttggatttcaactccgacagaaagcggatgtcaataatcgttcggacgcctgagggaaacatcaagctgtactgcaagggtgcggataccgtcatatacgaaaggctccacagaatgaaccctactaagcaggagacgcaggatgcactggatatctttgcaaatgaaacgcttagaaccctctgtctctgttacaaggaaatcgaagagaaagaatttactgagtggaacaagaagtttatggcagcctcagtggccagcactaaccgagacgaagccttggataaggtctacgaagagattgaaaaggacctgatcctccttggggccactgcaatagaagataagctgcaagacggagtgcccgaaaccatttccaaacttgcaaaggcagacatcaagatttgggtccttaccggcgacaaaaaagagactgcagagaacataggattcgcatgtgagctgttgacggaggatactaccatctgctacggagaggatatcaactcgctgctccacgctaggatggaaaatcagcggaatcgcgggggagtgtatgccaagtttgcaccaccagtgcaagagtcctttttccccccaggtgggaaccgtgctctgatcataaccggttcttggcttaatgagattctgctggaaaagaaaaccaagagaaataagattttgaaattgaaattccctagaacggaagaggaacgtcgaatgcggacccaatcgaagcgcagactggaagctaaaaaggagcagcgtcagaagaattttgtggatctcgcatgtgaatgctcagctgtgatctgttgccgagtcaccccgaagcaaaaggcgatggtggtggatctggtcaaaagatacaagaaagccattactctcgcaattggtgatggagctaacgacgtgaacatgattaagactgcacatatcggcgtgggaattagcggacaagaaggtatgcaagcggtcatgagcagcgattactcttttgcacagttcagatacctccagagacttttgctcgtccatggtcgttggagctatatcaggatgtgcaaatttctgcgatactttttctacaagaattttgcattcactcttgtgcatttttggtactcgtttttcaatggctactccgcccaaactgcatacgaagattggttcattaccctttacaatgtgctgtatacgtccttgcctgtgctgcttatgggactgctcgatcaagacgtgagcgataagctctcactgagatttcctggactgtacattgtgggccagcgggacctgttgtttaactacaagcgatttttcgtttcgcttctgcacggggtgcttacttccatgattctctttttcatccctctgggcgcatacctccagacggtgggtcaagatggggaggccccatctgattatcagtcgttcgcagtgactatcgcgtctgccttggtcattaccgtgaactttcaaataggcctggacacttcgtattggaccttcgtgaacgcgtttagcatcttcggatccattgcgctttactttgggattatgtttgattttcattcagcaggtattcatgtgctgttcccgtcggcctttcaattcactggtaccgcatccaatgccttgcggcaaccttacatttggcttacgatcatcctggcagtggccgtgtgtctcctgcctgtcgtggcaatacggttcctttcgatgaccatttggccttcagaatcggataagatacaaaagcacagaaagcggcttaaagcagaggaacagtggcaacggcgccaacaggtgttccgtcgaggtgtgtcaactcggaggagcgcatacgcatttagccaccaacgcgggtacgcggatctgatttcatccggcagatccatcaggaagaagcgttcgcctctggatgcaattgttgcagatgggaccgcggaatacaggagaactggagattca

SEQ ID NO: 7246 - DNA, 3753 bp, synthetic construct
  misc_feature 1..3753: note = source = /note="Description of Artificial Sequence: Synthetic coding sequence"
  source 1..3753: mol_type = other DNA
atgtccaccgagcgggattcagaaaccacattcgatgaagactcccagccgaatgacgaggtggttccttacagcgatgacgagaccgaggacgagctggatgatcagggctccgccgttgaacccgagcagaatcgggttaacagagaagcagaggagaaccgtgaaccctttagaaaggagtgcacctggcaggtgaaggcaaacgatcgcaagtatcacgagcagccacatttcatgaatacaaagttcttatgcatcaaggagtccaagtacgccaataacgcgattaaaacatataagtacaatgcgttcaccttcatccccatgaaccttttcgagcagtttaaacgagcagccaatctttattttctggcgctgctaatcctccaggctgttccccagatttccactctggcatggtatacaaccctagtacctctgctggtggtgctgggagtgaccgctattaaagacctggtggatgatgtggcccggcacaaaatggacaaagagattaacaatcgcacttgcgaggtgattaaggatgggaggtttaaggtggctaagtggaaagagattcaggtcggagatgtgattaggcttaaaaagaacgatttcgtccctgccgatattctactgctctcctcttctgaacccaattcactttgttatgtggaaaccgcggaattggacggtgagacaaacctcaaatttaaaatgagcctcgagataaccgatcaatacctgcagagggaggacaccctggccacattcgacgggtttatagagtgcgaggaaccaaacaatcgcctcgataaatttactggcactttgttctggcggaacaccagctttcccctggacgccgacaaaatactgctgcgcggatgcgttatccggaacaccgatttctgccatggactcgtcatctttgcaggggcggatactaaaataatgaaaaattctggcaagacgaggttcaagaggactaagatcgactatttgatgaactacatggtctacacgattttcgtcgtgctgattctgctaagtgccggtctcgccatcggccacgcctactgggaggctcaagtaggtaattcaagctggtacttgtatgatggggaggacgacactcccagttatcgcgggtttctcatcttttgggggtacatcattgtgttgaatactatggtgcctatttcactctatgtcagcgtcgaagtaattcgattggggcagtcccactttatcaactgggatctgcagatgtactatgcggagaaggacaccccagctaaggctcgaaccacgaccttgaacgaacagctggggcaaatacactatattttttctgacaagaccggtacgttgactcaaaatattatgaccttcaagaagtgctgtatcaatgggcagatctacggtgatcacagagacgcctcacagcacaaccataataagattgaacaggtcgatttctcatggaacacctacgctgacgggaagctggccttctacgatcactatttgatcgagcaaatccagtccggtaaggagcccgaggtgaggcagttcttcttcttgttggccgtgtgccacacagtaatggtggaccggactgacggccaactgaattatcaggccgcaagtcccgatgaaggggcattagtaaacgctgcccgcaatttcggcttcgctttcctggcgcggacacagaacactatcacaatttcagaactggggacggagcgaacctataatgttctcgctatcctcgacttcaacagtgaccgaaagcggatgtccatcatcgtgcgaaccccggaaggtaacatcaagctgtattgcaaaggagccgacacagtcatatacgaacgcctgcacagaatgaatccaactaagcaggagactcaggacgcactcgatatatttgccaacgaaacactaaggacgttgtgcctgtgctataaagagatcgaggaaaaggagtttaccgagtggaacaagaagttcatggctgcctccgtagcgtcaacgaaccgagacgaagccctggataaagtgtacgaagagatcgagaaggacttaatcctattgggggccactgctattgaagataaactgcaggacggcgtgccagaaacgattagcaagctggcaaaggccgatattaagatctgggtgctgacgggtgacaagaaagaaaccgccgaaaatataggctttgcctgtgaactactgacagaggacaccaccatttgctatggagaagatatcaactcactgctgcacgcccgaatggagaatcaacgcaaccgcggtggcgtctacgctaaatttgctcctcccgtccaggaatcttttttccctcctggaggtaacagggccctaattattacggggtcctggctcaacgagatactgctcgagaagaagacaaaaagaaacaaaatcctgaagttgaagttccccagaaccgaagaggagagacgcatgaggactcagtccaaacgccgtcttgaagctaaaaaggagcaaaggcagaagaactttgtggatttagcatgcgaatgtagtgcggtaatatgctgcagagtgacccccaaacagaaggccatggtggttgatcttgtcaagagatataagaaggcaatcacattggctatcggagacggtgccaacgacgttaatatgatcaagacggcacatattggagtcggtatttctggacaagagggtatgcaggccgtcatgtcgtcagactactcttttgcgcagtttcgatatctccagaggctgctgttggtgcacggtaggtggtcctacatcagaatgtgcaagtttctgcggtacttcttctacaagaacttcgcttttacccttgtccacttttggtacagtttcttcaatggctacagcgcacaaacagcgtatgaggactggttcataacactgtacaacgtcctctatacatccttgcccgtgttactgatgggtctgcttgaccaagacgtttcagacaaactgagtctgcgcttccccggcttgtatatcgtgggtcagcgggacctcctctttaattataagagattctttgtcagcctgctgcacggagtgctgaccagcatgatcctctttttcattcccttgggggcctatctgcagaccgttgggcaggacggagaggcgccaagcgattaccagtcttttgccgtgaccatcgcttcagcccttgtgatcacggtgaacttccagataggactggacacctcctactggacattcgtcaatgcgttttctatcttcgggtccattgcactgtacttcggaatcatgtttgattttcattcagccggtattcacgtgttgttcccgagcgcctttcagttcacgggcacggcaagcaatgcactgcgtcagccttacatctggctcacaatcattttagctgttgcagtgtgtctcctgcccgtcgtggccatccggtttctgtcgatgactatctggccctccgaaagcgacaagatacagaaacaccgaaagaggctgaaggccgaagaacagtggcagaggcggcagcaggtcttccgtagaggggtgagcacaagacgatccgcatatgccttttctcatcagcggggatacgctgacttaatcagttccggcagaagcatcaggaaaaaacggtccccactcgacgccatcgtggcagacggtaccgctgaataccgtaggacgggagactct

SEQ ID NO: 7247 - DNA, 3753 bp, synthetic construct
  misc_feature 1..3753: note = source = /note="Description of Artificial Sequence: Synthetic coding sequence"
  source 1..3753: mol_type = other DNA
atgtccactgagagggatagtgagactactttcgacgaagattcccagccaaatgatgaagttgttccctattcagacgacgaaaccgaagatgagcttgacgatcaaggctccgctgtggaacctgagcagaatagggtaaatcgtgaggcagaggaaaacagagagcctttccgtaaggaatgcacatggcaagtcaaggctaatgatagaaagtatcatgagcagccacattttatgaacacaaaattcctttgcatcaaggaatctaagtacgcgaataacgctatcaagacgtataagtacaacgcatttacctttattccaatgaacttattcgagcaattcaagagagcagctaatttgtatttccttgcacttttgattttgcaagcagtccctcaaatttcaacacttgcttggtatacgactcttgtacccttactagttgttctaggtgtcactgctatcaaagatcttgttgatgacgtcgcgagacataaaatggataaagaaataaacaaccgaacttgtgaagttataaaggatggtagattcaaggtcgctaaatggaaggaaatccaagtgggcgatgttatcaggcttaagaagaacgactttgttccggctgacatattgctgctgtccagtagtgaaccaaactcattgtgctatgtggaaacagccgagcttgatggagagactaaccttaaatttaagatgagccttgagataactgatcagtacctacaacgagaagacacattggctactttcgacggtttcattgaatgtgaagagcctaataacaggttagataagtttactgggacattattttggcgtaacaccagttttcctttagatgccgataagatcttgttgaggggttgcgttattcgaaatacagacttttgccacgggttagtcatctttgctggcgcggacactaagatcatgaaaaactcaggcaagactagattcaaacgcaccaagatcgactacctgatgaactatatggtatataccatttttgttgtgttgatactactttctgctggactagccataggtcacgcttactgggaagcccaagtaggaaattctagttggtatctttacgacggtgaagatgacaccccaagctatcgtggctttctgatattttggggatatataatcgttttgaacaccatggttcccattagtctttatgtgtctgtcgaagtgattagacttggtcaatcacattttatcaactgggatttgcagatgtactatgctgagaaggatacaccagctaaggcacgtactactactctcaatgaacaattaggacagatccactatattttttccgataagaccggcactctgacccagaatatcatgacctttaaaaagtgttgcattaatggtcagatttacggagatcaccgagatgctagccaacacaatcacaataaaatcgaacaggtggatttttcctggaatacgtacgctgatggtaaattggctttttatgatcactacttgatagaacagatacaaagtggaaaggagcccgaggtgcgccagtttttcttcttacttgctgtttgtcacaccgttatggttgacagaaccgacggacaacttaactatcaagcagctagtccggatgagggagctcttgttaacgctgctaggaactttggttttgcctttttagctagaacacaaaatactatcactataagcgaacttggcacagagcgcacctacaatgtgttggctattcttgattttaatagtgatcgaaagaggatgagtatcatagtgcgaactcctgagggaaatatcaaactgtattgcaagggtgcagatactgtcatatacgagcgacttcatcgtatgaatccaacaaagcaggaaacccaggatgcattggatatttttgctaatgagacactccgaacactctgcttgtgttacaaggaaatcgaggaaaaagagttcacagagtggaataagaagttcatggcagctagtgttgcttcaaccaaccgagatgaagcactggataaggtttacgaggaaatagagaaagacctaatattactaggcgctactgctatcgaggataagttgcaagatggcgttccggaaactatttcaaagctggcaaaggcagatattaaaatttgggtgcttaccggtgataagaaggaaacagccgagaatatcggatttgcctgtgagttattgaccgaagatactacgatatgctatggagaggatatcaattctttgcttcatgcgagaatggaaaatcaacgcaatcgtggaggagtgtatgcaaagttcgcgccaccggttcaagagtctttctttccgccaggtgggaaccgggctttaattataacaggatcatggcttaacgagatcttgcttgaaaagaagacgaagagaaacaagattctcaagttgaagtttcctagaactgaggaggaacggcgaatgcgaacccaatcgaaacgtcgattagaagctaagaaagagcaaaggcaaaaaaatttcgttgatctggcttgtgaatgctctgctgttatctgctgtagagttacccctaaacagaaggcaatggttgttgatctagttaaacggtacaagaaggcaattacacttgccataggtgatggtgctaatgatgtgaatatgatcaagactgctcatataggtgttggaatttctggacaagagggaatgcaagccgtgatgtccagtgattacagcttcgcacaattcagatatcttcaacggctattgctcgttcatggtcgatggtcatacattaggatgtgcaaattccttaggtactttttctacaagaatttcgccttcaccctcgtacatttttggtattcatttttcaacggttacagtgcacaaactgcgtatgaggattggttcattacattgtacaatgtgctttatacttcgcttcctgttctcttgatgggactcctggaccaagacgtctcagataaattgagtttgcgttttcctggtctttatattgttggtcaaagagatctcctcttcaactacaaaagattcttcgtcagcctccttcatggagtgctgaccagtatgatcttgttttttatacctctaggtgcttatcttcagactgtgggtcaagatggtgaggccccatcagattaccagtcatttgctgttaccatagcaagcgctttggttatcactgtgaattttcagatcgggttggatacgagctactggacattcgttaatgctttttcaatttttgggagcattgcactttacttcgggatcatgttcgatttccatagcgctggaatccatgtactttttccatcagcatttcagtttacgggtaccgctagtaacgcccttcgacagccttatatttggctcaccatcattctagcagtggcagtctgtctccttcctgtggttgctattagattcctttcaatgactatatggccaagtgaatcagacaagatccaaaagcataggaaacgtttgaaggctgaagaacaatggcaaagacggcaacaggtttttcgaaggggtgtgtcaactcgtcggagtgcctatgctttctctcatcaaaggggctacgccgatcttataagttcaggcaggtcaataagaaaaaaaaggtcgcctctagatgccattgtcgccgacggtacggctgaatatagaaggacaggcgattct

SEQ ID NO: 7248 - DNA, 3753 bp, synthetic construct
  misc_feature 1..3753: note = source = /note="Description of Artificial Sequence: Synthetic coding sequence"
  source 1..3753: mol_type = other DNA
atgtccacagagcgtgattctgagaccaccttcgatgaggattcacagcctaatgatgaggtggtgccgtattccgatgatgaaacagaggatgaacttgatgaccaggggtcagccgtggagcctgagcagaaccgggttaacagggaagcggaagaaaatcgcgagcccttccgcaaggagtgcacctggcaggtaaaggcgaacgatcggaaatatcacgaacagccacattttatgaataccaaatttctgtgtattaaggaatccaagtacgccaataacgccattaagacttacaagtacaacgctttcacctttattcccatgaacctcttcgagcaattcaaacgagctgccaacctttatttccttgctctgctgattcttcaggcagttccccaaatcagcactctggcatggtatacaaccctggtccccctcctggtcgtcctaggggtcacagccatcaaagacctggtggacgatgtcgcgcgacacaagatggataaggagattaataacagaacatgtgaggtaataaaggatgggcgattcaaggtagcaaaatggaaggagattcaagtcggagatgttatacggctaaagaagaatgacttcgtcccagccgacattctgctcctgtcaagtagcgagcctaatagcttgtgttatgtggagaccgccgagttggacggagaaaccaacctgaagtttaagatgtctctggaaatcactgatcagtacctgcagcgggaagataccttggccacctttgatggcttcatcgaatgtgaagagcccaataacagactggataaatttactggtaccttgttctggcgtaacacaagcttccccctggacgccgataagattctcttgcgaggatgcgtgatacggaacactgatttttgtcacggactggtcattttcgcgggcgctgacacgaagataatgaagaattcagggaagactaggttcaaacggacgaaaatagattatcttatgaactatatggtctatactatctttgtggtcctgatcttgctgagtgctgggcttgcaatcggccacgcatactgggaggcacaagtgggcaatagctcctggtatctgtacgacggtgaagacgatacccccagttacaggggatttctgatcttctggggctacattatcgtcctcaacacaatggtgcccatctccctctatgtcagtgtggaagtgataagattgggacaatcgcacttcattaattgggatctccaaatgtactatgctgagaaggatacaccggccaaggctaggaccacaaccctgaatgaacagttgggccaaattcactacatcttctccgataagacagggacactgacccaaaacatcatgacatttaagaaatgctgcatcaatggtcagatctatggtgatcatcgggacgcctcccagcacaatcataataagattgagcaggtggactttagctggaacacttacgcagatggcaaactcgcattctacgatcactacctgatcgaacaaatccagtcaggaaaagagcccgaagtgcgtcagttctttttcctgctggcagtttgccatacggtaatggtcgacaggacagatggccagcttaattatcaagctgcctccccagatgagggggccctagtcaatgcagctcggaatttcggattcgcatttctagcccggacccagaatactatcaccattagtgaactgggcacagagcggacttataacgttctcgctattctggacttcaacagcgatcggaagaggatgtctatcatcgtgagaacaccagaaggcaatataaagctctactgcaagggcgccgataccgttatctatgagcgacttcataggatgaatcccactaagcaggagacgcaggacgcccttgacatattcgctaatgagactcttcggacactctgtctgtgttataaagagatcgaggagaaagaattcaccgaatggaacaaaaagttcatggccgccagcgtggctagtactaaccgggatgaggcactcgataaggtatacgaagagattgaaaaagacttgattctgttgggcgcaactgccatagaggacaaattacaggacggcgttcccgaaacaataagtaaactggctaaggcggatataaagatctgggtgttgaccggtgataagaaggaaaccgccgagaacattggttttgcttgcgagctgctcacagaagacactacaatatgctatggagaagacattaactctctcctccacgctcggatggagaatcagcggaacaggggcggcgtctacgccaagtttgcccctcctgtccaagagtccttctttccccccggggggaaccgggctctcattatcactggcagttggctgaatgagatcctgttagaaaaaaagacaaaacggaacaagattctgaaactgaagttcccaaggaccgaggaggagagacggatgaggacgcagtccaagcggcggctggaggcgaagaaggaacagcggcagaagaactttgttgacctggcatgcgaatgttcagccgtgatatgctgccgcgttacaccaaagcaaaaggcaatggtcgttgacttagttaagaggtacaagaaggccatcacacttgctattggcgatggcgccaatgacgtcaatatgataaaaacggcacacataggggtaggtattagcgggcaggaaggtatgcaggccgttatgtcctctgattattctttcgcacagtttcgctatctgcaacgcctgttactcgttcatggccgctggagttacattcggatgtgcaagtttctgagatatttcttctataaaaattttgcatttacattggtgcacttctggtactcctttttcaatggctattctgcccagaccgcttacgaggactggttcattaccctttataacgtgctctatacttccctaccggtgctgctgatgggcttgctggaccaggacgtgtcggacaagctatctctgaggttcccgggcctgtacattgtggggcaaagagatctgctgttcaattataaacggtttttcgttagtctattgcatggcgtcttgaccagcatgattctcttcttcatccccctcggtgcctatctgcagacagtgggccaagacggagaagcaccaagtgattaccagtcctttgccgtcacaattgcctcagctctcgtgatcacagtgaattttcagattggactggacactagctactggacgttcgtgaacgcattttccatcttcggcagcatcgcgttgtatttcggaattatgttcgatttccacagcgccggaatacacgtgctgtttccgagtgcatttcaatttaccggaacagcttctaacgccctgagacagccttacatttggctgacgatcattctcgcagtcgcggtgtgtctactgcccgtcgtagccatcaggttcctttctatgactatctggccctcagagtccgacaaaattcagaaacaccgcaaaaggttaaaagctgaggagcaatggcaacggcggcagcaggtgtttcgccgaggcgtgagcacacgccggagcgcctacgccttcagccatcaaagaggttatgcggatctcatttcctctgggagatcgatccggaagaaacgtagtccactggatgccatcgtggctgacggcacagcggagtaccgccgtactggcgattcc

SEQ ID NO: 7249 - DNA, 3753 bp, synthetic construct
  misc_feature 1..3753: note = source = /note="Description of Artificial Sequence: Synthetic coding sequence"
  source 1..3753: mol_type = other DNA
atgtccaccgaaagggattcagagaccaccttcgacgaagattcccagcccaacgacgaggtggtgccctattcagacgacgagacggaagatgagcttgacgaccagggaagtgccgtggagcccgagcaaaacagagttaatcgggaggccgaagaaaaccgtgagccgttcaggaaggaatgcacttggcaggttaaggctaacgaccggaagtatcacgaacagccccatttcatgaatacaaaatttctttgtatcaaagagagcaagtatgctaataacgctatcaagacatacaaatataacgcttttaccttcataccgatgaacctctttgagcagttcaaaagggccgctaacctttatttcctggcgttgcttatattgcaagcagttccccagatctccacactggcttggtatactacactggtaccactgctggtagtattaggcgtgactgctattaaagatcttgttgatgatgtcgcgagacacaaaatggacaaagagatcaataaccgtacgtgcgaagttattaaagacggccgcttcaaagtggcaaagtggaaagagatccaagtcggagatgtcatcagactgaaaaagaacgacttcgtacccgcagatatattgcttctgagctcctctgaacctaactcattatgttatgttgagaccgccgagctggacggagaaacgaatttgaagtttaaaatgtcactagagatcacagatcaatacctgcagcgcgaggatacactggccacatttgacggattcattgagtgtgaggaaccaaataataggcttgacaaatttaccggtaccttgttttggaggaatacgagctttcctctcgatgctgacaagatactgttgcggggctgcgttattagaaacacagatttctgccatggtctcgtcatctttgctggcgccgatacaaagattatgaaaaacagtggcaaaacccgatttaagaggaccaaaatagattacctgatgaattacatggtgtatactatttttgtggtcttgatcctactgtctgctgggcttgctattggtcacgcctactgggaggcccaagtaggtaattcatcatggtatttgtatgatggggaggatgacactccctcataccgcggcttcttgatcttttgggggtatataattgtacttaacacaatggtgcctatctcactctacgttagcgttgaggtaattaggctcggtcagtcacattttatcaattgggatctgcaaatgtactatgccgaaaaagatacgcccgctaaagccagaacaaccactctgaacgaacagctgggccagatccactatatcttctccgataagaccgggacgctaacgcaaaacatcatgacattcaagaagtgctgtataaatggtcaaatctatggcgatcaccgggatgcgagtcagcataaccataataagattgaacaggtagacttctcttggaatacgtatgctgacgggaaattggcattttatgatcattatctcatcgaacagattcagtcgggaaaggagcccgaagtccggcaattctttttcctgctggccgtgtgccacaccgtcatggtggacagaacggatgggcagctaaactaccaggcagcgagccccgacgaaggcgctctggtgaacgccgccagaaacttcggttttgcgtttctcgcacgcactcagaataccattaccatctcagaactcggaaccgagcggacatacaatgtcttagcaattttggacttcaatagcgaccgtaaaagaatgtccataatcgttcgcactcccgagggaaacatcaagctgtattgcaaaggcgctgatacagtgatttatgaaagactccatcgtatgaaccccacaaagcaagagacgcaggacgcgctggatatctttgctaatgagacgcttcggaccctgtgtctatgttataaggaaatcgaagagaaagagtttaccgagtggaataaaaagtttatggccgcctctgtggcctctacgaaccgggatgaggctcttgacaaagtctatgaagaaatcgagaaagatctgattctcctaggggcaacggctatagaggataagttgcaggatggggtacccgagacgatcagcaaattagccaaagccgatattaagatctgggttctgacaggagacaagaaagagactgcagagaatattggtttcgcctgtgagctgctgaccgaagatacgacgatttgctacggagaggatattaattccctgctgcatgctaggatggaaaaccaaaggaacagaggcggggtgtatgctaaattcgctccaccagttcaagagagcttctttccaccgggtggtaacagagcactcattatcaccgggtcgtggctcaatgaaatcctgctagaaaaaaaaaccaagaggaacaagatactcaagctgaagtttccccggacggaagaggaaagacgcatgcggacgcagtctaaacgtcgattggaggccaagaaagaacaaagacaaaaaaattttgtggacctggcctgcgagtgttcagctgttatttgttgtagagtaaccccaaagcaaaaggcaatggtggtcgacctggtgaagcgctacaagaaagccatcactttggcgataggggacggcgctaacgatgtaaacatgatcaagactgctcatattggtgtgggcattagtggacaggaggggatgcaggccgtgatgagctccgactactctttcgcacagtttagatatcttcagcgactcctgttggttcatgggagatggagctacatccgcatgtgcaaatttctgcgctatttcttttacaaaaatttcgcgttcaccctcgtccatttctggtactcatttttcaacggttattctgcgcagacggcatacgaggactggtttatcaccctgtataatgtcctgtacacgtcattaccggtgctgctcatgggcctgttggaccaggatgttagtgacaagctcagtctgcggtttcccgggctgtatatagttgggcagagggatctgttgtttaactacaagcgcttcttcgtgtccctactgcatggggtattgacatccatgatcctatttttcatcccgctgggagcatacctgcaaacggtgggtcaggatggtgaggcaccttccgattaccagtcttttgctgtcacaatcgcgtcagcccttgtgataacggtgaactttcagatcgggctggataccagttactggacatttgtcaacgcattctccatcttcggatcaatagccttatatttcggcatcatgttcgacttccattcagctggtatccatgtgctgtttccatctgcattccagtttaccggcactgctagtaatgccctgcgtcagccatacatttggttgactatcatactggccgtcgctgtgtgcctcctcccagtggttgctattcggtttttgtcgatgaccatttggccctctgaaagcgataagatccagaagcatcgtaaacgtttgaaggcagaggaacagtggcagcggcgacaacaggtcttcagacggggcgtctccacaaggaggtctgcttacgcgttcagccaccaacgcgggtacgccgacttgatatcgtcgggcagatccatccggaagaaaaggagtcctctggacgccattgtggcagacggcaccgcagaataccgtcggaccggggactct

SEQ ID NO: 7250 - DNA, 3753 bp, synthetic construct
  misc_feature 1..3753: note = source = /note="Description of Artificial Sequence: Synthetic coding sequence"
  source 1..3753: mol_type = other DNA
atgtcgaccgaaagagatagcgagactacctttgatgaggattcgcagccgaacgacgaagtggtgccctactccgacgacgagactgaagacgaactggatgatcagggaagtgcggtcgagccggagcagaaccgagtcaaccgagaggccgaggagaatagggagcccttccggaaggaatgcacctggcaagttaaagccaatgacagaaagtaccacgagcagccccatttcatgaacaccaaattcctgtgcattaaagagtccaaatacgctaataatgctattaagacttataagtacaatgcatttacattcatcccgatgaatctatttgagcaatttaagcgcgcagcgaacctctatttccttgccctgctaatccttcaggcagtgccgcaaatctcgacactcgcctggtacactaccttggtgccattgctggtggtgttgggcgtgacggcaattaaagacctggttgatgatgttgcccgacataagatggataaagaaataaacaatcgtacatgcgaagtgatcaaggacggcaggttcaaggtggcaaagtggaaggagattcaagtcggtgacgtgatccgcctgaagaaaaatgatttcgtgcccgccgacatcctgctgttgagctcgtccgagccaaattcactgtgctatgttgagacagccgagctggatggcgagaccaatctaaagttcaaaatgtcgctggaaataacggatcagtatctgcagcgtgaggacaccttggccactttcgatggcttcatcgagtgcgaggaaccgaataacagactggataagtttaccggaaccttgttttggcgcaacacttcatttccgctcgacgctgataagattctgctcaggggctgcgtgatacgcaacacagatttctgtcacggcctagtgatattcgccggagccgatacgaagataatgaagaatagtggcaagacgcgtttcaaacgtacgaagatcgactacttgatgaattacatggtatacaccatcttcgtggttttgattcttctatcagctggtttggcaattggccacgcctattgggaagcccaagtcggaaacagctcctggtacctgtacgatggcgaagatgacacaccgagctaccgcggtttcctcatcttttggggatatatcattgtgttgaacacaatggtgcctatcagcctgtacgtgtccgtggaggttatccgtctgggccaatcccacttcattaattgggacttgcaaatgtactacgcagagaaagacaccccggcgaaggctagaacaaccacattgaacgagcagctgggacagatccattacattttcagtgacaaaaccggtacactgacacaaaacataatgacgttcaagaaatgctgcatcaatggtcagatatatggtgaccatagggacgcgagccaacacaaccataataagatcgagcaggtggacttcagttggaacacttacgccgacggcaagcttgctttttacgatcattatctgatcgaacagatccaatctggaaaggagccggaagtccgtcagttcttttttctactggcagtatgccacacggtcatggtggatcgcacggatgggcaacttaactatcaggccgcaagccccgatgaaggggcactagtgaatgcagctaggaactttggattcgcgttcctcgcgcgcacgcagaacacgatcaccatcagcgagctgggcactgagcgcacatacaatgtgctggccatattggatttcaactcagatcggaagcgtatgtccataatcgtccgtacccccgagggaaatatcaagctgtactgcaagggtgcggacacggttatctatgaacgtttacatagaatgaatccaactaaacaagagacccaggatgccttggatatattcgctaacgaaaccttgcgtacgttatgcttgtgctacaaggagatcgaggaaaaggagttcacagaatggaataaaaagttcatggcagccagcgtcgcctcaaccaatagagatgaggccctggataaggtctatgaagaaatcgagaaggacctcatcctgctgggtgccacagccattgaagacaaactgcaggacggagttcccgagactatatctaagctggccaaagccgacatcaagatctgggttttgactggagacaaaaaggagacggccgaaaatatcggttttgcctgcgagttgctcaccgaggatacaacgatatgttatggagaagacatcaattccctcctgcacgcccggatggaaaatcagaggaataggggcggtgtttatgccaaattcgcccccccagtgcaggagtcgttctttccaccgggaggaaaccgagccttgatcataacggggtcctggctgaatgagatcttgcttgagaaaaagacgaagcgaaataagattctcaagctcaagtttccccggactgaggaggagcgtcgtatgcggacgcaaagcaagaggaggctcgaggcgaagaaggagcagcgccagaaaaacttcgtcgacctggcgtgcgagtgctcggctgtaatatgttgccgagtgacaccaaagcagaaggctatggtcgttgacctggtgaagcgctacaagaaggccataacactcgctataggcgatggcgcgaatgacgtgaatatgatcaagaccgcccatatcggtgtgggaatttcgggccaggagggcatgcaggcggtgatgagttccgattactcctttgcacagtttaggtatctgcagagactgctgctggttcatggacgttggtcctacatccgaatgtgcaaatttctgcgctatttcttctacaagaactttgctttcacgcttgttcatttctggtacagcttcttcaacggctatagtgcacagaccgcctacgaagattggttcataacactctacaatgtcctgtatacgagcctgcctgtcttgctaatgggcctacttgatcaagacgtttccgacaagctgtcgctgcgctttccgggtctatacatagtgggccagagagatctgctgtttaattacaaacgtttctttgtgtcgcttcttcacggcgtcctgacgagcatgatcctctttttcattcccctgggcgcatacctgcaaaccgtgggtcaagatggcgaggcccctagcgactaccagtcatttgccgtgacgattgccagcgcccttgtaattactgtgaacttccaaattggtttggacacgtcgtactggacctttgtgaacgctttttcaatctttggctcgatcgccctttacttcggaatcatgttcgatttccactcggcaggcatacacgtcctgtttccctcggctttccagttcaccgggacagcctcgaacgcgctgcgtcaaccctatatctggctgacaatcatcctcgcagtcgcggtctgcttgctgccggtcgtcgccatccgattcctctcgatgacgatctggccgagcgagtccgacaaaatccagaagcacaggaagcgcctcaaggccgaggagcaatggcagcgccgccaacaagtttttaggaggggcgtgtccaccaggcgcagtgcctatgccttctcacaccagcgcggctacgctgatctgatcagcagcggccgctccatccgcaaaaagagaagtcccctggacgccattgtagcagacggtaccgccgaatatcgtcgcacgggagatagt

SEQ ID NO: 7251 - DNA, 3753 bp, synthetic construct
  misc_feature 1..3753: note = source = /note="Description of Artificial Sequence: Synthetic coding sequence"
  source 1..3753: mol_type = other DNA
atgtcgaccgagagagatagcgaaaccacctttgatgaggactcgcagcctaacgatgaagtggtcccgtactcagacgatgaaaccgaggatgagctcgatgaccagggatcagcggtcgagccggaacaaaacagggtgaatagagaagcagaagaaaaccgagagcccttcagaaaggagtgcacctggcaggtgaaagccaatgatcgtaagtatcatgagcagccacactttatgaacaccaagtttctgtgcattaaagaaagcaaatacgcaaataacgcaattaagacctacaaatacaatgcatttacgttcattcctatgaacctcttcgagcaattcaagagggcagcaaacctttactttctggcactcctgatactgcaagcagtgcctcaaatttcaactctggcgtggtacaccacgcttgtgccactgctggtcgtgctcggtgtcactgcaatcaaggatctcgtggatgatgtggcaaggcacaaaatggataaagagattaacaacagaacttgtgaagtgattaaggatggtaggttcaaggtcgcaaagtggaaagaaatccaggtgggcgacgtgatcagactcaagaagaatgattttgtgcctgcagatatccttctgctctcctcctcggagccaaattccttgtgttacgtcgaaactgcagagcttgatggtgagactaacctgaaattcaagatgtcccttgaaatcactgatcaataccttcaacgcgaagataccctggcgacctttgatgggtttattgagtgcgaggaacctaataaccgacttgacaagttcactggtacccttttttggaggaacacctccttccctctggacgcggacaagatcttgctgagggggtgcgtcatacgaaacactgacttctgtcacggtctggtcattttcgctggagcagataccaaaatcatgaagaactcgggaaaaactaggttcaaaagaaccaagatcgattaccttatgaactatatggtgtacactattttcgtcgtcttgatactgctttcagccggcctggcgatcggtcatgcgtactgggaggcacaggtgggaaattcctcgtggtacttgtacgacggcgaggatgatactcctagctaccgcggctttctgatcttctggggttacattattgtccttaacaccatggtgcctatctccctttacgtcagcgtcgaagtgataaggcttggacagagccacttcatcaactgggatctgcaaatgtattatgcagagaaagacaccccagccaaggccagaactactaccttgaatgaacaactgggtcaaatacattacatcttttccgacaagaccggtaccctgacccagaatatcatgacctttaagaagtgttgcattaatggacagatctacggagatcatcgagatgccagccagcacaatcacaataagatcgagcaggtggatttctcttggaacacgtatgcagacggtaagctcgcattttacgatcattaccttatagaacaaattcagagcggcaaagaacccgaggtgcggcagttctttttccttctggcagtgtgtcatactgttatggtcgatcgcactgacggtcagctcaactaccaagcagcctcgccagacgaaggagcattggtcaacgcggcacggaattttgggtttgcatttcttgctcgaactcagaatactattaccatctcggaacttggcaccgaaaggacttacaatgtgcttgcaatccttgactttaactccgatcgaaagagaatgtccataattgtccgtactccggaaggtaacataaagctgtactgtaagggagcggataccgtcatttatgagcgtctgcacagaatgaacccgaccaaacaggaaacgcaggatgctcttgacatttttgccaacgaaacgctgcggactctttgcctttgctacaaggaaattgaagagaaggagttcactgaatggaacaagaagttcatggcagcttcagtggcatcaaccaaccgagacgaagcattggataaggtgtacgaggaaattgagaaggacttgattttgttgggagcaactgcaatcgaagataagctccaagatggggtgcctgaaaccatttcgaaactggcaaaggcagacataaagatttgggtactcactggagacaaaaaggaaaccgccgaaaacatcggatttgcatgtgaacttctgactgaggataccactatttgttacggtgaagatatcaattcgttgttgcacgctaggatggaaaaccagcgaaaccgaggaggggtgtacgctaagttcgctccgccggtgcaggaatccttttttcctccaggtggaaaccgagcattgattatcaccggatcatggcttaatgagattctcctggaaaagaaaactaaaagaaataagatacttaagctgaagttccctcggaccgaggaagaaaggaggatgaggacgcaaagcaaacgccggcttgaggcgaaaaaggaacagcgacagaaaaactttgtggatctcgcatgtgaatgctcggctgtgatctgttgtagagttaccccaaagcaaaaggccatggtggtggatcttgtcaagagatacaagaaagcgatcaccttggcaatcggcgacggtgcaaacgacgtgaacatgatcaagaccgctcatatcggagtgggcatatctggccaagagggaatgcaagcggtcatgtcctcggattactcattcgcacagtttagatacctccaacggctgttgctcgtgcacggaaggtggagctacatacggatgtgtaagtttctgagatacttcttttacaagaacttcgcctttaccctggtgcatttttggtactccttcttcaacggctacagcgcacaaactgcttacgaggactggtttatcaccctctacaacgtgctttacacttcacttcccgtccttcttatggggctcctggatcaagatgtgagcgataagctgtcgctgaggttccccggactctatatagtgggccagcgcgatcttctctttaactacaaaaggtttttcgtgtcgctcttgcatggggtgctcacctccatgattctgttctttataccactcggcgcctacctccagaccgtgggacaggatggtgaggcaccatccgattaccagtcgtttgcggttactatagcatccgcgctggtgatcaccgtcaactttcaaattggtttggatacttcatattggactttcgtgaacgcattttcaatattcgggtcgattgcactttactttggtatcatgtttgactttcattcggcgggtattcatgtgctgttcccctcagcctttcaatttactgggaccgcctcgaacgcgctgcggcaaccttacatttggctgactatcatcctggcagtcgcagtgtgtctgcttccagtggtcgctatacgttttctttctatgaccatttggcctagcgaatccgacaaaatccaaaagcacagaaaaaggctgaaggcagaagagcaatggcagagacgccaacaggtctttcggagaggagtgtcgactcgtcgcagcgcatacgcattctcccatcagcgcggatacgccgatctgatcagctccggaagaagcatcagaaagaaacgctccccacttgatgcaattgtcgccgacggaaccgcggaataccgcagaactggagacagc

SEQ ID NO: 7252 - DNA, 3753 bp, synthetic construct
  misc_feature 1..3753: note = source = /note="Description of Artificial Sequence: Synthetic coding sequence"
  source 1..3753: mol_type = other DNA
atgtcgacggagcgcgattcagaaacgactttcgacgaggactcgcagccgaacgatgaggtggtcccatactccgacgacgagacggaggacgaactggacgaccaagggagcgcagtggaacctgaacagaacagagtgaatcgcgaggctgaagaaaacagagaaccgttccgcaaggaatgtacttggcaggtgaaggccaacgaccgcaagtaccatgagcagccccatttcatgaatactaaattcctctgcatcaaggaatccaagtacgctaataacgccatcaaaacttacaaatacaatgcctttactttcatccctatgaatttgttcgagcaattcaagcgggcggccaacttgtacttcctcgcactgctgatcctgcaggcggtgccgcaaatctcgacccttgcctggtacactacgctcgtgccgctcctggtggtgctgggagtgactgccatcaaggatctcgtggatgacgtggcccggcacaaaatggataaagaaatcaacaaccgcacctgcgaagtcatcaaggacggacggttcaaagtggccaagtggaaggagatccaggtgggtgatgttatccgcctcaagaagaatgatttcgttcccgcggacatcttgctgctgtcctcctcggagccgaactcgctgtgctacgtggaaaccgcagaactggacggagagactaacctcaagttcaagatgtcgctcgagattaccgaccaataccttcaaagagaggacaccctcgccaccttcgatggattcatcgaatgtgaggagcctaacaacagactggataagttcaccggaacgctgttctggagaaacacctcgttcccgctggatgccgacaaaatcctcctgcgcgggtgcgtgatccggaacactgacttttgccacggactggtgatcttcgcaggagccgacactaagatcatgaagaattcagggaaaactaggttcaagcggacgaaaatagattaccttatgaactacatggtgtataccatctttgtggtgctgattctcctctcggcgggactggccatcggacacgcatactgggaagctcaagtcggaaatagctcatggtatctctacgacggagaagatgacacgccgtcatacaggggattcctgatcttctggggttacatcattgtcctgaacaccatggtcccgatcagcctgtatgtctcggtggaagtgatcagactggggcagtcgcactttatcaactgggacctccaaatgtactacgcagagaaggatactccggccaaggcccggactaccacgctgaatgagcaactcggacagatacattacatcttctcagacaagacgggaactctgacccagaacattatgactttcaaaaagtgctgcatcaatggacagatctatggggaccatagggatgcatcgcaacacaaccacaataagatcgaacaggtggacttttcctggaatacctacgcggatggcaaacttgccttctatgaccactacctgatcgaacagatccagtcggggaaggagccggaggtgcggcaattcttcttcttgctcgcagtgtgtcataccgtgatggtcgacagaactgacggccagctcaactaccaagcggctagcccggatgagggagcgctggtcaacgcggcaagaaatttcggcttcgcatttctcgccaggactcagaacactatcaccatcagcgagctcggaactgagcgcacctacaacgtcctggcgattctggacttcaattcggacaggaaacgcatgagtatcatcgtgcggacccccgagggaaacatcaagctgtactgcaagggagccgatactgtgatctacgagcgccttcataggatgaacccgaccaaacaagaaacccaggacgcactcgacattttcgcgaacgaaaccctgcgcaccctgtgtctgtgctacaaggaaattgaggaaaaagaattcaccgaatggaacaagaaattcatggcggccagcgtggcttcaactaatcgggacgaggctcttgataaggtgtacgaggagatcgagaaggacctcatcctcctgggcgcaaccgcgatcgaggataaacttcaggacggagtgccggaaactatctcgaagctcgccaaggccgacattaagatctgggtgttgactggcgacaagaaggaaaccgccgagaatatcggatttgcttgcgagctgctcaccgaggacaccactatctgttacggcgaagatatcaattccctcctgcacgcaagaatggaaaaccagcgtaacagaggcggggtgtatgccaagttcgcgccaccggttcaagagtcttttttccctccggggggcaaccgggccctcatcattactggatcctggcttaacgaaatcctgctggaaaagaaaacgaagcgcaataagatcctcaagttgaagttcccgagaactgaagaagaacggcggatgcggacccagtccaagaggagactggaagccaaaaaggaacaacgacagaaaaactttgtggacctggcgtgtgaatgctccgccgtgatctgttgccgggtcaccccgaagcaaaaagccatggtggttgacctcgtcaaaagatataagaaggcgatcacgcttgcgatcggtgatggtgctaacgacgttaacatgatcaaaaccgcgcatatcggggtggggatcagcggccaggaaggtatgcaggccgtgatgagctctgactactcatttgcacaatttaggtacttgcagcggctgctcctcgtgcacggaaggtggtcatacatcagaatgtgcaagttcctcagatacttcttttacaaaaacttcgccttcacgctggtccatttctggtactcgttcttcaacggatactccgcacagaccgcgtacgaagattggttcatcactctctacaatgtcctgtacacctcactgccggtgctcctgatgggactgctggaccaggatgtcagcgacaagctgtccctgcggtttcctggcctgtacatcgtgggtcaacgcgacctgttgttcaactacaagagattcttcgtgtcactgcttcacggcgtcctgacctccatgatcctgttcttcatcccgctgggagcctacctgcaaactgtgggtcaggacggtgaggccccgtcggactaccagtcgtttgcagttactattgcaagcgcattggttatcaccgtgaacttccagatcggattggatacctcgtactggacttttgtgaacgctttcagcatctttggatccatcgccctctacttcgggataatgttcgatttccacagcgcgggaatccatgtcctgttcccatcggccttccagtttactggtactgcatctaacgctctgaggcaaccatacatctggctgaccatcatcctggctgtggcagtgtgcctcttgccggtagtggctatccgctttctgtcgatgactatctggccttcagaatcagacaagatccagaagcacagaaagcggctgaaggcagaggaacagtggcagaggaggcagcaggtgttccgcagaggtgtctcaaccaggcggtccgcctacgctttttcacaccaaagaggatacgctgacctgatcagctccggacgatccatccggaaaaagaggtcgcctctggacgcgattgtcgcggacggaacggccgaatatcgaagaaccggagatagc

SEQ ID NO: 7253 - DNA, 3753 bp, synthetic construct
  misc_feature 1..3753: note = source = /note="Description of Artificial Sequence: Synthetic coding sequence"
  source 1..3753: mol_type = other DNA
atgtccaccgaacgagacagcgaaaccacttttgacgaggactctcaacccaatgacgaagtggtgccttactctgacgacgaaaccgaagatgagctggatgaccaaggcagtgcagtggaacctgaacagaatcgtgtcaatcgcgaggcagaagaaaaccgggagccatttcgaaaagagtgtacgtggcaagtcaaggcaaatgacagaaaataccacgaacagccccacttcatgaacacaaaattcctctgtattaaggaaagcaaatacgccaataacgcaatcaagacatataagtataatgctttcacctttatacctatgaacttgttcgagcagttcaaacgggctgcaaatctgtacttcttggcgttactgatccttcaggctgtcccccagatctctactcttgcatggtatactaccctcgtgccgctgctggtggtcttgggggtgacggccataaaggacttggtggatgacgtcgcgcgccataaaatggacaaagagataaacaataggacctgtgaagtcataaaggacggtcgtttcaaggtggcgaagtggaaggagattcaagtcggagatgtgatacgcttgaagaagaacgattttgtccccgcggatatactcctgctgagtagttctgagcccaattcactttgctatgtcgagaccgcggagctggacggcgagacgaatctgaagtttaagatgtctctggagataaccgatcaatacttacagcgggaggatacgttggccacgtttgacgggttcatcgagtgtgaggaacccaacaacagacttgacaagttcaccgggactcttttctggaggaatacatctttccccctggatgccgataagatactgctgagaggctgtgtcatccgaaatactgacttctgtcacggcctggttatatttgccggcgccgacacaaaaattatgaagaactctggtaagacccgctttaaaagaacaaaaatcgactacctgatgaactatatggtgtacaccattttcgttgtgctcattctcttgagcgctggactggctatcggacacgcctactgggaggcacaagtcggcaattcctcctggtacctctatgatggagaggacgacaccccaagctacagaggctttctgattttttggggctatatcatcgtgctgaataccatggtgcccatttccctatatgtgtctgtggaagtcattaggctgggccagtcacactttataaactgggacctgcagatgtattatgctgagaaagatacccccgccaaggcccgcaccacaaccttaaacgagcagctgggtcagattcattatatcttctccgataagaccggtacactgacacagaacataatgacctttaagaagtgctgtataaacggccagatttatggggaccaccgagacgctagccagcacaatcacaataagattgagcaggttgacttttcctggaacacttacgccgatggcaaattagcattctatgaccactacctgattgaacagatccagtctggtaaggagcccgaagtgcgtcaattcttttttctgcttgccgtgtgtcacacagtgatggtcgaccgaaccgacggacagcttaactaccaggctgcatctccagatgaaggtgctctggttaacgccgccagaaacttcggtttcgccttcctcgctcggactcaaaatacaataacaatttcggagttggggacagagcggacgtataacgtgctagcaatcctcgattttaatagtgacagaaagcgcatgagcataatcgtacggacacctgagggaaacatcaagctgtattgcaaaggagctgatactgtgatctacgagcgtctgcaccgtatgaaccccaccaagcaggaaacacaagacgctttggacatctttgctaacgagactctgcgtacactctgtctgtgttataaagagatagaggagaaggagtttaccgaatggaacaaaaagttcatggcggcaagcgttgcatctactaacagggacgaggccctggacaaagtgtacgaagagatagaaaaagatctgattttgctgggggccactgctattgaagataaactgcaggacggggtgcccgaaaccatcagtaaacttgctaaagctgatattaagatctgggtgctgaccggcgataagaaggagacggcagagaacatcggattcgcctgtgagttgctgaccgaggatacgaccatttgttatggcgaagatataaactccctcttgcatgcccgtatggagaaccagcgaaaccgtggcggagtgtacgccaaatttgctccgcccgttcaagagtccttcttcccccctggaggcaatcgtgcactgataatcactggatcctggctcaacgagatcctgttggaaaagaagacaaaacggaataaaatattgaagctcaagtttcccagaaccgaggaggagcgccggatgcgtacccaaagcaaacgcagacttgaggcaaaaaaggaacagcgccagaaaaattttgtggatctcgcttgtgaatgctcggcagttatttgttgccgtgtgacccctaagcaaaaggctatggttgtagacttggtgaaaagatataaaaaggccattactctcgcgattggggacggggctaacgatgtcaatatgatcaaaacagcacatatcggggtggggatttcaggtcaggagggtatgcaggccgtcatgtcctccgattacagctttgctcagttccggtacttgcagcggctcttactcgtgcacggcagatggtcctacatacggatgtgtaagttcctgcgctatttcttctacaagaactttgcattcaccctggtacacttttggtactcattctttaatgggtactctgcccagactgcttatgaagattggtttataacactgtataatgttctctacacttccctcccagtacttcttatggggctcctggaccaggatgtaagcgataagctctcactgcgcttccccgggctctatatagtcggccagcgagatctcctgttcaattacaagagattcttcgttagtctgcttcatggcgtcctgacctcaatgattctgttcttcatcccccttggggcctatctccagacggtcgggcaggacggggaggctccaagtgactatcaatcgtttgccgtgactatcgccagcgctcttgtcatcaccgtaaacttccagatagggcttgatacatcttattggacgttcgtgaacgccttctctattttcggtagcatcgcgctgtatttcggcatcatgtttgactttcactctgccggcattcacgtactcttcccctctgcctttcagttcaccggtacagcttcgaatgccctacggcagccttacatctggctgaccatcatcctggccgtagcagtttgtctcttacccgttgtggctatcagatttctttctatgacaatttggccatctgagagcgacaagatccagaagcatcgtaagcggctcaaggcagaggagcagtggcagcgccggcaacaggtgttccgtagaggggtgtccaccaggaggtccgcctacgccttttctcatcagcgtggctatgccgacctgatctcttccggacgcagtatacgcaagaagcgtagcccgttggatgccattgttgccgatggcaccgctgaatataggagaactggcgacagc

SEQ ID NO: 7254 - DNA, 3753 bp, synthetic construct
  misc_feature 1..3753: note = source = /note="Description of Artificial Sequence: Synthetic coding sequence"
  source 1..3753: mol_type = other DNA
atgtcgactgagcgggatagcgaaactacgtttgacgaggatagccaaccaaacgacgaagtggtcccgtactctgacgatgaaactgaagatgagctcgatgatcaggggagcgccgtggaacctgaacagaatagagttaaccgagaagccgaagagaacagagaaccgtttagaaaagagtgcacctggcaagtgaaggcgaacgatagaaaataccatgagcaaccgcactttatgaataccaagtttctttgtattaaggagtcgaagtacgctaacaatgcaatcaagacctacaaatacaacgcatttacctttatccctatgaacctgtttgaacaattcaagcgggcagcaaacctttacttcctggcattgctgattttgcaagcagtccctcagattagcactctggcatggtacacgacgcttgtcccccttttggtggttctcggtgtcactgcgattaaagatctcgtggacgacgtggcaagacataagatggataaggaaatcaataaccgtacgtgtgaagtcatcaaggacggtcggtttaaggtcgcaaaatggaaagagatacaggtgggagatgtgatcagactcaaaaagaatgacttcgtgcctgcggatatcttgctcctgtcaagctcagagcccaattcgctctgttacgtggaaaccgcagagcttgatggagagactaacttgaaattcaaaatgtctctggagatcaccgatcaatacctgcaacgtgaggatacccttgcaacctttgacggctttatagaatgtgaggaacctaacaatcggctcgataagttcaccggaacgctcttttggcgtaacacttcatttccactcgatgcagataagattctgctccgggggtgtgtgatcaggaacactgacttctgtcacggcctcgtcatcttcgcaggcgccgacaccaagataatgaagaacagcgggaaaactcggtttaagcgtaccaaaatcgattaccttatgaattacatggtctatacgatctttgtggtgctgattctcctgtccgctggccttgcaattggacacgcatactgggaagcacaagtcggaaactcctcctggtacctttatgatggagaggacgatactccgtcctaccgcggcttccttatcttttggggctacattatcgtactgaacactatggtccccatttcgctttacgtgtcggtggaagtgatccggcttggacagtcccatttcattaactgggatctgcaaatgtactacgccgagaaggacaccccggcaaaggctaggactactactcttaacgaacaattgggacaaatccattacatctttagcgataagaccggaactcttacccagaacattatgacctttaagaagtgttgcattaacggtcaaatctacggtgaccatcgtgatgcctcccagcacaatcacaacaagattgaacaagtggatttcagctggaacacctacgctgatggaaagctggcattctacgaccactaccttattgaacagatacaatcgggaaaggagcccgaagtgagacagtttttctttcttcttgcagtctgccataccgtcatggtggataggacggacgggcagttgaattaccaggcagcgagcccagacgaaggtgcattggtgaatgcagcaaggaattttggtttcgcatttctcgcaagaacccaaaacaccattacgatctcggagctgggtactgagaggacctacaacgtgctggcaattctggactttaactctgatagaaagcggatgtccattattgtgagaactcccgagggcaacattaaactgtactgtaagggagcggatactgtgatctacgaacgccttcaccggatgaatccgaccaagcaggaaactcaagatgcactcgacatctttgcaaatgaaaccctgcgtactctgtgcctgtgttacaaggaaatcgaagaaaaggagtttacggagtggaacaagaaattcatggccgcaagcgtggcctcgactaatagagacgaagcactggataaggtgtacgaggagattgaaaaggatcttatccttcttggtgctaccgcaatcgaagataagctccaagatggagtgcctgaaaccatttcgaagctcgcaaaagcagatatcaagatctgggtgcttaccggagataagaaggagactgcagagaatattggatttgcgtgcgaacttttgactgaggacaccacgatttgctacggtgaagatatcaactcgctcctgcatgcaagaatggaaaaccaacggaatcgcggcggagtgtacgccaaattcgccccaccagttcaagaatcctttttcccgcctgggggaaacagggcgctcataatcacgggctcctggctgaatgagattttgctggagaagaaaactaaaaggaacaaaatccttaaactgaagtttccccggactgaggaagaacgccgcatgcggactcagtcaaagcggcgtcttgaagcaaagaaggaacagcggcaaaagaacttcgtcgatctggcatgcgaatgttcggccgttatttgttgcagggtgacgcccaagcagaaagccatggtcgttgacctggtgaagcgttacaagaaggcgattacccttgcgataggagatggtgccaacgatgtgaacatgatcaagactgcacatattggtgtgggtatttccggacaggaaggaatgcaagctgttatgtcatcagactactccttcgcacaatttcgttacctgcaacgcctgcttctggtccacgggagatggtcctacatccgaatgtgtaagtttttgagatacttcttttacaagaactttgcgtttactctggtgcatttctggtacagcttctttaacggctactcggctcagaccgcatacgaagattggttcatcaccctttacaacgtgctttacacctccctgcctgtcctgctgatgggtctgctggatcaagatgtgagcgacaaactttcgcttagatttcctggtctgtacattgtgggtcaacgcgatctcctcttcaactacaagagatttttcgtgtcgctgcttcatggtgttcttacttccatgatccttttcttcatacctcttggagcctacctgcagaccgtgggacaggatggtgaggcgccttcggactaccagagtttcgcagtcacgattgcctccgccctggtcattactgtgaattttcagattggcctcgatacgtcgtattggacttttgtcaacgcattcagcatctttggcagcatcgctctgtactttggaatcatgttcgactttcattccgcaggaatccatgtcctttttccatctgcatttcagttcactggaaccgccagcaatgcactcaggcaaccttacatttggcttaccataatccttgcagtggccgtctgtctcctgccggtcgtggcgattaggtttctttccatgactatctggccttcagagagcgacaaaattcagaaacatcgcaagcgcctgaaggcagaagagcagtggcaacggagacagcaagtgttcagacgcggtgtgtcgaccaggcggtcggcgtacgccttctcccatcagcgcgggtacgcggatcttatatcttcaggacggtctatccggaaaaaacgatccccactcgatgcgattgtcgcggatggcaccgcagagtacaggcggacgggtgactcc

SEQ ID NO: 7255 - DNA, 3753 bp, synthetic construct
  misc_feature 1..3753: note = source = /note="Description of Artificial Sequence: Synthetic coding sequence"
  source 1..3753: mol_type = other DNA
atgtcgactgaacgggacagcgagactacctttgatgaagattcccagccgaatgacgaagtcgtcccttatagcgatgatgaaaccgaggatgagctggatgatcaaggatcagcagtcgagcctgaacagaatagggtgaacagagaagcagaggaaaatcgagagccgtttaggaaggaatgtacctggcaagtgaaagccaatgatcgaaagtaccacgagcaaccccatttcatgaatactaagtttctttgtatcaaggagtcgaagtacgctaacaacgcaatcaagacttataagtacaatgcattcacctttatccctatgaatctcttcgaacagtttaaacgagcagcaaatctttacttccttgcgctgcttatccttcaagctgtgcctcaaatctccaccctcgcgtggtacactaccctggtgcctctcctggtggtccttggagtgactgccataaaggacttggtcgatgatgtggctcgccataagatggataaggagattaacaataggacttgcgaagtgatcaaagatgggcgattcaaagtggcaaaatggaaggaaattcaagtgggagacgtgattcggctcaaaaagaatgattttgtgccagcagatattctgctgctttcgagctccgaaccaaactcgctgtgctacgtcgaaaccgcagaacttgatggcgaaactaatctcaagtttaagatgtctctggagataacggaccaatacctccaaagagaggacactttggctacttttgatggattcatcgaatgtgaggaaccaaataacaggctggataagttcacgggtaccctgttttggagaaatacgtcctttcccctggatgcggataagattcttcttcgaggttgtgtgatccggaataccgatttctgtcacggactggtgatttttgctggcgcagatactaagattatgaaaaactccgggaaaactcggttcaagagaaccaaaattgattaccttatgaactacatggtgtacacgatctttgtggtccttatcttgctgtccgccggactggcgattggacatgcatactgggaagcccaggtgggtaacagcagctggtacctgtacgatggcgaagatgacacccctagctaccggggctttctgattttctgggggtacattatcgtgctcaatacgatggtgccaatctcactgtacgtgtccgtggaggtgattaggctgggacaatcccatttcatcaactgggatcttcaaatgtactatgcagagaaggacaccccggcaaaagcccggaccaccactctgaacgaacagcttggccagattcactacattttcagcgacaagactggaacgctgactcaaaacattatgaccttcaagaagtgttgtataaacggacaaatctacggtgatcacagagatgcaagccagcacaatcacaataagatcgaacaagttgacttctcctggaacacctatgccgatggcaagctcgccttttacgatcattatctgattgaacagattcagagcgggaaggaacctgaagtgaggcagttctttttcttgctggccgtgtgccacactgtgatggtggatagaaccgacgggcagctgaactaccaggcagcaagccctgatgaaggggccctcgtgaatgctgcacgaaactttggattcgcattcctggcgagaactcagaacaccataacgatttcggagctggggactgagcggacctacaacgtgctggcaattcttgactttaactcggaccgtaagcgaatgtcgattatcgtccgcaccccagaaggcaacataaaactttactgcaagggagccgacacggtgatatacgagcgccttcaccggatgaatcctactaagcaagaaacccaggacgcgctggatatcttcgcaaacgaaaccctccggaccctgtgtctgtgctacaaagagattgaagagaaagaatttacggaatggaacaagaaattcatggcagcatcggtcgcaagcaccaaccgcgacgaagctcttgataaagtctatgaagaaattgaaaaggatctcattctcctcggtgccactgcaattgaagataagttgcaggacggtgtgcccgagactatatccaagctggccaaggcagatatcaagatttgggtgctgactggggacaagaaagagactgccgaaaacataggattcgcgtgtgagttgcttactgaagataccactatttgttacggcgaggatatcaacagcctccttcatgctcggatggagaaccaacggaatcggggtggagtgtacgccaagtttgcacctccagttcaggaatccttttttcctccggggggaaacagagcgctcatcattactggatcgtggctgaacgaaatactcctcgaaaagaaaactaagcgcaataagatcctcaagctgaagtttcctaggaccgaagaggaacgtaggatgagaactcagagcaagcgtagacttgaggcgaagaaggaacaacgtcagaaaaactttgtcgaccttgcatgcgaatgctcggcagtgatctgctgtcgagtgactccaaaacaaaaagcgatggtggtggatctcgtgaagcgatacaagaaggcaattaccctggccattggggatggagccaacgacgttaacatgattaagaccgcacatatcggtgtgggcatctcaggtcaggaagggatgcaagctgtgatgtcatcggactactcgtttgctcagttccgctacctgcaacgacttctccttgtgcatggaagatggtcgtacataagaatgtgtaaattccttagatactttttctacaaaaactttgcatttaccctggtgcatttctggtacagctttttcaacggttactcagcacaaaccgcctatgaggactggtttatcactttgtataatgttctgtacacctcgctcccagttcttttgatggggctcctggaccaagacgtgtccgacaagctctctctgagattccccggtttgtacatcgtcggccagagagatctgctgtttaactacaaacggtttttcgtgtcactgcttcatggagtcctcaccagcatgattctgttctttatacctcttggggcatacttgcagactgtggggcaagatggagaagccccaagcgactaccaatcatttgccgtcaccatcgcatccgcgctggtcataaccgtgaattttcaaattggtctggacacttcgtactggacttttgtcaacgcattttccattttcggatctatcgcgttgtacttcggcattatgtttgattttcatagcgctggtatccacgtcctgtttccctccgcctttcagtttaccggaactgcgagcaacgcactgagacagccatacatctggctcaccatcatccttgcagtcgcagtgtgtctgctcccagtcgtcgcaattagattcctgagcatgactatatggccctcggagtcggataagatccaaaagcataggaagagactgaaggcagaagaacaatggcagcggagacagcaagtctttcgaagaggagtctctaccagacggtcggcatacgcatttagccatcaacgcggttacgcagacttgatctcgagcggccgatcgattcgaaagaaacgtagcccgctcgatgctatcgtcgcagacgggaccgccgagtacagacgtactggtgactcc

SEQ ID NO: 7256 - DNA, 3753 bp, synthetic construct
  misc_feature 1..3753: note = source = /note="Description of Artificial Sequence: Synthetic coding sequence"
  source 1..3753: mol_type = other DNA
atgtccaccgaacgggattctgagacaacttttgatgaggatagtcagccgaacgatgaggtggtgccctattccgacgatgagaccgaggacgaactggacgatcaaggttcagccgtcgaaccggagcagaatcgtgtcaatcgcgaagctgaagaaaaccgcgaaccatttaggaaggagtgtacctggcaggtgaaggccaacgatagaaaataccacgagcagccacactttatgaatacaaaattcctgtgtatcaaggagagcaaatatgcaaacaacgccattaaaacctacaaatataacgctttcaccttcatacctatgaatctgttcgagcagtttaaaagggccgcaaacctgtactttctggccctcctgatcttacaggctgttccccaaattagcacacttgcttggtacacgacactggttccccttctcgtcgttctgggtgtcaccgctataaaggacctagtggacgacgtagcccggcataaaatggacaaggaaataaacaatcggacatgcgaagtgataaaagacggcagatttaaggtggcaaagtggaaggaaatacaggtgggcgacgtcattcgattaaaaaaaaatgattttgtgcctgcggacattcttctcctgagctcttccgaacctaattctctatgctacgtcgaaacagcggaactggacggagaaaccaacctaaaattcaagatgtctctggagattactgaccagtatctacaaagagaagacacgctcgccacatttgacggctttatcgagtgcgaggaacccaacaatcggctggacaaattcacgggcaccctgttctggcgcaacacaagctttcccctagatgcagataagattttgctgcgggggtgcgtgattcgaaatacagatttctgccacggacttgtgatattcgctggcgctgataccaaaattatgaaaaacagcggcaaaactcgctttaaacgcactaagatcgactacctgatgaattacatggtgtacaccatctttgtggtgctgattctcctgagcgccggccttgccattggacatgcctattgggaggctcaggtgggaaacagttcatggtacctgtacgacggagaagacgacaccccttcatataggggatttctcatcttttggggctatattatcgttctaaacactatggtcccaatttctttgtatgtttcagttgaggtgatccgactggggcagagccactttatcaactgggacctgcagatgtactacgcagagaaagacactcctgccaaggctagaactactaccctcaacgaacagctgggacaaattcactatattttttcagacaagaccggcacactgactcagaacatcatgacttttaaaaaatgctgcatcaatggccaaatctacggcgaccatcgtgacgcctcacagcataaccataacaaaatcgagcaggtagacttctcctggaacacttacgccgacgggaagctggccttttacgaccactatctcattgaacagatccagtccggaaaggaacccgaggttaggcagtttttctttctgctcgcggtgtgccacaccgtcatggtggatagaactgacggtcagttgaactaccaggctgcctcccctgacgagggcgcactggtgaatgcagctagaaattttggattcgcctttctggcgcgtactcagaataccatcactatctccgaactgggcaccgaacgaacctacaacgtgcttgcgattttggactttaactctgatcgaaagcggatgtccatcatcgtgcgcaccccggagggaaatattaagctatattgcaaaggcgctgatacagtgatctatgaacgcctgcatcgcatgaaccccacgaaacaggagactcaagacgccctcgacatatttgcgaacgaaacacttcgtacactctgcctctgctacaaggaaatagaggagaaagaattcacggagtggaacaagaagtttatggcagcctccgtggcctcaacaaacagagatgaggctctggacaaggtgtacgaggaaatcgagaaggatctgatccttctgggcgcgacagccattgaggataaactgcaggacggagtccctgaaaccatctcaaaacttgccaaggctgatattaaaatctgggtgcttaccggtgacaagaaagaaacggccgagaacattggctttgcttgtgaattgctaactgaggacaccacgatttgctatggagaagacataaacagcctgcttcacgccagaatggagaatcagaggaacagaggaggagtatatgctaaattcgccccgcctgtgcaggaaagtttttttcccccaggtgggaaccgggccctgatcatcactggctcttggctgaacgagattttactggaaaagaagacaaaaaggaacaagatcctgaaacttaagtttccccgcactgaggaagagagacgaatgcgaactcagtccaaaaggcgactggaggccaagaaagaacagcgccaaaagaacttcgtagatctggcatgcgaatgctccgccgtaatttgttgccgcgtcacgcctaagcagaaggctatggttgttgacttggtgaagcggtacaaaaaggcaataacgcttgccatcggtgatggtgccaacgacgttaatatgatcaagacagcccacattggagtcggtatctctggtcaggagggtatgcaggcagttatgagttcagattattctttcgcgcagttccgttatcttcagagactgctgcttgtgcacggcagatggtcctacatcagaatgtgtaaattcctgcgatactttttttacaaaaacttcgcgttcaccctggtgcatttttggtatagctttttcaacggctatagcgcacagaccgcatacgaagactggtttatcactctgtataacgtgctctatacatccctgccagtgctgctcatggggctgctggatcaggatgtttcagacaagctttcactgcggttcccgggactgtatatcgttggacagcgcgatttgctgtttaattacaagcgcttctttgtgagccttttacatggcgtcctcaccagcatgatcctattttttattccgctgggcgcttatctgcagaccgtggggcaggatggtgaagctccctctgactaccagagctttgcagtcactatcgccagtgccctggtaattaccgtgaacttccagatcggtctggacacgtcttattggacttttgtgaacgcatttagcatctttgggtctattgctctttatttcggcatcatgttcgatttccacagtgcaggcatccatgtccttttccccagcgcattccagttcacaggaaccgcgtccaacgcactcaggcagccttacatctggctgacaattatcctggccgttgccgtttgtcttttaccagtagttgcaatcaggttcctgtcaatgaccatatggcccagcgagagcgataaaatacaaaagcatcgcaaaaggttgaaagcagaggagcagtggcagcgacggcaacaggtgttcagacggggcgtctccacacggagatctgcctacgcatttagtcaccaaagggggtacgccgacctcatatctagtggaaggtccatcaggaaaaaaagatccccattagatgctatcgttgctgacgggacggccgagtacaggaggactggagatagc

SEQ ID NO: 7257 - DNA, 3753 bp, synthetic construct
  misc_feature 1..3753: note = source = /note="Description of Artificial Sequence: Synthetic coding sequence"
  source 1..3753: mol_type = other DNA
atgtcgacggaacgggattcggaaacgaccttcgacgaagattctcaaccgaacgacgaggtggtcccgtactcggacgacgaaaccgaggacgaacttgacgatcagggctctgccgtcgaaccggagcagaatcgcgtcaatcgcgaggcggaagaaaaccgggagccgtttcggaaggaatgcacctggcaagtgaaggcaaacgaccggaagtaccacgaacagcctcatttcatgaatactaagttcctctgcatcaaggagtcaaagtatgctaacaacgcaatcaaaacttacaagtacaatgccttcacctttatcccaatgaaccttttcgaacagttcaagagagctgccaacctctatttcttggcgctcctgatcctgcaagccgtgcctcaaatcagcaccctcgcgtggtacaccaccctggtgcctcttctggtcgtgctgggagttaccgctatcaaagatctggtggatgacgtcgcaagacacaagatggataaggagattaacaacagaacctgtgaagtgatcaaggatggccgctttaaggtggccaagtggaaggaaatccaggtgggggacgtcatacgcctgaagaaaaatgacttcgtcccagccgacatccttctcttgagctcatcagaaccaaactctctgtgctacgtggagactgctgagttggatggagaaaccaaccttaagtttaagatgtcgctcgaaatcaccgatcaatacctgcagcgagaagataccctcgctactttcgatggattcatcgagtgcgaggagcctaataacagactggataagttcactggcactctcttctggagaaatacctcgttccctctcgatgccgacaagatcctgcttcggggatgtgtcattagaaatactgacttctgccacggacttgtgatcttcgccggagcggacaccaagattatgaagaactcgggaaagactcggttcaagcgcaccaaaatcgactacctgatgaattacatggtctataccatctttgtggttctcattctccttagcgccggtttggccatcggacacgcctactgggaggcccaggtgggaaacagctcgtggtacctgtacgacggagaggacgatacgccgtcgtaccgggggttcttgatcttttggggatacatcattgtcctcaatactatggtgccgatttcgctgtacgtgtcggtggaggttatccggctgggccagagccatttcattaactgggatctgcaaatgtactacgcggaaaaggacaccccggcaaaggcacggaccactaccctgaatgagcagctgggccagatccactatatcttctccgacaaaaccggtacgctgactcagaacatcatgacctttaagaaatgttgcatcaacggacagatctacggtgatcatagggacgcgtcgcagcacaatcataacaaaatcgagcaggtggatttctcgtggaacacctacgcggatggcaaacttgcgttttacgaccactaccttatcgagcagatccagtccggtaaggagccagaggtgcgccagttcttcttcctgctcgccgtctgccacactgtcatggtggaccggaccgacggacagctgaattatcaggctgcgtccccagacgaaggcgccctggtcaacgccgctcggaattttggattcgcattcctggctcggacgcaaaataccattaccatctcggaactcggaaccgaacggacctacaatgtgcttgcgattctggactttaactcagataggaaaagaatgtcaatcatcgtgcgtaccccagaggggaacatcaagctgtactgcaagggcgccgataccgtgatttacgaaagactccaccgcatgaaccctaccaagcaggagactcaggacgcccttgacatcttcgccaacgaaaccctgcggacgctttgcctgtgctacaaggagatcgaagagaaagaattcactgagtggaacaagaaattcatggccgcttccgtggcgagcactaatcgagacgaagcactcgacaaagtctacgaagagatcgagaaggacttgatcctgcttggcgctaccgcgatcgaagataagctgcaggacggcgtgcccgagactatcagcaagctggctaaggcagacatcaagatctgggtcctgactggtgacaagaaggaaacggcagaaaacatcgggttcgcatgtgaactgctcaccgaggacacgaccatctgttacggagaggacattaacagcctgctgcatgcccggatggaaaaccagcgaaacagagggggagtctacgccaagttcgcccctccagtgcaagaatcgttctttccgccaggagggaatcgcgcgctgattatcaccggatcatggctgaacgaaatcctgctcgagaaaaagaccaagagaaacaagatcttgaagctcaagtttccacgcaccgaggaagaacgccgcatgcggacgcagtcaaagaggagactggaagccaagaaggaacagagacagaaaaactttgtggatctcgcgtgcgagtgctcggccgtgatctgctgccgcgtcacgcctaagcaaaaggccatggtggtggatctggttaagcgctacaagaaggcgatcaccctcgcgatcggcgatggagctaacgatgtcaatatgatcaagactgcccatatcggggtgggcatcagcggacaggagggcatgcaggctgtgatgtcatcggactactcgttcgcgcagttccgctacctccaacggctgctgctggtgcatggacgatggtcttacatccgcatgtgcaagttcttgcgctacttcttctacaagaatttcgccttcactctggtgcacttctggtacagctttttcaacggatactccgcacaaaccgcttacgaggactggttcattaccctgtacaacgtcctgtacacgtcactgccagttctgctgatgggacttctggaccaggatgtgtctgataagctctccctgagattcccaggcctctacatcgtgggacaacgggatctgcttttcaattacaagcggttcttcgtgtccctcctccatggcgtactcacttcgatgatcctgttctttattccactcggcgcttacctccaaaccgtcggtcaggacggagaagctccatccgactatcagtcattcgccgtcaccattgcctccgctctggtcatcaccgtgaacttccagatcggactggacaccagctattggacctttgtgaacgccttctccattttcggatccatcgcgctgtactttggaatcatgtttgatttccattccgcgggaatccacgtgttgttcccttcggctttccaattcaccggaaccgcctccaatgcactgaggcaaccgtacatctggttgaccattatcctcgcagtggctgtctgtctcctgccggtggtggcgatccgcttcttgagcatgaccatctggccatcggagtccgacaaaatccagaagcaccggaagcggctgaaagccgaagaacagtggcagcgccggcagcaggtgttccgtagaggcgtgtctactcgaaggtcggcgtacgccttcagccatcagagggggtacgcagatctgattagctccggacggtcaatcaggaaaaagcgcagcccgcttgacgccatcgtggcggacggaactgcggaataccggcggaccggcgattcc

SEQ ID NO: 7258 - DNA, 3753 bp, synthetic construct
  misc_feature 1..3753: note = source = /note="Description of Artificial Sequence: Synthetic coding sequence"
  source 1..3753: mol_type = other DNA
atgagcactgaacgggacagcgaaactacgttcgacgaagacagtcagcccaacgacgaggtggtgccatacagcgatgacgaaactgaagacgagcttgacgaccagggcagcgccgtggaacctgagcagaaccgcgttaacagagaggcggaagagaaccgcgagcccttcaggaaagagtgtacttggcaggtaaaggccaacgacagaaaatatcacgaacagccacacttcatgaatacaaagtttctgtgtatcaaggaaagcaaatacgccaataacgcaataaaaacctacaagtacaacgcgttcacctttatccctatgaacctgtttgagcagttcaagcgggccgctaacctttacttcctcgcactgctgatcctgcaggccgtgccccagatttcaacgttggcatggtacactacactggtgcccctgctcgtggtgttgggcgtcacggccatcaaagatctggtcgacgatgtcgcccgccataaaatggataaggagatcaacaaccgcacgtgcgaggtaataaaagacgggaggtttaaggtcgcaaaatggaaagaaatccaggtcggagacgtgatacgccttaagaaaaacgactttgtgccagctgacatattgttgctgtcttcctccgagcccaactctctttgttacgttgagactgcagagttggatggggagactaatttgaagtttaagatgagtcttgaaatcaccgatcagtacctccaacgagaggacaccctggccacatttgacggattcattgaatgcgaggagcccaacaaccgactcgataagttcacaggtacactcttctggcggaacacgagcttccccttggacgccgataagattctgctgagaggatgtgtgatcaggaacacagacttctgtcatggactggtcatctttgcaggagccgacactaaaattatgaaaaactctggaaaaacaagatttaagcgcactaaaatagactatcttatgaattatatggtgtacactatattcgtggtgctgattctgctctccgcaggcctggcaataggacacgcctactgggaggcccaagtgggtaatagttcctggtacctttacgatggcgaagatgacactccatcctacaggggcttcctgattttctggggctacattatcgtcctgaatacaatggttccaattagtctctacgtctcagtcgaagtgatcagactgggccagtctcacttcattaattgggatttgcagatgtactatgctgaaaaagacaccccggcaaaggcacgcaccaccactttgaatgagcagcttgggcaaatccactacatcttttccgataaaacggggaccctgactcaaaacataatgaccttcaagaaatgctgtataaatggccagatctacggtgatcaccgggacgcctcccaacacaatcataacaagattgagcaggtagatttctcttggaatacctatgccgatgggaaactcgccttttacgaccattatcttatcgaacagatccagtccggcaaggagccagaggtgcgacagttttttttcctgcttgccgtctgccacacggtgatggtcgatagaactgatgggcagctgaattaccaggctgcgtctcccgacgagggagcgttggttaacgccgctcgcaacttcggctttgcatttctggctaggacacagaatactattacaattagcgagctcggcactgagcggacatataacgtgctggcaattctggatttcaatagtgaccggaaaaggatgagcatcatcgtgaggactcccgagggcaatatcaaactctactgtaagggagcagatacagtgatttacgagaggctccatagaatgaatcccacaaaacaggaaacccaggacgcactggacattttcgccaacgaaacccttagaactctgtgcctgtgttacaaggagatcgaggaaaaagagtttaccgagtggaacaagaagttcatggccgcatctgttgcatccacgaatcgagacgaggccctcgataaagtatatgaagagatcgagaaggacctcatactgctcggcgcaaccgctatagaggacaaactgcaggatggagtcccagagaccattagcaaacttgcgaaggctgatatcaagatctgggtgctgaccggtgacaagaaagagactgctgagaatatcggatttgcatgcgaacttctcactgaagatacgacgatctgctacggggaggatataaattcccttctgcacgctcggatggaaaatcaaagaaacaggggtggagtgtacgccaagtttgccccgccagttcaggagtctttttttcccccgggtggcaatagggctctgatcatcaccggcagttggctcaatgaaatcttgctggagaaaaagacaaagagaaacaaaatactgaaattgaagttccccagaacagaagaagagagacggatgaggacccaaagcaaacggaggcttgaagcgaagaaggagcagagacagaaaaacttcgtggatttggcttgcgagtgctccgccgtgatctgctgtagggtgacgccaaaacagaaggctatggtagttgatctcgtgaaacggtacaaaaaagctatcacccttgccataggtgatggtgccaacgacgttaatatgataaaaaccgctcacattggcgttggcatcagcgggcaggagggtatgcaggctgtcatgtcctcagactactctttcgctcagttccggtatttgcaaaggctgctgctcgttcatgggcgctggtcatatatacggatgtgtaagttccttcggtactttttttacaaaaatttcgctttcactttggtgcacttctggtactcattttttaatggttattctgcacagactgcttacgaagattggtttattaccctgtacaacgtcctgtatacctccctgccagttctcctcatgggtctgctcgaccaggatgttagtgataaactgagcctgagattcccggggctttatattgtggggcagagggaccttctgtttaactacaagagattttttgtcagtctgctgcacggggtgctgactagtatgatcttgtttttcattcctctgggggcgtatctccagaccgtgggccaggatggggaagctcctagtgactatcagtcattcgcagtgactattgcctccgctctggtgatcaccgtcaattttcagattggcttggatacgagttactggacttttgtaaacgcatttagcatttttgggtccatcgccttgtatttcgggattatgtttgactttcattccgctgggattcacgtactttttcctagcgctttccagtttactggtaccgctagtaatgcccttcgacagccatatatctggctgacaatcatccttgcagtagcggtgtgtcttcttccagtagtcgccattagatttctgagtatgaccatctggcctagcgaatctgacaaaattcagaagcacaggaagcgcctcaaggccgaggagcagtggcagcggaggcagcaagtgtttaggcggggtgtgagtacccggagaagtgcttatgcctttagtcaccagagaggatatgcggatctcatatcttccggacggtccatccgaaagaaacgaagtccactggatgccattgtcgcagacggcactgcagagtaccgcaggacaggcgactca

SEQ ID NO: 7259 - DNA, 3753 bp, synthetic construct
  misc_feature 1..3753: note = source = /note="Description of Artificial Sequence: Synthetic coding sequence"
  source 1..3753: mol_type = other DNA
atgagtaccgaaagagacagcgaaaccactttcgacgaggacagtcagcccaatgatgaggtcgtgccctatagcgacgatgagactgaagacgaactggatgatcagggaagtgccgtggagcccgagcagaaccgcgtgaaccgggaagcagaggaaaaccgcgagcccttccggaaagagtgtacgtggcaggtaaaggccaacgatcgcaaatatcatgagcagccacatttcatgaatactaaattcctttgcatcaaggaatccaagtatgccaacaatgcgattaaaacatataaatacaatgcatttactttcattcctatgaacctcttcgaacagttcaaacgggccgcaaacctctacttcctggctctgcttattctgcaggccgtaccgcaaatatccactctggcttggtacaccaccttggttcctttgttggtggtgctgggcgttacagcaataaaggacctcgtagacgacgttgcccggcacaagatggataaggaaattaacaacagaacctgtgaggtgatcaaagatggtcgttttaaagtcgccaaatggaaggagattcaggtgggcgatgtgatccgcctgaagaaaaacgacttcgtgcctgccgacatcctgctcctgtccagcagcgagcccaactctctgtgttatgtcgagaccgccgagctggacggagagacaaatttaaagtttaaaatgtccctcgagattacagatcagtacctccaacgagaggacactctcgccacgtttgacggctttattgaatgcgaagagcccaataaccgtctagataaatttaccgggacgctgttctggaggaataccagcttccccttggatgcggataagattctgctccgtggttgtgtgattcgtaataccgatttttgccacggcctggtgatctttgccggcgccgatactaaaattatgaagaattcagggaagacccggtttaagagaacaaaaattgattacctgatgaactacatggtctacaccatctttgtagtattgattctgctaagcgccggcttagcaatcggccatgcctattgggaggcacaggtgggcaactcatcctggtacctttacgatggagaagatgatactccatcttaccgaggcttcctgattttctggggttacattatcgtgctgaataccatggtgccgatctctctgtacgtgagcgtggaagtgataagactcgggcagagtcactttataaactgggatcttcagatgtactatgctgagaaggacacaccagctaaagcccggaccactacacttaacgagcaattaggacaaatccattacatttttagcgacaagaccggaactttgacccagaacattatgactttcaagaaatgttgcatcaatggccagatctatggagatcatcgcgatgctagtcagcacaaccacaacaagatcgaacaggtggactttagctggaatacctacgcagatggcaagctcgccttttatgaccactatttgatcgagcagatacagagcgggaaagagccagaagtgcggcagtttttcttccttctggcggtatgtcatacagttatggtggaccgcacagacggccagctgaactatcaggcggcctcccctgatgaaggcgcactcgtgaatgcggcccgcaatttcggctttgcattcctggcccgtacacagaatacaattacgatctccgagttgggcacggaacggacatacaatgtactagccatcttagattttaactctgaccgcaagcggatgagtataatcgtcagaacccccgaagggaatattaagctttactgcaaaggggccgacacagtcatctatgagaggctacacagaatgaacccgacaaagcaggaaactcaagacgcgcttgatatattcgccaacgaaaccctccgtaccttatgcctgtgctacaaggagatagaagaaaaagagttcacggagtggaataagaaatttatggcggcaagtgtggccagcacaaaccgagatgaagctctagataaggtgtacgaggaaatagagaaggatctaatattactgggagctactgctatcgaagacaagctacaggatggagtaccagagaccatatccaagcttgctaaggccgacatcaaaatctgggttttgactggagacaagaaagagacagctgaaaacatcggatttgcctgcgagcttctgactgaagacacgactatatgctatggtgaggacatcaactcacttctgcacgcccggatggagaaccagagaaatcggggcggagtgtacgcaaagttcgcacctcctgtgcaggagtccttcttcccaccgggaggcaaccgagccttgattatcactggatcgtggctgaatgagatcctgttggaaaagaaaacaaagcgcaataaaatccttaagctcaaattccctcgcaccgaagaggaacgacgtatgagaacccagagcaaacgaaggcttgaggccaaaaaagagcagcgtcaaaagaacttcgtggacctcgcatgcgagtgcagtgcagtgatctgctgtagagtgacccctaagcagaaagccatggtggttgaccttgtgaaacgctacaaaaaggcaattaccctggccatcggagacggggccaatgacgtgaacatgattaaaactgcccatattggagtggggatctctgggcaagaaggcatgcaagcggtgatgagcagcgactactcttttgctcaattccgatatctgcaaagattactgttggtgcatgggaggtggtcctatattagaatgtgcaagtttctacgctactttttctacaagaacttcgccttcacactcgtccacttttggtatagtttcttcaacggctacagcgctcaaacagcctatgaagattggttcataactctgtacaacgttctgtatacaagcctccctgtattgctgatgggattgctcgaccaagatgtttcagataagctttctctccgatttccaggactgtacattgtgggtcagcgagacctgcttttcaattataaaagattttttgtctcactgctgcatggagttctgaccagcatgatcttgttcttcatacccctgggggcgtatctgcagactgttggacaggacggcgaggcccctagcgattaccagtcattcgctgtaacgatcgcaagtgctctggtgatcaccgtcaactttcagataggcctcgatacatcttactggaccttcgtcaacgcattctcaattttcgggagcatagccctgtattttggtatcatgttcgactttcacagtgccgggatccatgtcctcttccccagcgctttccagtttactggaaccgcctccaacgccctgcgtcagccttacatctggcttactatcattttggccgttgctgtttgtctgctgcccgtagtcgcaatacgctttcttagcatgacaatttggccctctgagtctgacaagatacagaagcataggaagcgcttaaaggcagaggaacaatggcagaggaggcagcaggtgttccggcgcggggtgagtaccaggaggtcagcgtatgcttttagccaccaaaggggctacgccgatttaataagctcgggacgatccatcagaaaaaagcgctcacctctcgacgccatcgtggccgacgggaccgctgagtaccgcaggaccggcgacagt

SEQ ID NO: 7260 - DNA, 3753 bp, synthetic construct
  misc_feature 1..3753: note = source = /note="Description of Artificial Sequence: Synthetic coding sequence"
  source 1..3753: mol_type = other DNA
atgtccaccgaacgcgattcagagactactttcgacgaggatagccaacctaacgatgaggttgtgccctactctgacgatgagaccgaggacgaactagacgaccagggaagcgcagtggagcccgagcagaaccgggttaatagggaggctgaggagaaccgtgagccatttagaaaggagtgtacgtggcaggtgaaggcaaatgatcgcaagtatcatgagcagccccatttcatgaacaccaaattcctatgcattaaggaaagcaaatatgccaataatgcgattaagacttataaatataatgcattcaccttcattcccatgaacttgtttgagcagtttaagagagccgcaaatttgtacttcctcgcgctgctaatccttcaggccgtgcctcagatttccacactggcctggtacactacactggttccattgctggtagtcctcggtgtcaccgcaataaaggatctggtcgatgatgtggcacggcacaagatggacaaagagatcaataataggacctgtgaggtcatcaaagatggacggttcaaagtggccaagtggaaggagatacaggtgggagacgtgatccgcttgaagaaaaatgattttgtgcctgcagacatcctactgctcagcagctccgaaccaaactctctgtgctatgttgaaacggccgaactcgacggcgaaacaaaccttaaatttaaaatgtctctggagatcaccgatcaatatcttcagagggaggatactcttgccacatttgacggcttcatcgagtgcgaggagcctaacaataggctggacaaattcaccggaaccctattttggcgcaatacttcatttcccctcgacgcagataagatcctgctaaggggctgcgttatcaggaataccgatttttgtcacgggctggtgatcttcgccggagctgatactaagattatgaagaacagtggcaagactagattcaagcgaacaaagattgactacctgatgaactatatggtttacactatttttgttgtcctcattctcctgtctgccggattggctatcgggcacgcttactgggaagctcaggtcggcaactctagctggtatctgtatgatggtgaagacgatacaccatcctaccgagggttcctgattttttggggatatattattgtgctgaacaccatggtgccaatttcactgtacgtgtctgtggaagtgattcgactgggccagagccacttcattaactgggatctgcaaatgtactacgctgaaaaggacacacctgctaaggctagaacgactacactgaatgagcagctgggtcagatccactacattttctcggataaaaccggaactttgactcaaaatataatgacatttaagaagtgttgcataaacgggcaaatttacggcgatcacagggatgctagtcagcataatcacaacaagatagagcaggtggatttttcgtggaatacttatgcggatggaaaactggcattctatgatcattatctgattgagcagatccagtctggtaaggagccggaggtgcgacagtttttttttctgctggctgtgtgccacacagttatggtggaccgcactgacgggcagctcaattatcaggccgcctcccccgatgagggagccctcgtcaacgcagcacggaacttcggctttgcctttctggcccggacccagaatactattaccatctccgagctcggtacggagcggacgtacaatgtcctggccattctcgattttaactccgatcgcaagcggatgagtattattgtaagaactcctgagggtaatattaaactgtattgtaaaggggccgacaccgtgatatacgaacgccttcaccgcatgaacccaaccaagcaagaaacccaagacgcccttgacattttcgccaatgaaacgctgagaaccctgtgcttgtgttataaagagattgaggaaaaagaatttacagaatggaataaaaaatttatggcagcctccgtggcttccacgaacagagacgaagccctagataaagtatatgaggagatcgagaaagatcttattctcttgggcgctactgccattgaagacaagctgcaggatggagtcccagagacaatttctaagctcgccaaagcagacatcaaaatctgggttctcacaggcgacaagaaggagacggcagaaaacatcggttttgcatgtgaactgctgacggaggatactacaatctgttatggtgaggacattaatagcctgctacacgcaaggatggagaaccagcgcaaccggggaggtgtctacgctaagtttgctccaccagtgcaggagtcttttttcccacctggaggtaaccgcgccttaatcatcaccggatcctggttgaatgagattttgctggagaagaagactaaaaggaataaaatactgaagctgaagttcccaaggactgaggaggagagacgcatgcggacccaaagcaaacgaaggctggaggctaagaaagagcaaagacagaaaaattttgtggatttggcttgtgaatgctccgccgtgatttgctgtagagttacacctaaacaaaaggcaatggttgtcgatctagtgaagcgatacaagaaagccatcactttggctatcggtgatggggccaatgatgtaaatatgatcaagactgcccacattggcgtgggtatctccggccaggagggcatgcaggctgtgatgagctctgactattccttcgcccagttcagatacctgcagcggctgctactggtgcatggtcgctggagctacatcagaatgtgtaaattcctccgctactttttctataaaaatttcgcatttaccttagtccatttttggtattccttcttcaatggatacagtgcccagaccgcatatgaggattggtttatcactttgtataacgtactgtatacatcactacccgtattgttgatggggttgcttgaccaggacgtgtctgataagctttcactaagatttcctggcttgtatatcgtcggtcagcgggacctgttattcaactataagagattttttgtgtctctcttgcatggggtccttacctctatgattttgttcttcattcccctgggggcttatttgcaaaccgtcggccaggatggagaagccccctccgattaccagtccttcgctgttaccatcgcctctgcactggttatcaccgtaaattttcagatcgggctcgacacctcttactggacgtttgtgaacgcttttagtatcttcggatcgattgccctgtacttcggaatcatgtttgactttcactccgccggcattcatgttctttttccaagcgctttccaatttacgggcacagctagtaacgccctaagacagccttatatttggcttactatcatactggcagtagctgtgtgcctgctgccagtcgttgcgattagatttctgagtatgacaatttggcccagcgaaagcgacaagattcaaaaacaccgaaagaggctgaaggcggaggaacagtggcagaggcgtcagcaggtctttcgccgcggggtgtcgacacgaagatctgcctacgcatttagccaccagcgcggttacgcagatttgatctcttcagggagatcaattaggaagaagcggagtcctttggatgccattgtcgctgatggtactgccgagtaccgccgcactggcgattct

SEQ ID NO: 7261 - DNA, 3753 bp, synthetic construct
  misc_feature 1..3753: note = source = /note="Description of Artificial Sequence: Synthetic coding sequence"
  source 1..3753: mol_type = other DNA
atgagcactgagagggattcagagacgacattcgatgaagactcgcaacccaatgacgaggttgtgccgtactccgacgacgaaaccgaggacgagctggatgaccagggctctgctgtggaacccgaacagaatcgcgtaaaccgcgaggccgaggagaatagagaaccttttagaaaagagtgtacctggcaggtgaaggctaatgaccgaaaataccacgaacaaccccatttcatgaacacaaaatttctttgcattaaggaatccaaatacgccaataatgccatcaagacctacaaatataatgcattcaccttcataccgatgaacctatttgaacagtttaaaagggcagccaatctgtattttctggctcttttgattctccaagctgttcctcaaatttcaactttggcttggtataccacgctggtgcctctcctggtcgtgctgggggtgaccgccatcaaagacttggtggacgacgtggctcgacacaagatggataaggaaatcaacaacaggacatgtgaggttatcaaagacggccgatttaaagtggcgaaatggaaggagatccaagtgggggacgtgatacggctcaagaagaatgacttcgtgcccgccgatatactgctcctaagctcctctgaacccaacagcttatgctatgtcgaaaccgcggaattggacggcgagacaaatttgaagttcaaaatgtcccttgaaattaccgaccagtatctgcagagagaagacaccctggccacttttgacggcttcatcgaatgcgaagagccgaacaaccgccttgataagtttactggcactttgttctggcgaaataccagcttcccactggacgcggataaaatacttctaaggggatgcgtgatacgaaacacagatttctgtcacggactagtaattttcgccggggctgataccaagatcatgaagaactccggaaagacacgatttaaacggactaaaattgactatcttatgaactacatggtgtacacaatctttgtcgtgttaatcctcttgtcagcaggcctggccatcggtcacgcgtattgggaggcacaggttggtaactcatcttggtatctgtacgatggtgaggacgacactccctcctataggggattcttgatcttctgggggtatatcattgttttaaacaccatggtgccaatcagtctatacgtgagcgtggaagtgatccgactgggccagagccatttcatcaactgggatttgcagatgtactatgcggaaaaagacacaccagcaaaggctcgaaccactaccttgaatgagcagcttggacaaatacattacatcttttcagacaagaccggtaccctgacccaaaacataatgacatttaagaagtgttgtattaatggccagatctacggagaccatcgggacgcttcacagcacaatcataataagattgagcaagtggattttagttggaatacatatgccgacgggaagttggcattctacgaccactatctgatcgaacaaatccagagcgggaaggaacccgaggttcgacagtttttttttttactagccgtgtgccacaccgtgatggtcgacaggactgatggacaactgaattatcaggctgcatctccagatgagggtgctctagtcaacgcagctcggaactttggcttcgcattcttggctagaacccaaaacactataactattagcgagcttggcactgaaaggacatataatgtactggccattctggattttaattctgatcggaaaaggatgtccatcattgtgagaacacccgaaggtaacataaagctctattgcaagggagctgatacagtgatttacgagagattgcatagaatgaacccgacaaagcaggaaacccaggatgccttggacatcttcgccaatgagactctgagaactctttgtctctgctataaggagatagaggaaaaggaatttaccgagtggaacaagaagtttatggccgcgtccgtagcctctaccaatagggacgaagccctagacaaggtgtatgaagaaattgagaaggatctgattctactgggcgcgacagccattgaggataagttgcaagatggtgtgcccgaaacaatttccaaactcgctaaggctgatatcaaaatctgggtcctcaccggcgacaaaaaggagacagccgagaatattggctttgcttgtgagctgctgactgaagataccaccatttgctatggcgaggacattaattcacttttgcacgcaaggatggagaatcagcgaaacagggggggagtctatgcgaaattcgctcccccggttcaggaaagtttcttccccccaggaggaaatcgtgcactgattataacaggttcttggctcaatgagatcttgctggaaaagaaaaccaagcgaaataaaatcttaaaactcaagttcccgagaaccgaagaggagcgtaggatgcgaacccagagcaaaaggcgactagaagccaagaaggagcagcgacaaaagaactttgtcgatctggcttgtgagtgtagcgccgttatttgttgccgagtgactccgaaacaaaaagccatggtggtcgatctcgtcaagcgttacaagaaggccattaccttagcaattggggacggcgcgaacgatgtaaatatgatcaagaccgcccatataggcgtaggcatcagtgggcaggaggggatgcaagccgtgatgagctcggattactccttcgcacaatttagatacctccagcgactgctgttagtacacggcagatggagttacatcagaatgtgtaaatttttgcgatactttttttacaaaaatttcgcattcacgttagtacacttctggtactctttctttaacggatacagcgcacagaccgcctacgaagattggttcatcactctgtacaatgttctgtatacatcactccctgtgctgttaatgggcttacttgatcaggatgtgtccgataaactgagccttcggttccctggtttgtatatcgtcggccagagggatttattgtttaactacaagcgattcttcgtttccctcttgcatggagtccttacaagcatgatcctgttctttattcctttgggcgcctacctgcaaacagtcgggcaggatggagaggcgccaagtgactaccagtcttttgcagtgaccattgcctctgctctcgtgatcacagtgaacttccagattggtctagacactagctactggaccttcgtaaacgctttcagcattttcggttcaatagccttgtactttggaatcatgttcgactttcatagtgctggtatccacgtcctgttcccgtctgcgtttcagtttaccggtactgcatctaacgcacttaggcagccatatatatggttaactatcatcctggccgtggctgtttgcctcctgcccgttgtcgcaatccgattcctctctatgactatttggccatctgaaagtgataagatccagaaacatcgaaagagactcaaggcggaagaacagtggcagcgaagacagcaggtatttcgtagaggtgtgagcactcgacgatcagcttatgctttcagccatcagcgggggtacgcagatctaattagttcaggaaggtccatcaggaaaaaacgatcccctctggatgcaatcgtggccgatggcactgctgagtaccgaaggaccggcgactcc

SEQ ID NO: 7262 - DNA, 3753 bp, synthetic construct
  misc_feature 1..3753: note = source = /note="Description of Artificial Sequence: Synthetic coding sequence"
  source 1..3753: mol_type = other DNA
atgagcactgagagggattccgaaactacctttgatgaagattcgcagcctaatgacgaagttgtcccatacagcgatgatgaaacggaggatgagcttgacgatcaaggaagcgcagtggaaccagagcagaacagagtgaatagagaagcagaagaaaatcgcgaacctttcagaaaagaatgtacttggcaagtcaaggctaatgaccgcaagtaccatgaacaacctcactttatgaacactaagttcctgtgtattaaggagtcgaagtacgcaaacaatgcaattaagacgtacaagtacaacgcttttaccttcattccaatgaatctttttgagcagtttaagcgggccgcaaatttgtactttcttgcgctgcttatcctgcaagcagtccctcaaatatcaactcttgcctggtacaccaccctggtcccactgcttgttgttctcggcgttaccgccatcaaagacctggtcgacgatgtggcaaggcataagatggataaagagatcaataaccgtacctgtgaagtgattaaagatggtcggttcaaggtggcaaagtggaaggagattcaggtgggagacgtcatccgtctgaagaagaacgactttgtccctgccgatattctgttgctgtcctcatcggagccaaactcgttgtgttacgtggaaactgcagagctggatggcgagactaacctgaagtttaagatgtcgctggaaattactgaccaatacctccaacgtgaagataccctcgcaacgtttgacggatttatcgaatgcgaggaacctaacaaccggcttgataagtttactggtactctgttctggcggaacacctcatttccactggatgccgacaagatcctgcttaggggctgtgtgattcgtaatactgatttttgtcacggccttgtgatttttgcaggtgcagacactaagattatgaaaaacagtggaaaaactcgattcaaaagaacgaagattgactatctgatgaactacatggtgtacactatcttcgtggtgctgatcttgctgtcggcaggtctggcgatcggacatgcctactgggaagcccaggtggggaactcatcctggtacctctacgacggagaggatgacactcctagctatagagggtttctcattttctggggttacattatcgtccttaataccatggtgccgatttcgctgtacgtctccgtggaagtgatccggctggggcaatcgcatttcatcaactgggatctgcaaatgtactacgcagaaaaggataccccagccaaagcacgaactaccacgctgaatgaacaactgggacagattcactacatattctcggataagacgggtactcttactcagaacatcatgactttcaaaaagtgttgtattaacggtcaaatctacggagatcatagggatgcatcgcagcacaatcataacaagattgaacaggtcgatttctcgtggaacacgtacgccgatggtaagctcgcgttctatgatcactaccttatcgaacagattcagagcgggaaggagccggaagtgcggcagtttttctttctcttggcagtttgccatactgtcatggtcgataggaccgacggacagctcaattaccaagcagcatccccagacgaaggggcactggtgaatgcagcacgaaatttcggttttgcgtttttggctcggactcagaacaccataactatctcggaactcggaactgaaagaacctacaatgtgctggcaattctcgatttcaatagcgatcggaagagaatgtcaattatcgtgcgcactcctgagggaaatatcaagctgtactgcaagggtgcagatactgtgatctacgagcgccttcatagaatgaacccgaccaagcaagagactcaagatgcattggacatctttgccaacgaaactctcaggactctgtgcctttgttacaaggaaattgaagaaaaggaattcaccgagtggaataagaagttcatggcagcctcggttgcgtccactaacagagatgaggcgctggataaagtgtacgaagaaattgaaaaggacctgattctgctgggagcaacggccatcgaagataagctccaggatggagtcccagaaaccattagcaaacttgctaaagcagacattaagatttgggtccttaccggtgataagaaagagactgctgaaaacattgggttcgcctgcgagcttctgacggaggataccaccatttgctacggagaggatatcaactcacttctgcacgctcgcatggaaaatcaaaggaaccgaggcggggtgtacgcaaagttcgcacctccagtgcaagaatcgttttttcctcctggtggaaatcgagccttgattatcactggctcctggctgaacgagattctgctggagaaaaagaccaagcggaacaagattctgaagctcaaatttccccgcaccgaagaagagaggagaatgcggactcagtccaagagacgacttgaagccaagaaggaacaacgacagaagaactttgtggatctggcatgtgaatgtagcgccgtgatatgctgcagagtcactcctaagcaaaaggcaatggtcgtcgaccttgtcaaaaggtacaagaaagcaatcactcttgcgatcggtgacggggcaaacgatgtgaatatgattaagaccgcccatatcggagtgggaatctccggacaggaggggatgcaggcagtcatgtcctcagattactcgttcgcgcaatttcgttatcttcagcgccttctgcttgtgcacggaagatggtcatacatcaggatgtgtaagtttctgcgctactttttctataagaactttgcatttacgctggtccacttttggtactccttcttcaatggttactccgcacaaactgcatatgaggattggtttatcactctttacaacgtcctgtatacctcccttccagtcctgctcatgggcctccttgatcaggacgtcagtgacaagctgagtcttaggttcccaggactgtacatcgtgggacaacgggacctgctgtttaactacaaaaggttttttgtgagcctgctgcacggcgtccttaccagcatgattctgttcttcattccgctcggtgcctaccttcagaccgtgggccaggacggggaagccccatcggactaccaatcctttgcagtcaccattgcgtcagccttggtgattactgtgaacttccaaattggtcttgacacttcgtactggacgttcgtgaatgcattttccatatttggatcgatcgcgctctactttgggattatgtttgacttccactccgctggcattcatgtgctctttccatctgcattccaatttaccgggactgcaagcaacgcactgaggcaaccatacatctggctgactataatcttggcggtcgcggtgtgcctcctgcccgtggtggcaataaggtttctgagcatgactatttggccctcagagtccgataagatccaaaaacatcgtaaacggctcaaagcagaagaacagtggcagcgcagacagcaagtgtttcgacggggcgtttcaacgagacgatccgcatacgcattttcacatcaacggggctacgcagacctgatcagctcgggaaggagcatacggaaaaagaggtcgccccttgatgccatcgtggccgatggaactgcagagtaccggcgtaccggggactcg

SEQ ID NO: 7263 - DNA, 3753 bp, synthetic construct
  misc_feature 1..3753: note = source = /note="Description of Artificial Sequence: Synthetic coding sequence"
  source 1..3753: mol_type = other DNA
atgagcactgagagagactccgaaactacatttgacgaggatagtcagcccaatgacgaagtagtgccttacagtgacgacgagaccgaggatgagctggatgaccagggatctgcggtggagcccgaacaaaatcgagtaaatagagaggctgaggagaatagagagccatttcggaaagagtgcacttggcaggtcaaggctaacgacagaaagtatcatgaacagcctcattttatgaacactaagttcctgtgcataaaggagtcaaaatatgcaaataatgcaattaagacgtacaagtacaacgcgttcacatttattcccatgaacctattcgagcagttcaaacgcgccgccaacctttatttcctggctctcctgattctgcaggctgttcctcagatctcaacgttggcgtggtacactacgttggtcccactgctggttgtactcggcgttacggccataaaggatctggtggatgacgtagcaagacacaaaatggacaaggagataaacaaccgtacttgtgaggtgattaaagatggtagatttaaggttgccaagtggaaggaaatccaagtgggtgatgttattaggcttaagaagaacgattttgtccccgctgatatcctgctcctaagctcatccgagccaaactccctttgctacgtggagaccgccgagctggacggtgagacgaacttgaagttcaaaatgtctttggaaatcacagaccagtacttgcagcgagaagacaccttggcaaccttcgacggattcattgagtgcgaggagcccaacaatcgcttagacaaattcacaggaacgctgttctggcgcaatacctcttttcccctggatgcagacaaaattctgttgcgaggctgcgtgatccgaaacaccgatttctgtcacggcctggtcatatttgctggcgccgacacaaagatcatgaaaaatagcggcaagactaggtttaagcggactaaaattgactatctgatgaactatatggtatacaccatcttcgtcgtattgatactattatcagccggcctggccatcggtcatgcctattgggaagcacaggtcggcaattcctcctggtacctgtacgacggggaggatgataccccaagttatcggggtttcctgatcttctggggttacatcatagtccttaacaccatggtgcccatctccttgtacgtcagcgtagaggttatccgcttgggccagtctcatttcatcaactgggacctgcaaatgtattacgccgagaaagataccccagctaaggcacgaacaactaccttaaacgagcagctaggccaaatacactacattttcagcgataagactggcactctgacccaaaatattatgactttcaagaagtgttgtatcaatggacagatttacggagaccaccgtgatgcatcccagcataaccacaataagatcgaacaggtagatttctcttggaacacatatgccgatggtaagctggctttttatgaccactacctgatcgaacagatccagtctggcaaggaaccagaggtgcggcagtttttcttcctgctggccgtatgtcatactgtaatggtggatcggactgatgggcagttgaattaccaagcagcatccccggatgagggtgccctggtgaacgccgcgagaaactttggcttcgcctttctcgctcgtacccagaacacgatcaccatctctgagctgggcacagaacgtacttacaatgtgctcgctattctcgacttcaatagtgatcggaaaaggatgagcatcatcgtacgaacacccgaagggaacatcaagctctactgtaagggggcagacaccgtgatttatgagcgcctccacaggatgaatcccactaaacaagagacccaggatgctctggacatcttcgcgaatgaaactctgcggaccctgtgcctttgttacaaggagatagaagaaaaagagtttacagaatggaataaaaagttcatggcggcctccgtagcttctacaaaccgagacgaagcattggataaggtgtatgaggaaatcgaaaaggatctgatcctgctcggcgccacagctattgaagataagttgcaagacggtgtgcccgagacaatcagcaaactagcgaaggccgacattaaaatctgggtgctcacaggagacaaaaaagagactgccgagaatattggcttcgcgtgtgagttactaacggaggacaccactatatgttatggggaagacatcaactctctgctgcacgcacgcatggagaatcagagaaatagaggcggtgtgtatgcaaaattcgccccccctgtgcaggaaagctttttcccacctgggggcaatcgtgcactaatcattacaggaagctggctgaatgagattcttcttgaaaagaagacaaagcgcaacaagattctgaagctcaaattccccagaacagaggaagaacgaagaatgaggactcagtcaaagcgacggctggaggctaagaaggaacagcggcagaaaaacttcgtagacctggcctgtgaatgcagtgctgtgatctgctgtagggtgacacctaagcaaaaggctatggtagtggatctagttaaacggtacaaaaaagctatcacccttgcgattggtgatggcgccaatgacgtgaacatgatcaagacagcccacatcggggtgggaatctccggccaagaaggcatgcaggcagtgatgtcttctgactactcgttcgcccagttccgctacctgcagagattactgctggtgcacggtagatggagctacattcgcatgtgcaagtttcttaggtacttcttctacaaaaacttcgcattcaccctggtgcatttctggtacagcttctttaatggatattccgctcagacggcatacgaagattggttcattacgctgtacaacgtgttgtacactagccttcctgtactgttaatgggtctcctggatcaggacgtgtctgacaaactgtccttgaggttccccggtctatacatcgttggacagagagatttactattcaactataagaggttttttgtgtcgttacttcatggtgtgttgacttccatgatattgtttttcattcctcttggggcctacctgcaaaccgttggccaagacggcgaggcacccagtgactaccaaagcttcgctgttacaatcgcgtcggccctggttattaccgttaattttcagatcggcctagatacttcatactggaccttcgtcaatgccttctctattttcggctctattgccctctacttcggcataatgttcgatttccacagcgctggaatccacgtactgtttccttccgcgtttcaattcaccggcacggcctcaaatgcccttcggcaaccatacatttggctgactattatcctagctgtagctgtctgtcttctgcctgtggtagcgattcgttttctctccatgactatttggccctccgaatcagacaagatccagaagcataggaaaagacttaaagcagaggagcagtggcagcgaagacagcaagtgttcagaagaggagtctccacaaggagaagtgcctacgccttcagtcatcagcgtgggtacgcggacctaatatccagcggccgttccatacggaaaaagaggtcacccctagatgcgatcgtggcggatggcactgctgagtatcggaggactggcgattcc

SEQ ID NO: 7264 - DNA, 3753 bp, synthetic construct
  misc_feature 1..3753: note = source = /note="Description of Artificial Sequence: Synthetic coding sequence"
  source 1..3753: mol_type = other DNA
atgagcactgagcgcgacagcgagaccacgttcgacgaggattcccagccgaatgatgaagtcgtgccatattccgacgatgaaacggaagacgagctggatgaccaggggagcgccgtggaaccagaacaaaaccgcgtcaatcgcgaggcagaggagaaccgggagccctttcgcaaagagtgtacatggcaggtcaaagctaatgatcggaaataccatgaacagccgcactttatgaatactaaattcctgtgtatcaaggagagcaagtacgcgaataacgcaatcaagacctataagtataatgccttcaccttcatcccaatgaacctgtttgaacagttcaagcgcgctgccaacctgtacttcctggctctgctcattctgcaagcagttccgcagatatccaccctggcgtggtacaccaccctggtgccactcttggttgtactgggcgtgaccgccatcaaggatctggtcgatgatgttgcaagacacaagatggataaagaaattaataataggacgtgtgaggtgatcaaggatggacgattcaaggtggcaaagtggaaggaaatccaagtgggcgatgtgatccgcctgaagaagaacgactttgtgccggccgacatcctgctgctgagctcatccgaaccaaacagtttgtgctacgtagagacagctgagttagatggcgagaccaaccttaagtttaagatgagcctggaaatcaccgatcaatacctgcagcgcgaggacactctggcaacttttgatggcttcatcgagtgtgaggaaccaaataatcgtttggacaaatttaccggtaccctgttctggcgcaatacgtccttcccgctggacgcggataagatcctgctgcgcggctgtgtcatccgtaataccgatttctgccacggtctggtcatcttcgcgggcgctgatacgaagatcatgaagaatagtgggaagactcgatttaaacgcacgaagatcgactacctgatgaattacatggtctacactatctttgtggtgctgattttgttgtctgccggcctggcgattggtcacgcatactgggaagcacaggttggcaacagctcgtggtacctgtatgatggcgaggacgacactccgtcatataggggtttcctgatcttttgggggtacataattgttctgaacacaatggtcccgatctcactgtacgtaagcgttgaggttatcaggctgggccagagccactttatcaactgggatctgcagatgtactatgccgagaaggacaccccagcaaaggcccggactacaaccctcaatgaacagctgggccagattcactacattttttccgacaaaaccggtaccctcacccaaaacattatgacattcaaaaaatgctgcattaatggtcagatctatggtgaccaccgtgacgcctctcagcataatcataataagattgaacaggtagacttctcttggaacacctacgcggatggtaagctcgccttttatgatcactacctgatcgagcagatccaaagcggaaaggaacctgaagtccgacagttcttttttttgctggctgtttgccatacggtgatggtggaccgcacggacggtcagcttaactaccaagcagcgagcccggatgagggtgctctggtcaatgctgcgaggaattttgggtttgccttcctggcccgtactcagaacacgatcaccattagcgaactgggtaccgaacgtacctacaacgtcctggcgatcctcgacttcaattcagatcgtaaacgtatgtctattattgtccgcacccctgagggcaacatcaaactgtattgtaagggtgcagacacggtcatctacgagcgcctgcaccgcatgaaccctaccaagcaagaaacgcaggacgctctggacattttcgcaaacgaaactctgaggaccctgtgcctatgttataaagaaattgaggagaaggaattcaccgaatggaacaaaaaatttatggctgctagcgtggcaagcaccaatcgggatgaggcgcttgacaaggtttatgaagaaatcgaaaaggacctgatcctgctgggtgcaaccgccatagaggataagctgcaggacggtgtgccggagacgattagtaaactggccaaagcggatattaaaatctgggttctcaccggggataaaaaggaaaccgctgagaacatcggcttcgcctgcgagttgctgacggaggacaccactatttgctatggtgaagacatcaatagcctgctgcatgcgaggatggagaatcagcggaatcgcggtggcgtgtacgccaagttcgctccaccagtccaggagtccttctttccaccgggggggaaccgagcgttgattatcaccggcagctggctgaacgagatcctcctggaaaaaaaaacgaagcgtaacaaaatcctgaaactgaagtttccacgcaccgaggaggaaaggcgcatgcgcacacagtccaagcgtaggttggaggctaagaaagaacaacgccagaagaactttgttgatctggcttgtgagtgcagcgcagttatttgctgtagggtcacgcctaagcaaaaggccatggttgtggacctggtaaagcgctataaaaaagcaattaccctggccatcggtgacggcgcaaacgatgtcaacatgattaaaacggcacatatcggcgttggcatttcagggcaggaaggaatgcaagcggtcatgtccagcgattactcttttgcacaatttcgctacttacagaggctactgcttgtgcatgggcgctggagctacatccgcatgtgtaagttcctgcggtattttttttacaaaaactttgctttcactctggtccacttttggtactcattctttaatggttatagcgcgcagacagcatacgaggattggttcattaccctctataacgtcctgtacacatctctgccagtgctgctgatgggcctgctggatcaggacgttagcgacaaactgtcgcttcgcttcccgggactgtatatcgtcggtcaaagagatctgctgttcaactataagcgcttttttgtgtccctattgcacggtgtgctgactagcatgatcctgtttttcatcccgctcggggcatacctgcagacagtggggcaggatggtgaggccccgtctgactaccagtcgtttgcagtcaccattgctagtgcccttgtgatcacggttaatttccaaatcggtttggacaccagctactggacatttgttaacgctttcagcatctttggaagcatcgccctctacttcggcattatgtttgattttcacagtgcgggcatccatgttctgttcccgagtgcctttcaatttactgggaccgcgtctaacgcgttacgccaaccatacatttggcttacaattatcctggcggttgctgtctgcttgctgccggtggtggctatacggttcttgtccatgactatatggcctagcgagagcgacaaaatccagaaacataggaaacggctgaaagcagaggaacagtggcagcgccgccagcaggtgttcagacgcggtgttagtacgcgccggagcgcatacgccttttctcaccagcgcggttatgcggatctgatcagcagcgggcgcagcattcgcaagaaacgatccccactggatgcgatcgtggccgacggaacggccgagtacagaagaacgggagatagc

SEQ ID NO: 7265 - DNA, 3753 bp, synthetic construct
  misc_feature 1..3753: note = source = /note="Description of Artificial Sequence: Synthetic coding sequence"
  source 1..3753: mol_type = other DNA
atgagcaccgagcgggacagcgagaccacattcgacgaggacagccagcctaatgacgaggtggtcccatactccgacgatgaaacagaagacgagctggacgaccagggctccgccgtggagccagagcaaaatcgtgttaaccgcgaagccgaagaaaatagagaaccgtttaggaaggagtgcacatggcaggtaaaggccaacgatcgaaagtaccacgagcagccacatttcatgaacaccaagttcctgtgcatcaaggagtccaaatatgccaataacgcaatcaagacctataaatataatgctttcacatttatcccgatgaacctctttgagcagtttaagcgagcggccaatttgtactttctggctctgctgattcttcaggcagtaccgcagatttcaaccttggcctggtataccacactcgttccattgctggtggtactaggcgtgacagctattaaagacttggtcgatgacgtggcgaggcataaaatggacaaggaaatcaacaaccgtacctgcgaggtgattaaagacggtcggtttaaggtggccaaatggaaggaaatccaggtgggagatgttatccgcctgaagaaaaatgattttgtccctgccgatatactgcttctgtcttcaagcgagcccaacagcttgtgctacgttgaaaccgctgagcttgatggagaaactaacctgaagttcaagatgagtctggagattaccgaccagtacctccagcgcgaggatactctggcaaccttcgatggctttatagagtgtgaggagcccaataaccgcctggataagttcacgggaactctgttctggcgaaatactagctttccactggacgctgataagatactgctcagaggctgcgtgatcaggaacactgatttctgtcatgggctggttatatttgctggtgctgacaccaagatcatgaagaattcagggaagacgcgatttaaacgcaccaaaattgactatctaatgaactacatggtctatacgatttttgtagttctgatactcctttcggccgggctcgcaataggacacgcatattgggaagcccaagttgggaattctagctggtatctctatgatggcgaggacgacaccccctcttaccggggatttttaatcttttggggttatattatagtcttgaatacaatggttcctatctctctgtatgtgtcggtggaggttattaggcttgggcagagtcacttcatcaactgggatctccaaatgtattacgctgaaaaagatactcccgcaaaagccagaaccaccacgctgaatgagcagctgggtcagatacactatatctttagtgataagaccggtacattaacccagaatatcatgacatttaagaagtgctgtatcaatggacagatctatggtgaccatagagacgcgtcgcaacacaaccataacaaaattgagcaagttgactttagctggaatacctatgctgatggaaagttggcgttttatgatcactacttaatagaacagattcagtctgggaaggagccggaagttcgtcagttctttttcctgttggctgtatgtcatacagtgatggtggatagaacagacgggcagctcaattaccaagcagcttcacccgatgagggtgcgctcgtgaatgccgcccggaactttggtttcgccttcctggcccgcacacagaacacaattactattagtgaactggggacagagcgaacatataatgtgttggccattctcgactttaatagcgaccgaaaaaggatgagcatcatcgtgaggactccggaggggaatatcaaactgtactgcaaaggagccgataccgtgatatatgaacgccttcataggatgaatccgactaagcaggagactcaagatgctctggatatatttgcaaacgaaaccctacgaaccttatgcttgtgttataaggagattgaggaaaaagagttcaccgagtggaacaagaagttcatggctgcttctgttgcatcaactaatagagatgaagccctggacaaagtatacgaggagatcgagaaagatctgattctgctgggggccacagcaatagaggacaagctacaggacggcgtgcccgagaccatctccaagcttgctaaggctgatatcaaaatctgggtgcttacaggggacaagaaagagacagcggagaatatcgggtttgcctgcgagctgctgacagaggacactactatttgctacggggaagatatcaacagtttgttgcatgctcggatggaaaatcagaggaatcggggcggggtatatgcaaagttcgcacctccagtacaagagagcttcttccccccgggaggcaaccgagctctgatcatcaccgggtcttggttgaacgaaattctcctagagaaaaaaacaaagcggaataagatactaaaacttaagttccccagaaccgaagaagagcgcaggatgcgaactcagtcgaagaggaggttagaggcaaagaaggaacagcgccaaaagaattttgtcgatctggcctgtgaatgttctgccgtaatctgctgtagagtaaccccgaagcaaaaagcgatggtcgtggacctggtaaaacgctataagaaagccatcaccctggcaatcggcgacggagctaacgatgtgaacatgattaaaacagcccacatcggcgtcggtatttccggccaagaaggaatgcaggccgtgatgtcttcggattactcatttgcgcaattccgttaccttcagaggcttttgcttgtgcatggacggtggtcctatatccggatgtgcaagttcctgcgctactttttctacaagaacttcgcatttacactcgtgcacttttggtactctttttttaatgggtacagcgcgcagactgcgtacgaggactggtttataacactgtacaatgttctctacaccagcttgccagtgttgctcatggggctgttggaccaggatgtctccgacaaactgtctctccgctttccaggcctctacattgttggccagcgcgacctgttgtttaactacaaacgctttttcgtgtccttgttacacggggtactgacctccatgattttgtttttcatcccactcggagcatacctccagacagtcgggcaagacggcgaggctcccagcgattaccagagcttcgcagtgaccatcgcctccgctctggtgattacggtcaactttcaaattgggctcgacactagctactggacctttgtcaacgccttcagtatctttggcagcatcgcactctactttggcattatgttcgactttcactccgccgggattcacgttctgtttccctcggcattccagttcaccggcacagctagcaacgctcttagacaaccctacatctggctcaccatcatcctcgcagtagccgtttgtctgctacctgtagttgctattcggtttctgagtatgacaatttggccttcagagtccgacaaaattcagaaacatcgcaagcggctaaaagccgaggaacagtggcaacggcggcagcaggtgtttcggaggggagtcagcactcggcgctcagcttatgcctttagtcaccagagaggatatgccgaccttataagctccggcagaagtattagaaagaaacggagtcccttggatgctatcgttgccgacgggaccgccgaatacaggagaaccggggattcc

SEQ ID NO: 7266 - DNA, 3753 bp, synthetic construct
  misc_feature 1..3753: note = source = /note="Description of Artificial Sequence: Synthetic coding sequence"
  source 1..3753: mol_type = other DNA
atgagcacagaacgcgatagtgagacaacctttgatgaggatagccagcccaacgatgaggtggtcccttactcggatgatgagacagaggacgaactggacgaccagggaagtgccgttgagccagagcagaaccgcgttaatagagaggcggaagagaatcgcgagcctttccggaaggaatgtacttggcaggtgaaggccaatgacaggaaataccacgagcagcctcattttatgaatacaaagttcctgtgcattaaagaaagcaagtacgccaacaacgctattaagacctacaaatacaacgctttcacctttataccaatgaacctgttcgaacagtttaaaagggccgccaatctgtactttttagccttgctgattttacaagccgtacctcagatctcaaccttggcttggtacaccaccctggtccctcttctggtggtgcttggggtgactgcaatcaaagatctcgtcgatgatgtggcaaggcacaagatggacaaagaaatcaacaaccgcacttgcgaggttatcaaagatggtagatttaaggtcgcaaagtggaaggagattcaggttggggatgtaattagactgaagaagaacgatttcgtgcccgccgacattctgttgctgtccagcagtgagccgaactccctttgttacgtcgaaactgctgagttggatggagagaccaatctcaagttcaaaatgagcctcgagattaccgatcagtacctgcagagggaggatactttggctaccttcgatgggttcatagaatgcgaagagccaaataacaggttggataagtttactggcacactgttctggaggaacacttcgttcccacttgacgcggataaaatacttcttcgtggatgtgtgataaggaacacagatttttgccacggactggtaatatttgcaggagcggacacgaaaatcatgaaaaacagcggcaagactagattcaaaaggaccaagatcgattacttgatgaattatatggtttataccattttcgtggtgctaatactgcttagtgcaggtctggccatcgggcacgcatactgggaagctcaggtcggtaacagcagttggtacctgtacgatggggaggatgacacaccatcttaccgcggattcctcatcttctgggggtacatcattgtactgaacaccatggttccaattagcctgtatgtgtccgtggaggttatccggctcgggcagtcacatttcattaactgggacctgcagatgtactatgccgagaaagatacccctgccaaagcacgcaccaccactctcaacgagcagctggggcaaatccattatatcttttccgataaaactggcaccctcacacaaaacattatgacctttaaaaagtgttgcatcaacggccagatctatggagaccatagagatgcaagtcagcataatcacaataaaattgaacaggttgactttagttggaatacatatgctgatggtaagttggcattttatgaccattatctgatagaacagatccagtccggcaaagaacctgaagtccgccagtttttctttctgctggcagtgtgtcataccgtgatggtcgaccgcactgatggacaactgaactatcaggctgctagccctgacgaaggtgcacttgtgaatgcggcaaggaatttcggctttgctttcctggcaagaacacagaacactattactatatctgagctgggcaccgaacggacgtacaatgtgctggccattcttgacttcaacagcgataggaaaaggatgtctatcattgttaggactccagagggaaacatcaagctgtactgcaagggcgccgacactgtgatttacgagcgacttcaccgtatgaaccctaccaagcaggaaactcaggatgccttggatatctttgcaaacgagacgctgagaacactgtgcctttgctacaaagaaatcgaggaaaaagagttcaccgaatggaacaagaaattcatggctgcctctgtcgcgagcactaaccgagatgaagcgctggataaagtctacgaagaaatagagaaggatttgatcttactgggtgccacagcaatagaagacaagttgcaggatggagtccccgaaactattagtaagctcgctaaagcggatattaagatctgggtccttaccggagacaagaaagagaccgctgagaacatcgggtttgcttgcgagctccttaccgaggatactactatttgctatggcgaagatattaattctctgctgcatgctagaatggaaaatcaacggaacagaggtggagtttatgctaaattcgcaccccctgtacaggagtcatttttccccccaggaggcaatagagctttaataataaccggatcatggctgaatgagatcctgcttgaaaaaaaaaccaagcggaacaaaatcttaaaactgaagtttccccgaaccgaggaggaaagaaggatgaggactcagtccaaaaggaggttggaagcaaagaaagaacaacggcagaaaaattttgtggacctggcctgcgaatgtagtgccgtgatttgttgtagagtcacacctaagcagaaagctatggtggttgacctcgtgaagaggtataagaaggcaatcacacttgccataggagatggagctaacgatgtgaatatgattaaaaccgcacacattggcgtcggcattagtggccaggagggaatgcaggccgtcatgtccagcgattattcattcgcacagttcagatatttacagaggctccttctcgtccatggcagatggagctacatccgtatgtgcaagttcctcagatatttcttctacaaaaatttcgccttcaccctcgtgcacttctggtactcttttttcaatgggtatagtgcccaaaccgcctatgaggattggtttatcacactgtacaatgtgctgtacacaagccttcccgtgttgttgatgggccttctggatcaggatgtgagtgacaagctgagcctacggtttccaggcctctatatcgtcggacagagagatctcctgtttaactacaagaggttctttgtctcccttctccacggtgtgttgaccagcatgatattgttctttattccactgggcgcatatttgcaaacagtaggacaggacggcgaggctccttccgactaccagtcttttgcggtgactatagccagcgccctcgtaatcacagtcaacttccagataggccttgatacctcttactggacctttgtcaacgctttcagcatcttcggaagcattgcactgtattttggaatcatgtttgatttccacagcgccgggatccatgttctgtttccctcggcgttccagtttacaggcactgccagcaacgccctgcgccagccgtatatttggcttactattatcctggccgtggccgtgtgcctcttgcctgttgttgcaattcgtttcctcagcatgaccatctggccctccgaatccgataagatccaaaagcaccgcaaacgccttaaggctgaagagcagtggcagcgcaggcaacaggtttttcgcagaggcgtctctacaaggaggagtgcctatgccttttctcaccagcggggctacgcggaccttataagcagcggaaggtctatcagaaaaaaaaggagcccgctggacgcaatcgtagcagatggtaccgctgagtataggcgcaccggggatagc

SEQ ID NO: 7267 - DNA, 3753 bp, synthetic construct
  misc_feature 1..3753: note = source = /note="Description of Artificial Sequence: Synthetic coding sequence"
  source 1..3753: mol_type = other DNA
atgtctaccgagagggatagcgagacaacatttgatgaggacagccaacctaacgacgaagtagtgccatatagtgatgatgaaacggaagacgagttggacgatcagggcagtgcggtcgaacctgaacagaatagggtgaatagagaagccgaggagaatcgggaacccttccgcaaagaatgcacctggcaggtcaaggcaaacgatcggaagtaccatgaacagccgcatttcatgaatacgaaatttctatgcataaaggagtccaaatacgcaaacaacgccattaagacttataaatataacgcattcacctttatccccatgaacttattcgaacaattcaaacgagccgcgaatctttatttcctcgcactgctaattttacaagctgttccacaaatttcgaccctggcttggtacactacgctcgtccctctgttagttgtgctgggggtgacggcgattaaggatctcgttgatgacgtggctaggcacaaaatggataaggaaataaacaaccggacttgcgaggtcattaaggatggcagattcaaggttgcaaagtggaaggagatccaagtgggggacgtcattcgccttaagaaaaatgatttcgtaccagctgacattctgttgctctcttcctcggagcctaatagtctttgttacgtggaaactgctgagctggacggcgaaactaatcttaagttcaagatgtcacttgagatcaccgaccagtatctgcaacgggaagacaccctggctacattcgatggttttatcgaatgcgaagagccaaacaacagacttgataagtttactgggactctgttttggaggaacacatcattcccgttagacgccgataagattctgttaaggggatgtgttatacggaatactgatttttgtcacggccttgtcatattcgctggcgcagacaccaaaatcatgaaaaattcggggaaaacccgattcaagcgaacaaaaattgactatttgatgaactacatggtgtacactatcttcgtggtgttgatcctcctgagcgcgggcttagcaattgggcatgcttattgggaggctcaggtcgggaattcttcttggtatttgtacgatggtgaagatgatacaccaagttaccggggcttcctgattttctggggctacattatagtattaaataccatggtgcctatatccctgtacgtgtcagtggaggtcatccgcctcggccagtcacactttatcaactgggatctgcagatgtactacgctgagaaagacacaccagccaaggctcgcacgaccaccttgaatgagcagctgggccaaatccattacatattctccgacaagacaggcacgctcacccagaatattatgacatttaagaagtgttgcatcaacggacaaatatatggtgatcaccgggacgcctcccaacataatcataacaaaatagaacaggtggatttttcatggaatacttacgcagatgggaaattagcgttctacgaccactacctcatcgagcagatacaaagcggaaaggagcctgaggtccgccagttcttcttcctcttagcggtttgtcacacagtgatggtggataggaccgacgggcaacttaactatcaggctgctagcccagatgaaggcgctctggtcaatgccgcccgaaacttcggcttcgcctttctcgcaagaacccagaatacaattaccatatccgagctgggaacagagagaacttacaacgtgctcgcaatcctggacttcaacagcgacagaaagcggatgtccatcatcgtgcggacgcccgagggaaatatcaagctgtattgcaaaggagccgatacggtcatctacgagcggctacaccgtatgaacccaacaaagcaggagacacaggacgcgctcgatatcttcgctaacgagacgctgcgcactctgtgcttgtgttacaaagagattgaagaaaaggaattcactgagtggaataaaaaattcatggccgcttctgtggcctcaactaatagagacgaggccctggataaggtgtatgaggaaatcgagaaggatctgatcttactcggagctaccgcgatagaagacaagctgcaagacggtgtccccgaaaccatttctaagctggctaaagcagacataaaaatttgggttttgacaggcgataaaaaggagacagcggaaaacattggttttgcttgtgagctgctgaccgaggacaccaccatatgttacggagaggacatcaattcactcttgcacgcacggatggagaatcaacgcaaccgcggaggggtctacgccaaatttgcccctccagtgcaggagagttttttccccccaggtgggaatcgagctctgatcattacaggcagttggctgaatgagatcctgttagagaaaaaaaccaagcgtaataaaatcctgaagctgaagttcccaagaacagaggaggagcgtcggatgcggacacagtccaaaaggagactagaggcaaaaaaggagcagcggcagaaaaattttgtggatctcgcatgcgagtgttccgcggtcatttgctgtagagtgacaccaaagcaaaaggctatggtggttgatttggtcaagcgttacaagaaagccatcacgctggcaattggggacggcgcaaatgatgttaacatgattaagaccgcgcatatcggcgttggaatctccgggcaggagggcatgcaggccgtgatgagctccgattattcatttgcccagttcaggtatctgcagcgcctcctcctagtgcatggtcggtggtcctacatccggatgtgcaagttcctgaggtactttttctacaagaacttcgcctttaccctagtccacttttggtattctttttttaacgggtacagcgctcagacagcttacgaggattggttcatcaccctgtacaacgtgttgtacacgagtttgcccgtgctgttgatggggttgttggaccaggacgtgtcagacaagctgtctcttcgtttccctggtctctacatcgtgggacagagagacttgttattcaattacaagcggtttttcgtgtctctactccatggagtgttaacctccatgatcctattttttattccgctaggggcttatcttcagaccgttgggcaagacggggaggctccaagcgactaccagtcatttgccgtaactatcgcatccgctcttgtgattaccgtgaactttcaaattgggctggatacatcctactggacgtttgtgaatgcgttcagtatcttcggcagcatcgctctctattttgggattatgtttgattttcactccgctggtatccatgtgctgttccctagcgcttttcaatttactggcacggcctctaacgccctgagacagccttacatctggttgactataatccttgccgtggctgtgtgcctcctgcctgtcgtcgctattcgattcctgagtatgactatctggccctcagagtctgataagattcaaaagcaccgaaagcgattaaaggctgaggagcaatggcagcggcggcaacaggtgtttaggaggggcgtgagcaccagacggtcagcctacgcattctcacaccagcgtggctacgctgatctgatcagttctgggcggtctattcgaaaaaagcggtctccactcgacgcaatcgtggctgacggaactgccgagtatcgcagaaccggggacagc

SEQ ID NO: 7268 - DNA, 3753 bp, synthetic construct
  misc_feature 1..3753: note = source = /note="Description of Artificial Sequence: Synthetic coding sequence"
  source 1..3753: mol_type = other DNA
atgagcaccgaaagggacagcgaaaccaccttcgacgaggactcgcagcccaacgacgaggtcgtcccgtactccgatgacgaaaccgaggacgagctggacgatcagggcagcgcggtggagcctgaacaaaatcgcgtcaacagagaggctgaagagaatcgggaaccttttcgcaaggaatgtacctggcaggtgaaagccaatgatcgaaagtaccatgagcagccacatttcatgaacactaagtttctttgcatcaaagaatcgaagtacgctaataacgcaatcaagacctacaagtataacgctttcacctttattccaatgaacctgttcgaacaattcaagcgcgccgcaaacctttacttcctcgcgctcctgatccttcaggccgttccacagatcagcaccttggcatggtacactaccctcgtgccgctcctggtcgtgctgggagtcaccgccatcaaggacctggtcgacgacgtggcgcgccataagatggacaaagagatcaacaacaggacttgcgaagtcatcaaggacggacgctttaaggtggcgaagtggaaggaaattcaagtgggagatgtcatcagacttaagaagaatgattttgtgccagcggatatcctgctcctctcctcaagcgagccgaattccctgtgctacgtggagactgcagagctcgatggagagacgaacctgaagttcaagatgtcacttgaaatcaccgaccagtacctgcaacgcgaagatactctggcgacgttcgacggttttatcgaatgtgaagaaccgaataaccggctcgataagtttactggaacgctcttttggcgcaacacgagcttcccactggatgccgacaagatcctcttgagaggatgcgtgatcagaaacaccgacttttgtcacgggctggtgatcttcgctggagcggacaccaaaatcatgaagaattcgggaaagacccgtttcaagcggaccaaaatcgactatctgatgaactacatggtatacactattttcgtcgttctgatcctcctgtcggccggtctggccattggccacgcctactgggaggcccaggtggggaactcgtcctggtacctttacgatggagaggatgacaccccatcgtaccgaggattcctgatcttctggggctacatcatcgtcctgaataccatggtcccgatctccctttatgtgtcagtggaagtgatccggcttgggcagtcgcacttcatcaactgggacttgcaaatgtactatgccgaaaaagatacgccggccaaggcgcgcacgaccacgctcaacgagcaactcggacaaatccactacatctttagcgacaaaactggaactctgacccaaaacatcatgactttcaagaagtgctgcatcaacggacagatctacggagatcacagagacgcatcccagcacaaccacaataagatcgagcaggtagacttcagctggaacacgtacgcggacggcaaattggctttctacgatcactacctcatcgaacagatccagtcgggcaaggaacctgaagtgcgccagttcttctttttgctggccgtctgccacactgtgatggtggatcgcaccgatgggcaactgaattaccaggccgcaagccctgacgaaggtgcactggtgaacgcagcgcggaacttcggattcgcctttctggcgaggactcaaaacactatcactatcagcgagttgggcaccgagcgaacctataatgtgttggcaatcctggactttaactcggacaggaagcggatgtcaatcatcgtgagaactccagagggcaatatcaagctctactgcaagggagcggataccgtgatctacgaacgtctccataggatgaacccgaccaagcaggagacgcaagatgccctggacatctttgcgaacgagactcttcggacgctgtgcctctgttacaaggagatcgaagaaaaggaattcaccgaatggaacaaaaagtttatggcggcctctgtcgcgtcgactaatcgcgatgaagcgctggataaggtgtacgaggaaatcgaaaaggacctgatccttctgggcgcgacggccatcgaggacaagttgcaggacggcgtcccagaaaccatcagcaagctcgccaaggcagacatcaagatctgggttctcaccggcgacaaaaaagagactgccgaaaacatcggtttcgcctgtgaactgctgaccgaggacaccaccatctgctatggagaggatatcaactcgctgctgcacgcgagaatggagaatcaacgcaaccggggcggagtgtacgcaaagttcgctccgccagtgcaggaatcattcttcccgccggggggtaacagagcgctgataatcaccgggagttggctgaacgaaatcctcctggaaaagaaaacgaaaagaaacaaaatcctcaaactgaagtttccgcgcaccgaagaggagcgccgcatgcggacgcagtcgaaaagacggctcgaagccaaaaaggagcaacgccaaaagaactttgtcgatctcgcatgtgagtgttccgcggtgatttgctgcagagtgaccccaaagcagaaagcgatggtggtcgacctggtgaagcgctacaagaaggcgattacgctcgctatcggagatggggccaacgacgtcaatatgattaagaccgcccatatcggagtcgggatctcaggacaggagggaatgcaggctgtgatgagctcggactactcgttcgcccagttcaggtatttgcagcggctgctgctggttcatggccgctggagctacatccgcatgtgcaagttcctgcggtacttcttctacaaaaactttgccttcaccctggtccatttctggtactccttcttcaacggatacagcgctcaaaccgcatacgaggactggttcattacgctctacaatgtgttgtacacctcactgcccgtgctgctgatgggcctgctcgatcaagacgtcagcgacaagctctccctgcggttccccggcctgtatatcgttggtcaacgcgacctcctgtttaactataagagattctttgtgtcacttctgcatggggtgctgactagcatgatcctcttctttatccccctcggtgcctacctgcaaactgtgggccaagatggcgaagcaccgagcgattaccagagcttcgccgtcaccatcgcgtccgcgttggtcatcaccgtcaacttccaaatcggactggacacgtcgtactggactttcgtcaacgctttcagcattttcggatcaattgcactgtacttcggaatcatgttcgattttcactcggcgggcatccacgtgctgttcccatcggccttccagttcaccgggacggcctcgaacgcgctgagacagccgtacatttggctcacgatcatcctggccgtcgctgtctgtctgctcccggtggtggcaatccggtttctgtcgatgactatctggccgtcagaatccgataagattcagaaacacaggaagcgcctgaaggcggaagagcagtggcaacggaggcagcaagtgttcagacggggggtgtccactcgtcggtccgcatacgctttctcccaccaacggggatatgccgacctcatctcgtcagggagaagcatccgcaagaagcggtcccctctcgatgcgatcgtggcggacggcactgcagaatacaggcggaccggagattcc

SEQ ID NO: 7269 - DNA, 3753 bp, synthetic construct
  misc_feature 1..3753: note = source = /note="Description of Artificial Sequence: Synthetic coding sequence"
  source 1..3753: mol_type = other DNA
atgtcaaccgagcgggactcggaaaccacctttgacgaggactcccagcctaacgacgaggtggtgccatacagcgatgacgaaaccgaggatgagctcgacgatcaaggttcggccgtcgagccagaacagaatcgcgttaaccgcgaagcagaagaaaaccgggaacctttcagaaaggaatgcacctggcaggtgaaggccaacgatcgcaagtaccacgagcagccacatttcatgaataccaaatttctgtgcatcaaagagagcaagtatgcgaacaacgctatcaaaacctacaagtacaacgcgttcaccttcattccaatgaacctgtttgagcaattcaagagagctgcaaatctgtacttcctggcactgctgatcttgcaggctgttccacagatctcaaccctggcgtggtacaccacgctggtgccgcttcttgtggtcctgggagtgaccgccattaaggacctggtcgacgatgtggcgcggcacaaaatggacaaggagatcaacaatcgcacctgcgaagtgatcaaggacggccgcttcaaagtggctaaatggaaggaaatccaggtgggcgacgtgatcagactgaagaagaatgatttcgtgccggccgatatcctgctgctctcgtcgtccgaaccaaattccctgtgctacgtcgaaactgctgaactggacggagaaacgaatttgaagttcaagatgtcacttgaaatcaccgaccagtacctgcagagggaagatactcttgcgacctttgatggttttatcgagtgtgaggaaccgaataacagactcgacaagttcaccggaacgctcttctggcgaaacacttcctttccgctggatgcagacaagatccttctccgcggttgcgtgattagaaacactgacttttgccatggcctggtgatcttcgctggcgccgatactaaaatcatgaagaactcgggcaagaccagattcaagcgtactaagatcgactatctgatgaactacatggtgtacactatcttcgtggtcctgattctcctgtcagcaggactggcaatcggacacgcctattgggaagcccaagttggaaattcctcatggtatttgtacgacggggaggatgacaccccatcgtacaggggatttttgatcttctggggttatatcatcgtgctgaacactatggtgcctatctctctgtacgtgtctgtcgaagtgataagactcggccagtctcacttcatcaactgggacctccagatgtactacgccgaaaaagacacccctgccaaggcgcggacgaccaccctgaatgaacagctcggacagatccactacatcttctcggataagacgggtactctgacccagaacataatgactttcaagaagtgctgtatcaacggacagatatacggggatcacagagacgcgtcgcagcacaaccataacaaaatcgaacaggtcgacttctcatggaatacgtacgcggatggcaagctggcgttctacgaccattacctcatcgaacaaatccaatcgggaaaggaacctgaagtgcgacagttcttcttcctgctcgcagtgtgccataccgtcatggtcgacaggaccgatggtcaactgaattaccaggcggccagccccgacgaaggcgcgctggtcaacgcagccagaaactttggattcgccttccttgctcgaacccagaacaccatcaccatctccgaactggggacggaaagaacttacaatgtcctggccatcctggacttcaacagcgatcggaagaggatgagcatcatcgtgcggaccccggaaggaaacatcaagctctactgcaagggcgccgacaccgtgatctacgaacggctccatcgcatgaacccgactaagcaggaaacccaggacgccctggacatcttcgcgaacgaaacccttcggactctctgtttgtgctacaaggaaatcgaggaaaaggagttcaccgagtggaacaaaaagttcatggctgcgtccgtggccagcaccaacagagatgaagccttggataaggtgtacgaagaaatcgagaaggacctgatcctgctgggagctactgccatcgaggacaagctgcaggacggagtcccagaaacgatctccaaactcgccaaagccgatatcaagatctgggtgttgactggggacaaaaaggaaaccgctgagaatatcgggtttgcatgtgaactgctgactgaggacactactatctgttacggagaggacataaactcactgcttcacgcacgaatggagaaccagagaaatcggggaggagtctatgccaaatttgcgccgcctgtgcaggagtcattcttcccgccaggcggtaaccgggccctcatcattaccggaagctggctgaacgaaatcctgcttgaaaagaaaaccaagcgcaataagatcctgaaactgaaattccctcggactgaggaagagcggcgcatgcgtactcagtcaaagcggagactggaggctaagaaagaacaaagacagaaaaacttcgtagatctggcatgtgagtgcagcgcagtgatttgttgccgggtgacccctaagcagaaggcgatggttgtggacctggtgaaaaggtacaagaaagctatcaccctcgccatcggcgatggagcgaacgacgtgaacatgatcaaaaccgcccacatcggggtgggaatctcagggcaagagggaatgcaggctgtcatgagctctgactactccttcgcacagttccgctacctccagcggctcctgctcgttcacggacgctggtcgtacatccgcatgtgcaagtttttgcggtactttttctacaagaatttcgccttcacccttgttcacttttggtacagcttcttcaacggctactccgctcagaccgcctacgaggactggttcatcactttgtataatgtcctgtacacttcactgccggtgctgctgatgggactcctggaccaggatgtgtccgacaagctgtcgctgagattcccgggactgtacatcgtgggacaacgcgacttgctcttcaattacaagagattctttgtctccctcctgcatggagtgctgacctcgatgatcctgtttttcatccctctcggagcttacctgcagaccgtgggccaggacggtgaagccccctccgactatcagtcattcgcagtgactatcgcgtcggccctcgtgatcaccgtgaactttcagatcggcctcgacaccagctactggacgtttgtgaacgcattcagcatcttcggatcgatcgccctgtactttggtatcatgttcgatttccactcagctgggatccatgtgctcttcccgtccgcgttccaatttacgggaactgcgtcgaacgccctgagacaaccttacatttggcttactatcattctcgccgtcgctgtttgcctgctcccggtggtcgctatcaggtttctctcaatgaccatctggccgagcgaatccgacaagatccaaaaacaccggaagcggctcaaggcagaggaacaatggcagcggagacaacaggtgttccgccggggggtgtccactcgccggtcggcttacgccttcagccaccaacggggctacgctgacctgatctcgagcggacgcagcattcgaaagaagcggtccccgctggacgcaatcgtggccgatggaactgccgagtacaggaggaccggagactca

SEQ ID NO: 7270 - DNA, 3753 bp, synthetic construct
  misc_feature 1..3753: note = source = /note="Description of Artificial Sequence: Synthetic coding sequence"
  source 1..3753: mol_type = other DNA
atgagcaccgagagggacagtgagactacatttgatgaagacagtcagccaaatgatgaagtcgtcccttactccgatgacgagactgaggacgaactggatgatcagggatctgccgtagaaccagagcaaaatagagtgaatcgggaagcggaggagaatcgggaaccctttcgtaaggagtgtacttggcaggtcaaggccaatgataggaaataccatgaacagccgcatttcatgaacactaaattcctgtgcatcaaagaatccaaatatgcgaacaacgccataaagacctacaaatacaacgccttcacctttatcccaatgaacctcttcgagcagtttaagcgcgcggctaacctctatttcctcgcattattgattctgcaggccgtgccccagattagcacattagcatggtacaccactctcgtacctctgctggtcgtccttggcgttacagccatcaaggatctggtcgatgatgttgccaggcataagatggataaggaaattaataacaggacttgtgaagttatcaaggatggaagatttaaagtcgcaaagtggaaggagattcaggtgggcgatgtgatccgactgaagaagaacgactttgtgcctgccgacattctgctgttgagttcgtctgagccgaactccctgtgctacgtcgaaacagccgaacttgatggtgagacgaatcttaagttcaagatgtccctcgaaataacagaccagtacttgcagagggaagacaccctcgcaactttcgatggatttattgagtgtgaagagccaaataaccggttggacaagttcacagggaccctcttctggagaaacacttctttccctcttgacgctgataagatattgctgcggggttgcgtgatcaggaataccgacttctgccacggattggtgattttcgctggagccgacactaagatcatgaagaattccgggaagacccggttcaaaaggacgaagatagactacctgatgaactacatggtttacactatattcgttgtcttgattttgttgtcagctggtcttgcgataggtcatgcttactgggaggcgcaagttggaaatagtagttggtacctgtacgacggcgaagatgataccccttcttacagggggttcctcattttctggggatatatcattgtgctcaacaccatggttcccatttcattatacgtgtccgtggaggtgattcgccttggacagagccatttcatcaactgggacctccagatgtattacgccgagaaagatacgcccgcaaaggctcggactacaaccctcaatgagcagttgggacagattcactacattttttctgataagacaggtacgttgacgcaaaatatcatgacttttaaaaaatgctgtatcaacggccaaatctatggggatcaccgcgacgctagccagcacaaccacaacaagattgagcaggtggatttctcttggaatacctatgcggatggcaagttagcattttacgatcactacctcatcgaacagatacagagcgggaaggagcccgaggtgcggcagttcttcttcctgttggccgtgtgtcacactgtgatggtggacagaactgacggccagctgaactaccaagctgcatctccagatgaaggcgccctggttaacgcagccagaaacttcgggttcgctttcctagcaagaactcagaacaccataacaatctctgaactgggaactgagcgcacttacaacgttctggctatacttgactttaatagtgatcgcaagagaatgtccatcatagtgaggacacccgaaggcaacattaaactgtactgcaaaggggccgacacagtgatatacgagcgccttcaccgcatgaacccgacaaaacaagaaacccaggacgctcttgacatattcgccaatgagacgttgcgaactctgtgtctgtgctataaggaaattgaggaaaaagagttcacggagtggaataaaaagtttatggctgctagcgtcgcttcaaccaaccgggatgaggccctggacaaggtgtacgaagagatcgaaaaggacctgatcctcctgggggcaaccgctattgaggataagctgcaggatggtgtgccagagaccatctccaagttggccaaggctgacatcaagatctgggtgctgaccggagataaaaaggaaaccgccgagaatatcggatttgcttgcgaactgttgacggaagacaccacgatctgctatggggaggatatcaattccctgctgcacgccaggatggaaaatcagaggaaccgggggggcgtgtatgctaagttcgccccgcctgtgcaagaatccttcttccccccagggggtaatcgggcccttattattaccggctcctggctgaatgagattctcttggagaagaagacgaagagaaacaaaatcctcaagttgaagtttccccggacggaggaggaacgacgcatgaggactcagagcaagagacgactagaggccaagaaggagcaaaggcagaagaacttcgtcgacctggcctgcgagtgctccgccgtgatttgttgcagagtgacccctaaacagaaagctatggtggtcgacttggtgaagaggtacaaaaaggcgataacattagccatcggtgacggcgccaatgatgtgaacatgattaagacggctcacatcggcgtcgggatcagtgggcaggagggcatgcaggcggtcatgtcttccgattacagtttcgcacagttcaggtacctgcaaagattgttactggttcatggcaggtggtcatacatccggatgtgcaaatttctccgttacttcttctacaagaactttgcctttaccctggtccacttctggtattcatttttcaacggatacagtgcgcagaccgcttacgaggactggttcataaccttgtacaatgtcctatatacgagccttcccgtcctgttaatgggactcctcgatcaggacgtgagcgacaagctcagcctgaggttccccggcctgtacattgtcggacagagggacctgctcttcaattacaagcggtttttcgtgagtctgttgcacggcgttctaacctcaatgattctgttctttatccccctgggtgcatatttacagactgtgggccaggacggggaagcacctagcgactaccaatcattcgctgtgacgatcgccagcgccctggttatcactgtgaactttcagatcggcctcgacacatcctactggacctttgtcaacgctttctctatcttcggctctatcgccttgtacttcgggatcatgttcgactttcactcagccggtatacacgtactgttccctagtgcattccagttcaccggcaccgctagtaacgctctgagacaaccctatatatggctcactatcatcctcgcagtagcggtatgcttgttaccagttgtagcgatacggttcctctccatgactatctggccttctgagagtgataaaatccagaaacatcggaagcgattgaaggcggaagaacagtggcagagaaggcagcaagtgtttcgcaggggtgtgagtactcgaagaagcgcctacgctttctcacatcagagaggctatgccgatttgatatcctcagggaggagcattaggaagaagagatctcccctcgacgcgatcgttgctgatggcacagccgagtatcgacggaccggcgattcg

SEQ ID NO: 7271 - DNA, 3753 bp, synthetic construct
  misc_feature 1..3753: note = source = /note="Description of Artificial Sequence: Synthetic coding sequence"
  source 1..3753: mol_type = other DNA
atgtcgaccgagcgcgattccgagacgacctttgacgaagattcgcagcccaatgatgaagtcgtgccctacagtgacgacgagactgaagatgagctggatgatcagggttccgccgttgagcccgagcagaaccgggtcaatcgtgaggctgaagaaaaccgcgagcccttccgcaaagagtgcacctggcaagtgaaggcaaacgacaggaagtaccacgaacagccgcatttcatgaacaccaagttcctgtgtattaaagaaagcaagtatgccaacaatgcaatcaaaacttataagtataacgcctttacctttattcctatgaacctcttcgaacagttcaagcgtgcagctaacctgtacttcttggctctattaatcctccaagccgtcccccaaatctccactctcgcatggtacactacgcttgtccccctgcttgtcgtgcttggtgtcaccgctattaaagaccttgtggacgatgtcgcgcgccacaaaatggacaaagagatcaacaaccgtacatgtgaagttattaaggatggccgcttcaaggtcgctaagtggaaagagatccaggtcggtgatgtgatccgcctgaagaagaatgacttcgttccggctgacattcttctgctatcctcctctgagcctaatagtctgtgttacgtggagactgccgaattggacggtgagactaacttgaagttcaagatgtctctggagatcaccgaccagtatttgcaacgtgaggacaccctggccaccttcgatggattcatcgagtgcgaggaaccaaataaccgcttagacaaatttaccggaactcttttctggaggaacacatccttccccctagacgccgacaagatcttgctgcgcggctgtgtcatccggaacaccgatttctgccatggcctggttatcttcgccggggccgatacgaagatcatgaagaacagcggcaagaccaggttcaagcgcactaagatcgattacctcatgaattacatggtatacaccatcttcgttgtactcattttgttgagcgccggattggccatcggccatgcctactgggaagcccaggtcggaaacagttcctggtacctctacgacggtgaggatgatactccatcgtaccgtggtttcctgatcttctgggggtacatcattgtcctgaacacaatggtgccaatcagcctatacgtctcagtggaggtgatccgtctgggtcagagccatttcattaattgggacctacaaatgtactacgcggagaaggatacccctgctaaggcaagaaccaccacattgaacgaacagttgggacagattcactatatcttctcggacaagaccggcacactgactcaaaacatcatgactttcaagaagtgctgcatcaatggccagatttatggtgaccaccgcgacgcgtcgcaacacaaccacaacaagatcgaacaagttgatttctcctggaacacctatgcggatggcaagttggccttttacgaccactacctgatcgagcagatccagtcggggaaagaacccgaggtgcgccagtttttcttcctgctggctgtctgtcacacggttatggtggaccggacagatggtcagctgaactatcaggcggcctcgcccgacgaaggtgccttggtcaatgctgctcgcaacttcgggttcgcttttttggcccgtacacagaacaccatcaccatcagtgagctaggtaccgagcgtacatacaacgtgttggctatcctggattttaactccgaccgcaaaaggatgtcgatcatcgtccgcacgccagaaggtaacatcaagctttactgcaagggcgcagacactgttatttatgagcgccttcacaggatgaacccgaccaagcaagagacacaggatgctctggacatcttcgccaacgagacacttcgtacattgtgcctctgctataaagagatcgaagagaaggaattcaccgagtggaataagaagttcatggcggcttccgtcgcctctacgaacagggatgaagccctggacaaggtctacgaggagatcgagaaggacttgattctgttgggcgccaccgctatcgaggataagctgcaggatggcgtccctgagacaatctctaagctcgccaaagccgacattaagatatgggtcttgaccggtgacaaaaaggagaccgctgagaatatcggctttgcctgtgagctgctgaccgaagatacaacaatttgctacggcgaggacatcaactccctgttgcatgcccgtatggaaaatcagcgtaaccgtggcggtgtttacgctaagtttgccccccctgtccaggagagcttttttccgcccggtggcaatcgcgccctgatcatcaccggaagctggctcaacgaaattctgctcgaaaagaagacaaagcggaataagatccttaagctaaaattcccgagaaccgaggaagagcggcgtatgcggacccagtcaaagcgccgcctagaggccaagaaggagcaaaggcagaaaaacttcgttgacctggcttgtgagtgcagtgcagtgatctgctgccgcgtcactcccaagcaaaaggcgatggtggtcgacctagttaagcgctacaagaaggccattaccctagctattggggacggtgctaacgatgtcaatatgatcaagacagcccacattggagtcgggatttcaggacaggaaggtatgcaggccgtgatgtcatccgattacagtttcgcacagtttaggtatctccagagattgttgcttgttcatggacgttggtcgtacatccgcatgtgtaagtttctgcggtacttcttctacaagaacttcgctttcactctcgtgcacttctggtactcgttcttcaacggctactcagcacagaccgcgtatgaggattggttcattacactctacaacgtgctctatactagccttccggttctccttatgggcctgctcgatcaggacgtgagtgacaagttgagcctccgcttcccaggactgtacattgtcggccagcgggatctgctgttcaattacaagcgcttcttcgtatccctcttacatggagtactcacgagcatgatccttttcttcatcccgctcggtgcgtacttacagacggtcggtcaggatggcgaagctccgtcggactaccagagctttgccgtcacaatcgcctcggctttggtcatcaccgtgaacttccagattggtcttgatacttcctattggacgttcgtcaacgcattcagcatcttcggttctattgcactctactttgggattatgttcgacttccactccgcaggtattcacgtgctctttccctcggccttccagttcaccgggactgctagcaatgccctgcgccagccatacatctggcttaccatcatcctggccgtggccgtctgtctcctgcctgtggtggccatcaggtttctgtctatgacgatctggcccagtgagtccgacaagatccagaaacatcggaagcggcttaaagccgaggaacaatggcagcggcgccagcaggtgttccggcgcggcgtgagcacccgccgcagcgcctatgccttcagtcaccagcgcggttacgcagacttgatctctagtggccgtagcatccgcaaaaaaagatcgcctctcgacgccattgtcgctgacggcacagctgaatacaggcgcactggcgattcc

SEQ ID NO: 7272 - DNA, 3753 bp, synthetic construct
  misc_feature 1..3753: note = source = /note="Description of Artificial Sequence: Synthetic coding sequence"
  source 1..3753: mol_type = other DNA
atgtcgaccgaaagagactcagagacgacttttgatgaagattcgcaacctaacgacgaagtggtgccatacagcgatgatgaaactgaagatgaattggacgatcagggctccgcggtggagcccgagcagaacagagtaaaccgggaagccgaagagaaccgggaaccttttcggaaagaatgcacttggcaggtgaaagcaaacgatagaaagtaccatgaacagccgcactttatgaacactaagtttctttgtattaaggaatcgaagtacgccaacaacgcaatcaagacgtacaagtacaatgcttttacgtttattcccatgaatcttttcgaacagttcaagcgagccgccaacctttactttcttgcattgctgattttgcaagccgtgccccaaataagcaccctggcatggtacacgacgctggtaccgcttctggtcgtcctcggagtgaccgccattaaggatctcgtagacgatgtggcgcgccataagatggataaggagatcaataaccgaacctgtgaggtgattaaggatggtcgctttaaagtggcaaagtggaaagaaatacaagtgggcgatgtgatcaggcttaagaagaacgatttcgttcctgcggatattcttctgctgtcgtcgtccgaacccaacagcctgtgttatgtagaaaccgcggaacttgacggcgagactaatctcaaattcaagatgagtctggaaatcaccgatcagtacctgcaaagagaggatactctcgcaacgtttgacggtttcattgaatgcgaggagcctaacaatagactggacaaattcaccggtaccctgttttggcgaaacacctccttcccgttggacgcagataagattctcctgcgaggatgtgtgatacgcaacaccgatttttgtcacggattggtgatcttcgccggggcggataccaaaatcatgaagaactcgggtaagactcgttttaagcggactaagatcgactacctgatgaactacatggtttatacgatatttgtggttctcattcttttgtcggcaggacttgcaatcggacatgcatactgggaagcacaagtcgggaatagctcctggtacctttatgacggcgaagatgatactccttcctaccgcgggttcctcatcttttggggatacataatagtgcttaatactatggtgccgatatcgctctacgtcagcgtggaagtcatacgtcttggacagtcccacttcatcaactgggatctgcagatgtattatgcagagaaagataccccagcaaaggcccggacgactactcttaatgaacagctcggacaaattcattacattttctccgataagaccggtactcttactcagaacattatgactttcaaaaagtgctgtattaacggccaaatctacggggatcacagagacgcaagtcaacacaaccataacaagattgaacaagtcgattttagctggaacacttacgccgacggcaaattggctttttacgatcattaccttattgaacaaattcaatcgggaaaggaacctgaggtgcggcagtttttctttctgttggcggtctgccataccgtgatggtcgatagaactgacggccaacttaactaccaagctgcctcaccagatgagggagcattggtcaacgccgcacgcaacttcggttttgcatttctggctcgaacgcagaatacgatcaccatcagcgagcttggtactgaacgtacctacaacgtccttgccattctggacttcaattcggatagaaaaagaatgtccatcattgtgcgaacccctgaaggaaacattaaactttactgcaagggagccgataccgtcatctacgagcgtctgcatcgtatgaatccgaccaaacaagaaacccaagacgcgctcgacatttttgccaacgagactcttcggaccctgtgtctttgttacaaggaaatcgaggaaaaggagtttactgaatggaataagaaattcatggcagcttcagtggcaagcactaacagggacgaggcactggataaggtgtacgaagaaattgaaaaggatcttatactgctcggggcaaccgcgatcgaagataaactccaggatggagtgcctgaaaccatctccaaacttgcaaaagcagacataaagatctgggtcctgactggtgacaagaaggagacggcagaaaacattggttttgcatgcgagcttttgaccgaggacactaccatttgttacggagaggatatcaattcactgctgcatgcccgaatggagaaccaaaggaatagaggaggcgtctacgcaaagtttgccccgcctgtgcaggaatcattctttccaccaggtggcaatagggcgttgatcattaccgggtcatggctgaacgagattctcctcgaaaagaaaaccaaacgaaataagattctgaaacttaagttccccagaaccgaagaagagcgccgcatgcgcactcagtccaagcgcagactggaagcaaaaaaggagcagcggcagaagaattttgtggatctggcatgtgaatgttcggcagtgatctgctgcagagtgaccccaaagcaaaaagccatggtggtcgatctcgtcaaaaggtacaaaaaggcgatcactctcgcgataggagacggcgcaaatgatgtgaatatgatcaaaactgcccacattggcgtgggtattagcggtcaggaaggaatgcaggcagtcatgtcctccgattattcttttgcccaatttaggtacctgcaacggctgctgctggtgcatggacggtggtcctacattagaatgtgtaagtttctgcgttactttttctacaagaactttgcattcaccctggtgcacttttggtacagctttttcaacggatacagcgcccaaaccgcatacgaggactggttcatcaccctgtataatgtgctttacaccagcctccccgtgctgctcatgggacttttggatcaagatgtttcagataagctcagcctccgctttccaggactgtacattgtggggcagagagatttgcttttcaattacaagcgattctttgtctctcttctccatggggtcctcacttcgatgattctgttctttatccctcttggagcatacctgcaaactgtcggtcaagacggcgaggccccttcagactaccaatcgttcgcggtgactattgcatcggcgctggtcataacggtgaattttcaaatcggattggataccagctactggacttttgtgaacgcattttccatctttggttcgattgcgctgtactttggaatcatgttcgattttcactcagccggaattcatgtgcttttcccgtcggcgttccagtttaccgggactgcatctaatgcacttcgccagccctacatatggctgacgatcattcttgctgtcgctgtgtgtctgttgccagtcgttgcaattagattcttgtctatgaccatttggccatcggaatcggataagatccaaaagcatcgcaagcggttgaaggccgaagaacaatggcagcggagacaacaggtgttcagacggggtgtctcaactcggcgaagcgcttacgccttttcgcatcagagagggtacgcggacttgatttcgtcgggccgttccattaggaagaagcggtcgccactcgacgcaatcgtggctgacggtaccgctgagtaccgtaggactggagactct

SEQ ID NO: 7273 - DNA, 3753 bp, synthetic construct
  misc_feature 1..3753: note = source = /note="Description of Artificial Sequence: Synthetic coding sequence"
  source 1..3753: mol_type = other DNA
atgtccaccgaaagagattccgaaactaccttcgatgaggactcgcaacccaatgatgaagtggtgccctacagcgacgacgagactgaggatgagcttgacgaccagggatcggccgtggaaccagagcagaaccgagtgaacagggaggccgaggaaaacagagagcctttccgcaaagagtgcacttggcaagtcaaagcgaacgatagaaagtatcacgagcagccgcacttcatgaataccaaatttctgtgcattaaagaatcgaaatatgcgaacaatgccatcaagacgtacaaatacaacgcatttactttcataccaatgaacctgtttgagcaattcaagcgcgccgcgaacctgtacttcctggctttgctgatcctgcaggcggtgccacaaatctctactctcgcctggtacactactctcgtcccgcttctggtggtgctcggagtgactgccatcaaggacctggtggatgatgtcgcccggcataagatggataaggaaatcaacaaccgaacctgcgaggtcatcaaggatggacggttcaaagtggccaagtggaaagagattcaggtgggagatgtcatccgcctgaaaaagaatgactttgtgcctgccgacatcctcctgctctcctcttcagagccgaattccctgtgctacgttgaaaccgccgagttggacggcgaaaccaacctcaagtttaagatgtcccttgaaatcactgatcagtaccttcagagagaagataccctggctacctttgatggtttcatcgaatgtgaggaacctaacaaccggctggacaagtttaccggtacccttttctggcgcaacacgtcgttcccgctggacgccgataagatcttgcttcgtggttgcgtgattcgcaataccgacttctgccacggcctcgtcattttcgccggagctgacacgaagatcatgaagaattccggaaaaactcgcttcaaacgcaccaagatcgactacctgatgaattacatggtctacaccatctttgtcgtgttgatcctgctctcggccggattggcgatcgggcacgcgtactgggaagcccaagtggggaattcgtcgtggtatttgtacgacggtgaggacgacaccccaagctacaggggcttcctgatcttttggggatacattatcgtcctgaatactatggtgccgatttctctctacgtttcagtggaagtgatccggctgggacaatcacactttatcaattgggatctgcaaatgtactacgcagaaaaggacactccagcaaaggcgcggaccaccactttgaatgaacagctgggacagattcattacatcttctcggataagaccgggactctgacccagaacataatgacttttaagaagtgctgcattaacggacagatctacggagatcaccgagatgcgtcgcagcacaaccataacaagatcgaacaggtggatttctcgtggaacacttacgcagatggcaaactcgcgttttatgaccattatctgatcgaacaaatccagtcgggcaaagagccggaagtccgacaattctttttccttctggccgtgtgccataccgtgatggtggatcgcaccgacggccagttgaactaccaggccgcgtcccctgatgaaggagccctcgtcaacgccgccaggaactttggctttgccttcctggcgcggactcagaacacgatcactatttcagagctgggaactgagagaacctacaacgtgctggcgatcctggacttcaattccgacagaaagagaatgtctatcatcgtccggaccccggaaggaaacatcaagctctactgcaagggagcagacaccgtcatctacgaaagactccatcggatgaatccgactaagcaggaaacccaggatgctctggacatcttcgccaacgaaactctcaggaccctctgcttgtgctacaaggaaatcgaagaaaaagaattcactgagtggaacaagaagttcatggctgcctccgtggcgtcaaccaatagagacgaggctctggacaaggtgtacgaggagatcgagaaggacctgatcctgctcggagccaccgccattgaagataagttgcaggacggagtgccggaaaccatctcaaaactggctaaagcggacataaagatctgggtgcttacgggagacaagaaggaaactgcagagaacatcgggttcgcttgcgagctcctgactgaggacactacgatctgctacggtgaggacatcaattcgctgcttcatgcacgcatggagaaccagaggaaccggggaggggtgtacgcaaaattcgccccgccagtgcaggagtcgttttttcctccgggcggtaatagagcgcttatcataaccggatcgtggctgaatgaaatccttcttgaaaagaaaactaaacggaataagatcctgaagttgaagttcccgcgaacggaggaagaacggaggatgcgcacgcagtccaagcggagactggaagcgaaaaaggagcagcggcagaaaaactttgtggatctggcttgcgaatgcagcgccgtgatctgctgccgcgtgaccccaaaacaaaaggccatggtggttgacctcgttaagcgctataagaaggctatcactctcgctattggtgacggagcaaatgacgtgaatatgattaagacggcgcacatcggagtgggtatttccggacaggaaggaatgcaggctgtcatgtcctctgactactcctttgcccagttcagatacctgcaacggctgctcctggtccacgggaggtggtcgtacatccgtatgtgtaagttcctgcggtacttcttctacaagaatttcgcgttcaccctggtccacttctggtactcgtttttcaatggctactccgcgcagaccgcgtatgaggactggttcatcaccctttacaatgtgctgtacactagcctgcctgtcctgctcatgggactcctcgaccaagacgtttctgacaagctctccctgcgctttcctggactctacatcgtggggcagcgggatttgctgttcaactacaagcggttcttcgtcagcctcttgcacggtgtgctgacctcgatgatcttgttcttcatcccactcggcgcctacctgcaaactgtgggacaggatggtgaagcaccgtcagattaccagtccttcgcagtcaccattgcgtcagccctggtcattactgtgaacttccagatcggcctcgatacgagctactggaccttcgtgaacgcattcagcatctttggatccatcgcgctgtatttcgggataatgttcgactttcatagcgcaggcatccatgtgctgtttccttcggcgttccaattcactggcaccgcctcgaacgccctccggcagccttacatctggctcactatcatcctggccgttgctgtgtgcctgctgccagtcgtggccatcaggtttctgtccatgaccatctggccgagcgagtccgataagatccagaagcacaggaagagactcaaggcggaggagcagtggcaacggcggcagcaggtattccggcgcggagtgtccacccggagatcggcctacgccttttcccaccaacgcggatacgcggatctcatctcgtcgggccgcagcatccggaagaagcggagccccctggacgcgatcgtggccgacggtacggctgagtacagaagaaccggggactcg

SEQ ID NO: 7274 - DNA, 3753 bp, synthetic construct
  misc_feature 1..3753: note = source = /note="Description of Artificial Sequence: Synthetic coding sequence"
  source 1..3753: mol_type = other DNA
atgagcactgagcgggattctgagacgacttttgacgaagatagtcagcctaatgatgaagtggtcccgtactcggatgatgagacagaagatgagctcgacgaccaaggcagcgccgtggaacccgaacagaatcgggtcaacagagaggctgaggagaatagggagcccttccggaaggagtgtacctggcaggtgaaggccaatgatagaaagtaccacgagcagccccatttcatgaatactaagtttctctgcattaaggagtccaaatacgcaaataacgccatcaaaacctataaatacaatgcattcacctttatacccatgaacttattcgaacagttcaaacgggccgccaatctttacttcctggctttactgatactgcaggctgtgccccaaataagcaccttagcttggtatactaccttggtgcctctgctggtggtgcttggggtaaccgctataaaggacctggtagacgacgtggcacggcacaagatggacaaagagatcaacaatcggacctgcgaagtgataaaggacggccgctttaaggtggcaaagtggaaggagattcaggtgggcgatgtaatccgcttgaagaaaaatgattttgttccagctgacatcctccttctttcttcgagtgagccaaacagcctctgctatgtcgagactgcggagctcgacggagagaccaatctgaagttcaaaatgtctctggaaattaccgaccagtacctgcagcgcgaagatactctggccacatttgatgggttcattgaatgtgaagaacctaacaatcgccttgataaatttacaggcaccctgttttggagaaacacctcgttcccactagacgcggacaaaattctactacgaggctgcgtcatccggaataccgacttttgccacggtctggtcatctttgctggagcggatacgaagataatgaagaattccgggaagactcgctttaaacggacaaagattgactacctaatgaactatatggtgtacactatattcgtggtattaattctgttgtccgccgggctcgccataggccatgcttattgggaggcccaggttggcaactcttcttggtatctttatgacggggaggatgatacaccctcctaccgaggcttcctgattttttggggttatattattgtcctaaatacgatggtgccgatcagcttatacgtcagcgtagaagtcattcgcctgggacaatctcatttcatcaactgggatctccaaatgtattacgcagaaaaagataccccagcgaaggctagaaccacaaccctgaatgaacagctcggacaaatccactacatcttttcggataaaacagggacactcacacagaatataatgaccttcaaaaagtgctgcatcaatgggcagatttatggagaccaccgggatgcttcccagcataaccataataagatcgagcaagtggactttagctggaacacttatgccgacggcaaattggccttctatgatcactatttgatcgaacagatccagtccggtaaagagcctgaggttagacagttttttttcttgcttgcagtgtgtcataccgtcatggtggataggaccgatggacaacttaactaccaggcagcaagcccagatgaaggcgcactggtgaatgcggctaggaatttcggcttcgcattccttgccagaacacagaatactataacaatctcggagctgggaacggagcgcacatacaacgtgctcgccattcttgacttcaatagtgaccgtaagagaatgagtataatagttagaactcctgaaggaaatatcaaattatattgtaagggagctgacaccgtaatttacgagcgtttgcacaggatgaacccaactaagcaggagacacaggatgctctcgacatcttcgctaatgagactttgagaaccctctgtctgtgctacaaggagatcgaagagaaggagtttaccgaatggaacaagaaattcatggcagctagcgtggcctccaccaatcgtgatgaagccctcgataaagtgtacgaagagatagagaaggatctcattctgttgggcgcaacagccattgaggataagctacaggacggagtccctgaaacaatcagtaaacttgcaaaggctgacattaaaatatgggtactgactggcgataaaaaggagacagcggagaacatcggatttgcctgcgaacttctaaccgaggacactactatctgttacggggaggacattaactcgctcctccacgctcggatggagaaccagaggaacagagggggtgtgtatgcaaaatttgctcctcccgtgcaggaatcattctttcctcccggagggaatcgcgctctgataataactgggagttggctcaacgagatcttgttggagaagaaaaccaaaaggaacaaaatactgaagttgaaatttcctcgcactgaggaggagcgtcgaatgcgcactcagtccaaacgccgcctggaagccaagaaagagcagcgccagaaaaacttcgtggatctcgcatgcgagtgctccgccgtgatttgttgtcgagttacaccaaaacagaaggccatggtggtggacctggtgaaacggtataaaaaggctattacccttgccattggcgatggagccaatgatgtgaatatgataaagaccgctcatatcggagttgggatctccggccaagaggggatgcaagctgtcatgtcttctgattactcattcgctcagtttagatatcttcagcggctgttactggtacacggacgctggtcgtacatcagaatgtgcaagtttctgcggtatttcttctacaaaaattttgcctttaccctcgttcatttctggtacagtttctttaatggctatagcgcccagactgcctacgaggattggtttatcacactttacaacgttctgtacacaagtttacccgtgctgttaatgggactgcttgaccaggacgtgagcgataagctgtcactaagattccctggcctctacattgtggggcaacgcgatctgctcttcaactataagcgtttcttcgtatcactcttgcatggggtcttaacttcaatgattcttttctttattcctctaggtgcatacctgcagacagttggtcaagacggtgaggcaccgtctgattaccagtccttcgcagtgacaatagctagcgcattggtcatcacggtgaatttccagatcgggcttgacacttcttactggaccttcgtgaatgcgttttcgatctttgggtctatcgcgctatattttgggatcatgtttgactttcacagtgccggaattcacgtactcttccccagcgctttccagttcacaggaacagcgagtaatgcgttgcgtcagccctatatttggctgaccattatccttgctgttgccgtctgtctgcttccagtggtggcaatccgttttttgagcatgaccatttggccgtctgaatccgacaagattcaaaaacaccggaagcgacttaaagccgaggaacagtggcaaaggaggcagcaagtgttccgccgtggcgtgagtacccgccgcagcgcatacgcattcagccaccagcggggttacgccgacctgatcagttcagggcggagcatccggaaaaaacgatctccccttgatgctatcgttgcagacggtactgccgagtatagacgtacaggtgactct

SEQ ID NO: 7275 - DNA, 3753 bp, synthetic construct
  misc_feature 1..3753: note = source = /note="Description of Artificial Sequence: Synthetic coding sequence"
  source 1..3753: mol_type = other DNA
atgtccaccgaacgcgattcggaaaccaccttcgacgaagattcgcagcccaacgatgaggtggtgccctacagcgatgatgaaaccgaagatgaacttgacgaccagggaagcgcagtcgaacctgagcagaatcgtgtcaaccgggaagccgaggaaaacagggaaccttttcggaaggaatgtacctggcaagtgaaggctaacgatcgcaaataccatgaacaaccacacttcatgaataccaagttcctttgcattaaggagtccaaatacgcgaacaacgcgatcaaaacctacaagtacaacgcgtttacgtttattccgatgaatctttttgaacagttcaaaagggcagcgaatctctacttcctcgccttgctgattcttcaggctgtccctcagatcagcacccttgcgtggtacacgacgcttgtgccgttgctcgtggtgctgggtgtaacggccattaaggacctggtggatgatgtcgcaagacataagatggacaaagagataaacaataggacctgtgaagtcattaaggatggacgctttaaggtggccaagtggaaagagattcaggtgggggatgtcatcagattgaaaaagaacgattttgtgcccgcagatatactccttctgtccagctcagaacctaactctctgtgctacgtcgagacggcagaactggacggtgaaaccaatctgaagttcaaaatgagcctcgagattacggatcaatacctgcagagggaagatacccttgcgacttttgacgggtttattgagtgtgaagaacccaataacaggctggataagtttactggtactctcttttggagaaacacttcatttcctctcgatgctgataagatcctgctcagaggatgcgtcatcagaaacaccgatttttgtcatggactggtgatttttgccggagcagacaccaagataatgaagaactcaggaaagactcgttttaagagaactaaaatcgattacctcatgaattacatggtgtacacgatttttgtggtgcttattctgctctccgcaggtctggcaattggtcacgcctattgggaagcccaagtgggtaactcctcctggtacctctacgatggcgaagatgatactccttcgtacagaggatttcttatcttttggggctacataattgtgcttaacactatggtgccaatctccctgtatgtgtccgtggaggtgattcggcttggacagtcgcacttcattaactgggatctgcagatgtactacgctgaaaaggataccccagcgaaggcaagaaccacgactctgaacgaacaactcggacagatccattacatattctcagataagactggtactctgactcagaatatcatgacctttaagaaatgctgcattaatggtcagatctacggtgatcatcgagatgctagccaacataatcacaataagattgaacaggtggactttagctggaacacttacgcagatgggaaacttgcattttacgaccactacctcattgagcagattcaatcgggaaaagaacctgaagtgcgccagttctttttccttcttgccgtgtgtcacactgtgatggtcgatcggaccgatggacagctgaattaccaagccgcatcgcctgacgaaggtgctctggtgaatgcggcgcggaactttggattcgccttcctcgcacgcacccaaaacaccattaccatttcggagcttggtacggaaaggacttacaatgtgcttgccattctggactttaactcggatagaaaaagaatgagcatcatcgtcagaaccccagaaggaaatatcaagttgtactgcaaaggggctgacactgtgatctacgaaaggctgcaccgcatgaatcccaccaagcaagaaacccaggatgcactcgacatatttgcaaacgaaaccctcagaaccctgtgcctgtgttacaaggagatagaagagaaggagtttaccgagtggaacaagaagtttatggcagcatcggtggcctccaccaaccgcgacgaggcactcgataaggtgtacgaagaaattgagaaagacctcatacttcttggggcaactgccatagaagataagttgcaagatggcgtgccagaaactatttcgaagctcgcaaaagccgacattaagatctgggtcctgaccggcgataagaaagaaactgcagagaacattgggtttgcatgtgaacttctcaccgaagataccaccatttgttacggtgaggatatcaactcacttcttcacgcgcgtatggagaaccagcgtaaccgcggcggagtgtatgccaagttcgcgccacctgtgcaggaatcgttctttcctccaggggggaaccgggcactgatcattaccgggtcctggcttaacgaaatcttgttggagaagaaaactaaacgaaacaagattctgaagctgaagtttccgcgaactgaagaagaaaggcggatgcgcacccagtcgaagcgccgtctggaggcaaagaaggaacagcggcagaaaaactttgtcgacttggcttgtgagtgtagcgcagtgatctgttgccgtgtcacccctaagcaaaaggcaatggtggtggatctggtgaagaggtataagaaggcaataactcttgcgattggagatggagcaaacgatgtgaacatgattaagaccgcccacattggggtgggcatatcgggtcaagaaggaatgcaagcagtgatgtcatcggattacagctttgctcagtttcgttacctccaacggctgctcttggtgcatgggagatggagctacattaggatgtgtaagtttcttcgctacttcttctacaaaaactttgcgttcaccctggtgcatttttggtactcgttctttaacgggtacagcgcacaaaccgcatacgaagattggttcatcaccctgtacaacgtgctgtacacctcgctgcctgtccttctcatgggactccttgatcaggatgtgtcagataagctgtcactgcggtttcccgggctttacatcgtggggcaaagagatttgctgtttaactacaagagattctttgtctcgctgcttcacggagtgcttacctcgatgatcctcttctttatcccccttggtgcatacctccaaactgtgggtcaagatggggaagcacctagcgattaccagtcgtttgcagtgaccatcgcaagcgcactggtgatcactgtcaattttcaaatcggcctggacacttcgtactggactttcgtcaatgccttttcaattttcgggagcatcgctctgtactttggaatcatgtttgatttccactccgcgggcattcatgtgctctttccgtccgctttccagtttactggaaccgcgtcaaacgcactgagacagccttacatttggttgactatcattcttgcagtcgcagtctgccttctgcctgtggtcgcaattcgatttctctccatgaccatctggccttctgagtcggacaagatccaaaaacaccgaaagagacttaaggcagaagagcagtggcagcgcaggcagcaagtgttccggcggggtgtctcgactcgtcgctcggcatacgcatttagccatcaaaggggctacgcagatcttatatcaagtggacgctcaattcggaagaagcgcagccccctggatgcaattgtggcagacggtaccgctgaataccgccgaaccggcgattca

SEQ ID NO: 7276 - DNA, 3753 bp, synthetic construct
  misc_feature 1..3753: note = source = /note="Description of Artificial Sequence: Synthetic coding sequence"
  source 1..3753: mol_type = other DNA
atgtcgacggagcgcgactcggaaaccacctttgacgaagatagccaaccgaacgacgaagtcgtgccatactccgatgacgaaaccgaagatgagctggatgaccaaggatccgccgtggaaccggaacagaaccgcgttaacagagaggccgaagaaaatcgggaaccatttaggaaggagtgcacctggcaggtcaaggccaatgatcgcaagtaccatgagcaaccacactttatgaataccaaattcctgtgcatcaaagaatcaaagtacgcgaacaatgcgataaagacgtacaagtacaatgcattcacttttatcccaatgaatctgtttgaacaattcaaacgcgccgcgaacttgtactttctggccctgctgattctgcaagcggtgccgcagatctccaccctcgcttggtacaccaccctcgtcccgctgttggtggtgctcggagtgacggcaatcaaggacctggtggacgacgtcgcacgccacaagatggacaaggaaatcaacaacagaacttgtgaagtgatcaaggatggaagattcaaagtggcgaagtggaaagaaatccaggtcggcgatgtgatccgcctgaagaaaaatgacttcgtccctgcagatatcctcctcctgtcctccagcgaaccgaacagcctgtgttacgtggaaaccgccgagctggacggagaaactaatctcaagttcaagatgtcactggagatcactgaccaatacctccagcgcgaggacactcttgccactttcgatggcttcatcgaatgcgaagaaccgaacaaccgcctggacaagtttaccggaaccctcttttggcgcaacactagctttcctctggacgccgataagatcctcctccggggatgcgtcatcagaaacacggacttctgccacgggctggtgatcttcgctggagcagatactaagattatgaagaactccggaaaaaccagattcaagcgcaccaaaatcgactacctgatgaattacatggtgtataccatcttcgtggtgctgatcctcctgtcagcaggccttgcgattgggcatgcctactgggaggctcaggtgggcaacagcagctggtacctgtacgatggagaggacgacaccccgtcctatagagggttcctgatcttttggggctacattattgtcttgaacactatggttcccataagcctttacgtctcggtcgaagttatccggttgggacaatctcatttcatcaattgggatttgcagatgtactacgcggaaaaagacacccctgctaaggcgagaactacgactctgaacgaacaactcggacagatccactacatcttctccgacaaaaccggtactctgactcagaacatcatgacttttaagaagtgctgcatcaacggacagatctatggagatcatcgagacgcttcacagcataaccacaacaagatcgagcaggtggacttctcatggaacacgtacgccgacggaaagctggcgttctacgaccattaccttatcgaacagatccaatcgggaaaagaaccggaggtgcgccagtttttcttcttgctggccgtctgccatactgtcatggtggatagaactgacggacagctcaactaccaggccgcttccccagacgaaggagcactggtgaatgcagctcgcaacttcggatttgcgttccttgcacggacccagaacactatcactatctcagagctcggcaccgaacgcacttacaatgtgctggcaattctcgacttcaactccgaccgaaaaagaatgtcgatcattgtgcggacgcctgaggggaacatcaagctctactgcaagggagcagataccgtgatatacgagcggcttcacaggatgaacccgaccaagcaagaaactcaggacgctctggatatcttcgccaacgaaactctgcgaacgctgtgcctctgctacaaggagattgaggaaaaggagtttaccgaatggaacaaaaagtttatggccgcctccgtcgcctccactaatcgcgacgaggctctggacaaggtgtacgaggagatcgagaaggacctcatcctgctgggagctaccgctattgaggataagctccaggacggtgtgcctgagacgatctcgaagttggctaaggcagacatcaagatctgggtgctgaccggtgacaagaaggagactgcagaaaacattggcttcgcctgcgaactgctgaccgaggacactaccatctgttatggggaagatatcaactcactgctccatgctagaatggagaaccagagaaaccgcggtggcgtgtacgccaaattcgccccgccggtgcaagaatctttcttcccgcccggcgggaaccgagcgctcatcattacgggatcatggctgaatgaaattctgctggaaaagaaaaccaaacgaaacaagatcctgaagctgaagttcccgcgcactgaggaagaacggcgcatgaggactcaatcgaaaagacgacttgaagcgaagaaagaacagagacaaaagaacttcgtagacctcgcctgtgaatgcagcgccgtgatctgttgcagagtgacgccgaaacaaaaagctatggtcgtcgacttggtcaaaagatacaagaaagccatcacccttgcaatcggggatggagcaaacgatgtgaacatgatcaagacggcacacattggagtgggaatctcaggacaggagggaatgcaggcggtgatgtcatcagactactcattcgcacaattccgctacctgcaaagactgctcttggtccatggcagatggtcttatatccgcatgtgtaagttcctcaggtactttttctacaagaatttcgctttcacgttggtccatttctggtactcgtttttcaatggttactccgcccaaaccgcctacgaggactggttcatcaccctgtacaatgtcctttacacctccctgccagtgctcctgatgggtctgctggatcaggatgtgtccgacaaactctcccttcggtttccgggcctctacatcgtgggccagcgcgacctcctgttcaactacaagcggttcttcgtgtctctgctgcatggagtcctgacgagcatgatcctgttcttcattcctctgggagcttacctgcaaaccgtcgggcaggacggagaagcaccgagcgattaccaatcttttgcggtgaccatcgcatctgcactggttattaccgtgaatttccaaatcggactcgataccagctactggaccttcgtgaatgctttctctatcttcggaagcatcgcgctgtacttcggaattatgttcgacttccactcagcaggcatccacgtgcttttcccttcagccttccagttcactggaaccgcctcgaacgcattgcgccagccttacatctggctgactattatcctggccgtggcagtgtgtctgctccccgtggtcgcgattaggttcctttcaatgaccatctggcctagcgaatccgacaaaatccaaaagcaccgcaagcggcttaaggccgaggaacagtggcagcgccgccagcaagtgttccgcaggggagtgtcgacccgcagatccgcctatgcgttcagccaccagcggggctacgccgacctcatttcatcggggcggtccatccgcaagaagcgctcaccattggatgcaatcgtggcagatggcactgccgagtacaggcgtaccggtgactca

SEQ ID NO: 7277 - DNA, 3753 bp, synthetic construct
  misc_feature 1..3753: note = source = /note="Description of Artificial Sequence: Synthetic coding sequence"
  source 1..3753: mol_type = other DNA
atgagcactgaacgagattcagaaactacttttgatgaggatagccagcccaacgatgaggtcgtcccgtactccgacgacgaaactgaggacgaactcgatgatcagggatcagccgtggaacctgaacaaaacagggtcaaccgagaagcagaagagaatcgtgaaccatttagaaaggagtgtacttggcaagttaaagcaaacgatagaaaataccacgaacaacctcatttcatgaacactaagttcctgtgcatcaaggaatcaaagtacgcaaacaacgcaattaagacttacaagtacaatgcatttacgtttattccaatgaacctttttgaacagtttaaacgcgcggctaacctgtactttctggcattgctgattttgcaagccgttcctcaaatttcgactctggcctggtataccactcttgtgccattgctcgtggtccttggcgtcactgcgattaaggatcttgtggatgatgtggcccgccataagatggataaggagattaacaataggacctgtgaagtgattaaagatggaagatttaaggtggcaaagtggaaagagattcaggtcggcgacgtgattagactcaagaaaaacgatttcgtccccgccgacattctgctcctctcgtcctcagaaccaaactccctttgttacgtggaaaccgcagaattggatggcgaaaccaatttgaagtttaagatgtcactggagataactgatcagtaccttcaacgagaggataccctggcgacttttgatggattcatcgaatgcgaagaaccgaataacagactggacaaattcactggtaccttgttttggcgcaatacttcgtttccgctggatgcggataagattcttcttcgcggatgtgtcatacgaaacactgacttttgtcacggacttgtcatttttgcaggagcagacaccaagattatgaagaactcgggcaagacgagattcaagcgcactaagattgattacctgatgaactacatggtctacaccatcttcgtggtgcttattcttcttagcgcaggtttggcaataggccacgcctactgggaagctcaggtgggtaacagctcatggtacctgtacgacggagaagatgataccccatcctaccgtggattccttatcttctgggggtacattatcgtcctgaacaccatggtgcctattagcctgtacgtgtcagtggaagtgatacgactgggccaatcccatttcataaactgggatcttcaaatgtactacgcagagaaggacactcccgccaaagcacggaccactacccttaacgaacagctgggacagatacattacatcttttccgataaaaccggcactctgacccaaaacattatgaccttcaaaaagtgctgtattaacgggcaaatctacggcgaccatagagatgcatcacaacacaaccataacaagattgaacaagtggatttttcttggaatacttacgcagatggaaagctggctttttacgatcactacctgattgagcaaatccaatccggaaaggaacctgaggtccggcaattcttcttcttgctggcagtctgccataccgtgatggtggacaggactgatggacagctcaactaccaggcagcatcccctgacgaaggagcactggtgaacgcagcaagaaactttggttttgccttcctcgcaagaactcagaatactatcactattagcgaactgggaaccgaaaggacctacaacgtgttggccattcttgatttcaatagtgaccggaagagaatgtcgatcatagtgcgtaccccagagggaaacattaagctgtattgcaagggtgccgacaccgtgatttacgaacgtctccaccgaatgaatccaaccaagcaggaaacccaagacgcactcgacattttcgcgaacgagacgctgcgcactctttgtctgtgttacaaggaaattgaggaaaaagaatttaccgaatggaataagaagtttatggcagcctcagtcgcaagcactaatagggacgaggccctggacaaggtgtacgaagaaatcgagaaggatctgatcctgctgggagcaaccgccatcgaagataaactgcaagacggtgtgccagaaactattagcaaacttgctaaggcggacataaagatctgggtgctgacgggagacaagaaggagactgctgaaaacatcggattcgcctgtgaactcctgactgaggacactaccatttgctacggtgaggacatcaatagccttctccatgcccgaatggaaaatcaaaggaaccgcggtggagtttacgcaaagtttgctcctcccgtccaggagtcgttctttcctcccggcgggaaccgggccctgatcatcaccggctcatggcttaatgagatactgctcgagaagaaaactaagagaaataagatacttaaacttaagttcccgagaactgaagaggaacgcagaatgaggacgcagtcgaagagacgccttgaggcaaagaaagaacaaagacaaaagaactttgtcgatctcgcctgcgaatgtagcgcggtgatctgctgtcgcgtcacgcctaagcaaaaggcaatggtggtggaccttgtgaaacgctacaagaaggccatcacccttgccataggtgacggcgcaaacgacgtcaatatgattaagactgcacatataggagttggaatctccggccaagaaggcatgcaagccgtcatgtcctcagattacagctttgcccaatttagataccttcagcggctcttgttggtgcacggcagatggtcctacattcggatgtgtaagtttctccgctacttcttttacaaaaactttgcatttacgctcgtccatttttggtactcgttctttaatgggtactcggcccagaccgcctacgaagattggtttatcactctgtataacgtgctctacacgtcactcccagtgctgctcatgggcctcctggaccaggatgtctccgacaaactcagcctccggtttccaggactctacattgtggggcagcgggatcttcttttcaactacaagagatttttcgtctccctgcttcatggtgtcctgacttccatgatcctgttctttattccactgggcgcgtacctgcagaccgtggggcaagatggtgaagcaccttccgattaccagagctttgcagtcacgatcgcatcggcgctcgtcattaccgtgaacttccaaatcggacttgacacctcgtactggacttttgtgaacgcgttttccatctttggatcgattgcactgtactttggcatcatgtttgatttccactctgccggaattcatgtccttttcccctccgcttttcagttcaccggcactgcaagcaatgcgctgcgccagccctacatttggcttactattatccttgcagttgccgtctgtctgctcccggtggttgcaataaggttcttgtcgatgaccatttggccatccgaatccgataagattcaaaagcatcgaaagcgcctgaaggcagaagaacagtggcagcgcagacagcaggtgtttaggaggggagtgagcacccggcgctccgcatacgcatttagccaccagcgcggatacgcagacctgatcagctccgggcgatcaatcaggaaaaagagatcgccactggatgcaattgttgctgacggaactgccgaataccgccgaactggcgactcc

SEQ ID NO: 7278 - DNA, 3753 bp, synthetic construct
  misc_feature 1..3753: note = source = /note="Description of Artificial Sequence: Synthetic coding sequence"
  source 1..3753: mol_type = other DNA
atgtctaccgaaagagactcggaaaccactttcgatgaggattcacagccaaacgacgaagtggttccgtactcagatgatgagactgaagatgaactggacgatcagggatcagccgtggaacctgaacagaaccgcgtgaacagggaagcggaagagaacagggagccgttccggaaggagtgcacttggcaggtcaaggcaaacgacagaaaataccacgagcagccgcactttatgaatactaaattcctgtgcatcaaggagtcaaagtacgcgaataacgccatcaagacttacaagtacaacgcattcaccttcatcccgatgaatcttttcgagcagttcaagagggcagcaaatctgtacttcctggcgctcctgatcctgcaggccgtgccgcagatctcgactttggcatggtacaccacgctcgtcccgctgctggtcgtcctcggagtgactgcgatcaaggatctggtggatgatgtggcacggcacaagatggataaggaaatcaataacagaacttgcgaggtgatcaaggacgggcggttcaaagtagcgaagtggaaagaaatccaggtgggcgacgtgatcagacttaagaagaacgactttgtcccggcagacatcttgcttctgtcctcctcagaacctaactccttgtgttacgtggaaaccgcagaactggatggagagactaacttgaagttcaagatgagcctggaaatcaccgatcagtacctgcaaagagaggatactctcgctacctttgatggattcatcgagtgtgaggagcctaacaatcggctggataagtttactgggaccctcttctggagaaacactagcttcccgctggatgcggacaagatcctcctgagggggtgtgtgatcaggaacactgatttttgccacggactggtgatcttcgcgggcgctgacaccaagatcatgaaaaactcaggtaagacccggttcaagcggacgaaaattgattacctgatgaattacatggtctacaccattttcgtggtgctcatcctcctcagcgccggactggctatcggacatgcctactgggaagcacaagtcggtaactcatcttggtacctgtacgatggcgaggacgataccccttcctatcggggattcctgatcttctggggatacatcatcgtgctgaatacgatggtgccgatctccctgtacgtctcagtcgaagtgatccgcctgggccaaagccactttatcaactgggacctgcaaatgtattacgctgaaaaggacactcctgcaaaagctagaacgacgactctgaacgagcagttgggccaaatccattacatctttagcgataagactggaactctgactcaaaacattatgactttcaagaagtgctgcatcaacggacagatttacggcgaccatagggacgcctcgcagcataaccacaacaagatcgaacaggttgatttttcgtggaatacttacgctgacgggaagctcgccttctacgatcactacctgatcgaacagatccagtccggaaaggagccagaggttcgccaattctttttcctgctggccgtgtgccacacggtgatggtggatagaaccgacgggcaactgaactaccaggcggcatcgccggacgaaggggcgcttgtgaacgccgcacgaaatttcggattcgcattcctggcgcggacccagaacactattaccatcagcgagcttggaactgagcgcacctacaacgtgctcgccatcctggacttcaattcggatagaaagagaatgtccatcatcgtgaggacgcctgaggggaacatcaagctctactgcaaaggggctgacaccgtgatctacgaacgattgcaccggatgaatccgaccaagcaggaaacgcaggatgccctggacatcttcgcaaatgaaactctgcggacgctgtgtctgtgctacaaggaaattgaagaaaaggaattcacggagtggaacaagaagtttatggcggcatcggtggcatcgactaatagagatgaagcccttgacaaagtgtacgaagagatcgaaaaggacctgatcctccttggcgccaccgccattgaggacaagctgcaagatggagtgccagaaaccatctccaaactggccaaagccgacatcaaaatctgggtcctcaccggagacaagaaggagactgccgagaatatcgggtttgcttgcgagctgctcaccgaagatactactatttgctacggagaggacatcaattccctcctgcatgccagaatggaaaatcagagaaaccgcggaggagtctacgccaagttcgccccacctgtccaagaatcgttttttccccccggaggaaatagggccctcatcatcactggcagctggctcaacgaaatcctgctggaaaagaaaacgaaaagaaacaaaatcctcaagctcaagtttcctcgtactgaagaggaaagacgcatgagaacgcagtccaaaaggcggctggaagcgaagaaggagcagagacagaagaatttcgtcgatctggcgtgcgaatgctcggcagtgatctgctgccgcgtgaccccaaagcagaaggcgatggtcgtggatctggtgaagcgctacaaaaaggctatcacgttggctatcggggacggagccaatgacgtcaacatgatcaagaccgcccacatcggagtgggtatcagtggtcaagaggggatgcaagctgtgatgtcctcagactactcattcgcgcagtttcgctatctgcagagactgctgctggtgcacggacggtggtcttacatcagaatgtgcaagttccttcggtacttcttctacaagaatttcgccttcactctggtgcatttctggtatagctttttcaacggatacagcgcgcaaaccgcttacgaagattggttcattaccctctacaacgtcctgtacacctcactgccagtgctcctgatgggactcctcgatcaggatgtgtcagacaagctctctctgcgcttcccgggactttacatagtgggacaacgggacctgctgttcaactacaagcgcttctttgtgtcgttgctgcatggagtgctgaccagcatgatcctgttcttcatcccacttggagcgtacctgcagactgtgggacaggacggcgaagccccaagcgactatcagtcattcgccgtcactatcgcgtcggcattggtcattaccgtgaattttcagattggcctggacacctcgtactggactttcgtcaacgcgttcagcatcttcggctcgatcgcgctgtacttcggaatcatgtttgacttccatagcgccggcatccacgtgctctttccaagtgcctttcaattcactggcactgcatccaacgccctgagacagccgtacatctggctcactatcatcctcgccgtcgcggtctgtctgctgccagtggtggcaatcaggttcctgtccatgactatctggccatccgagtctgacaagatccagaagcaccggaaacggcttaaggccgaagagcaatggcagaggcgccaacaagtgttcaggcggggagtctcaactcgcaggtccgcctacgctttctcgcatcagaggggctacgccgatctcatctcctcgggacgctcgatccgcaagaagaggtcccccctcgacgcgatcgtcgcggacggaactgccgaataccgccgcactggtgacagc

SEQ ID NO: 7279 - DNA, 3753 bp, synthetic construct
  misc_feature 1..3753: note = source = /note="Description of Artificial Sequence: Synthetic coding sequence"
  source 1..3753: mol_type = other DNA
atgagtactgagagggactctgagaccacgtttgatgaggactcgcaacccaacgatgaggtggtaccgtactccgatgatgagactgaggacgagcttgatgatcagggatcagcagtggagccagagcaaaatagggtgaaccgcgaggcggaagagaacagagagcctttcagaaaggaatgtacttggcaggtcaaggccaacgatagaaaatatcatgagcagccgcattttatgaacaccaagttcctttgcatcaaagagagtaaatacgcgaataacgctattaaaacctacaagtataatgctttcacctttatccctatgaacctgttcgaacaatttaagagagcagctaatctctatttcctagcactcctaatcctgcaagcagtaccgcaaatttcaacgttggcgtggtacaccaccctggtccctttgctcgtcgtccttggagtgaccgctatcaaggacctcgttgatgacgttgcaagacacaagatggataaagagattaataaccgcacttgcgaagtgattaaagacggaagatttaaggtcgccaagtggaaggagatccaagtcggtgatgtaatcagactaaagaagaacgatttcgtccccgcggacatattgttgctctccagctctgaaccaaactcgttgtgttatgtcgagaccgccgaattggatggtgagaccaacctcaaattcaaaatgtcactggagatcacggatcaatatcttcagcgggaggacactctggccacttttgacggctttattgaatgcgaggagccaaataaccgtctcgataagttcaccggaactcttttttggaggaatactagcttccccttagacgccgataagattctgttacgggggtgtgtaatcagaaacacagatttctgccacggcctggtgatatttgcaggtgctgacactaagattatgaagaatagtgggaagacgcgtttcaaaaggactaagatcgactaccttatgaactatatggtgtacaccatttttgtagtccttattcttctatctgccggcctggcgattgggcacgcctattgggaagctcaggttggtaattcttcttggtacctgtacgatggggaggatgacaccccctcctacaggggtttcctgatcttctggggttacatcatcgttctaaacaccatggtacctatcagtttgtatgtttcggtcgaagtgatccgactcggtcagtctcattttattaactgggatcttcaaatgtattatgcggagaaagataccccggccaaagcccgtacaaccacacttaatgagcagctgggtcagattcattatatcttctcagacaagacaggtacacttacacagaacataatgacgtttaagaagtgctgtattaacggccagatttacggcgatcatcgcgatgcctcccagcacaatcacaataaaatcgagcaggtggacttcagctggaacacctatgcagatggtaagctcgccttctacgaccactatctcatcgagcagattcaatccggtaaagaaccagaagtgcgacagtttttcttccttcttgccgtgtgtcacacagtgatggttgaccgtacggacggtcagctcaactatcaggctgcttctccggatgaaggagcacttgtcaatgctgcccgcaatttcggtttcgcttttttggctcgaactcagaataccattacaatttctgagcttggtactgaaaggacctataacgtgctcgccattctcgacttcaactcagataggaaaagaatgtccatcattgttcggaccccagaaggtaacatcaagctgtattgtaagggtgctgatacggttatctatgaaaggctgcacaggatgaatcctacaaagcaggaaacccaggatgcactagacattttcgcgaacgaaacattgcgaacgctctgcctttgctacaaagaaatcgaagaaaaggagtttaccgagtggaacaagaagtttatggctgcctctgtggcatcgacaaatcgcgacgaagcgttggataaagtctacgaggaaatagagaaggacttaattttgctcggcgccacggccatcgaggataaactgcaagacggagtccccgagacgatttcgaagttagccaaagcggacataaagatctgggttcttacgggcgacaagaaagagacggcggagaacatcggttttgcttgtgagcttctgacagaagatacgacaatttgttacggggaagacatcaactcgctgcttcatgcgcgtatggaaaatcagcgaaatcgcggaggtgtttatgctaagttcgcacctccagtccaagaatctttcttccctcccggtggcaaccgggctcttatcatcaccggttcttggctgaatgaaatcctcttagagaaaaagacaaagagaaacaaaattctcaagctgaagttcccacgaactgaggaggaacggcgtatgagaactcagtcaaaaaggcggcttgaagctaagaaggaacagcgacagaagaactttgtggacctcgcttgtgagtgctccgccgtgatttgttgtcgagttacccctaagcaaaaggccatggtcgttgacctcgtcaagcgatacaaaaaggctataacactagcaattggggacggagccaacgacgttaatatgatcaagacggcgcatataggagtcggtattagcggacaagaaggcatgcaagctgtaatgagcagtgattattcgtttgcgcagttccgttacctccaaagactactgttggtacatggtaggtggtcgtacattcgcatgtgcaaatttctccgctactttttctacaaaaattttgccttcaccctagtacatttctggtattctttctttaatggctattctgcgcagacagcctacgaagattggttcattacgctctataacgttctttacacctccttgcctgtgcttttgatggggttgctcgatcaggacgttagcgacaagctttcgctacgcttcccgggattgtatatcgttggacaacgtgatttacttttcaactacaagcgtttcttcgtttcattactccatggagtcttaacgtctatgatcttgttcttcatcccgcttggagcttacttgcaaaccgtcggtcaagacggcgaggccccttctgattaccaatccttcgccgtgacgatcgcttctgcccttgtgatcactgtcaatttccagatcggactggacacgagctactggacttttgtaaatgcattttcaatattcggcagcatcgctttatactttggtatcatgttcgactttcattcagccgggattcatgtgctattcccttctgcatttcagttcactggtactgcctctaatgcgctgcggcagccctacatctggttgaccatcatcctggccgtggccgtctgtcttttaccggtcgtggccatccgctttctgtccatgacaatctggccctcggagtccgacaaaatccagaagcatcgtaagcggttgaaggcggaagagcagtggcaacggagacagcaagtatttcgtcgtggcgtctctacccgtcggagcgcatatgcgttctcacaccaaaggggttatgcagacctaattagttcaggtcgtagcatccggaagaagaggtccccccttgacgctattgttgctgacggcacagccgagtaccggcgtaccggtgactcc

SEQ ID NO: 7280 - DNA, 3753 bp, synthetic construct
  misc_feature 1..3753: note = source = /note="Description of Artificial Sequence: Synthetic coding sequence"
  source 1..3753: mol_type = other DNA
atgtcaaccgagcgggactcagaaacaactttcgacgaagactctcagcctaatgatgaagttgttccatattctgatgatgaaactgaagatgaattggatgatcaaggatctgccgtagaacccgagcaaaaccgagtcaatcgagaagctgaggaaaatcgtgaaccatttagaaaggaatgcacttggcaagtgaaagcaaatgaccggaaatatcatgagcagccccactttatgaacacaaagtttctatgtattaaagaatcaaaatatgctaacaatgccattaagacttacaagtacaatgcatttactttcattccaatgaatttgtttgagcaattcaagagagcagcgaatctttacttcttggcattgcttattcttcaagctgtaccacagataagtacgctcgcatggtatacaacactagtgccattgttagttgttctcggagtaacagctataaaggatttggttgatgatgttgcaaggcacaaaatggataaagagattaataaccgaacatgcgaagtgatcaaagacggaagattcaaagtagcgaagtggaaagaaatccaagttggagatgtcattcgactgaaaaagaatgattttgtaccagctgatattcttctgcttagtagttcagagcctaattctctctgctacgtcgaaactgcggaactcgatggagaaacaaatttgaaattcaaaatgtcgctagagataacggaccaatatcttcagcgtgaagatacactcgctacatttgacggattcatcgaatgcgaagaaccaaataatcgactcgacaagttcacaggcacattgttctggaggaatacaagtttcccactggatgctgataagatattattacgtggatgtgttattcgtaatactgatttttgtcatggattggtcatctttgcaggtgccgatactaaaattatgaagaatagcggtaagacacgcttcaagagaactaaaatcgattacctcatgaactacatggtctacactattttcgttgtcctcatattattatctgcaggactggcaatcggacacgcttattgggaagcgcaagttgggaattcttcttggtacctttacgatggagaagatgatacaccaagttatagaggcttccttatcttttggggatatattatcgtacttaacacgatggttcctataagcttgtacgtatccgtggaagttattcgcctaggacaatcgcacttcatcaactgggatctccaaatgtactatgctgagaaagacaccccagctaaggcacgaacaacgacccttaacgaacaactggggcaaattcactatattttttcggataagacgggaactttgacccagaatattatgacgttcaagaagtgttgcatcaatggacagatttacggcgatcatcgcgacgcctcgcaacacaaccataacaaaattgagcaggtcgacttcagttggaatacgtacgctgatggcaaactcgcattctatgatcattacttgatcgaacagattcagagtggaaaagagcctgaagtaaggcaattcttcttccttcttgcagtatgtcacactgttatggtggataggaccgatggacaacttaattaccaagcagcaagtccagatgagggagcactagttaacgcagctcggaatttcggattcgcgttccttgcacgaacacagaatacaattactatatcagagttgggaacggaaagaacttacaacgtacttgcgatcctcgatttcaattccgatagaaagcgtatgtcaatcatcgttcggacaccagaaggtaatatcaagttatattgtaaaggagcagacaccgttatatatgaacgtttgcatcgaatgaatcctacgaagcaagaaacacaagacgcactagatattttcgctaatgagactttgaggaccttgtgtctctgctacaaagaaatagaggagaaggaattcactgagtggaataaaaaatttatggctgcatcggtagcaagcactaacagagacgaagccttggataaagtttatgaggaaattgaaaaggacctcatcttgttaggtgctaccgcaattgaggacaaacttcaagatggagtacctgagacaatttctaaacttgccaaggcggacataaaaatttgggtactgaccggtgataaaaaggagactgcggagaacattggatttgcatgcgagctactaactgaagacacaacaatttgctacggagaggacatcaactcattactccacgccagaatggaaaaccaacgaaatcgcggaggtgtttatgctaaatttgctccaccggtacaagaatcattcttcccgcctggtggaaatagagcgttgattataactggatcgtggctaaatgagatactcttggaaaaaaaaactaaaaggaataagatactgaaactcaaattcccacgaaccgaggaagaaagaagaatgagaacacagtcaaaacggagactggaggctaaaaaggaacagagacagaaaaattttgttgatttggcttgcgaatgttccgcagttatctgctgtagagttacaccaaaacaaaaagctatggttgttgacttggtgaaacgatataaaaaggctataactctcgcgattggagatggagcaaacgatgttaatatgattaagactgctcacatcggagttggtatttctggacaagaaggaatgcaagccgttatgtcatctgactacagcttcgcccaattccgctatttacaacgtctattattggtgcacggacgatggtcatatattagaatgtgtaagttcctccgatacttcttctataaaaacttcgcattcaccctggtacatttttggtacagctttttcaatggctatagtgcacaaacagcttacgaggattggttcatcactctctataatgttctttacacatcactgccagttcttctcatgggtttacttgatcaagacgtttcggataagctctcacttcgatttccaggactttatattgtcgggcaaagggatcttctatttaattacaaaagattcttcgttagtttgctgcacggagttctgacttccatgattctcttttttatcccgttgggagcatatcttcagacggtgggtcaggatggtgaggcaccaagtgattaccaatcattcgctgtgaccattgcgagtgctttggtcattacagttaattttcaaataggcttggacacttcgtactggacattcgttaacgctttttccatttttggatcaatcgccttatactttgggatcatgtttgatttccacagtgctggcattcatgtcctatttccatcagcctttcagttcactggaactgcttctaacgcccttaggcaaccttatatttggttaactatcattcttgctgtggctgtgtgcctgctcccagtcgttgcaatcagatttttgagtatgacaatttggccttcggaatctgataaaatccaaaaacaccgcaagcgtttaaaagccgaggaacagtggcagcgtagacaacaggttttcagacgaggagtgtcaacccgacgaagtgcctacgccttctcacatcaacgaggttatgcggacttaattagttcgggacggtcgattcgtaaaaagcgttcccccctcgacgccattgtcgcagatggtaccgccgaatatagaagaactggcgattca

SEQ ID NO: 7281 - DNA, 3753 bp, synthetic construct
  misc_feature 1..3753: note = source = /note="Description of Artificial Sequence: Synthetic coding sequence"
  source 1..3753: mol_type = other DNA
atgtcgaccgaaagagattccgaaacgacctttgatgaggattcccagccgaacgatgaggtggtgccatattcggacgacgaaaccgaggacgaactggatgatcagggaagcgccgtggaacccgaacaaaaccgggtcaaccgcgaggcagaagagaacagagaaccgttccggaaggaatgcacttggcaagtgaaggccaacgaccggaagtaccacgaacagccgcatttcatgaataccaaattcctttgcattaaagagagcaagtatgccaacaatgccatcaagacctacaaatacaatgcattcaccttcatccctatgaacctgtttgaacagttcaagcgcgcggccaatctgtatttcctggctcttctcatcctccaagcagtgccacaaatctccactctcgcctggtatactaccctggtcccgctgctcgtcgtgctgggcgtcactgcgatcaaggatctggtggacgacgtggccagacataagatggataaggagatcaacaatcgcacctgcgaagtgatcaaagatggccggtttaaggtcgctaaatggaaagaaatccaagtgggggatgtgatcaggctcaagaagaatgatttcgtgcctgctgacatcctccttctctcctcaagcgagccgaattcgctctgctacgtcgagacggcagaactcgacggagaaaccaacctgaagttcaagatgtccctggaaatcaccgaccagtaccttcagcgcgaggatactctggctaccttcgacgggttcatcgaatgtgaagagccgaacaaccgcctggacaaattcaccggcactctcttttggcggaacacctcttttcctctcgacgcagacaaaattctgctgcggggatgcgtcatcaggaacactgacttctgccacggcctggtcatcttcgcgggggcagataccaagatcatgaaaaactccggcaagacgagattcaagagaactaaaatcgactacctcatgaattacatggtgtacactattttcgtggtccttatcctgctgtctgctggactggctattggccacgcgtactgggaggcccaggtcggcaattcgtcctggtacctctacgacggagaggatgatactccaagctatagaggttttcttatcttttgggggtacatcatcgtcctgaacactatggttcctatctccctctacgtgtcagtggaagtgatccgcctggggcagtcgcacttcatcaattgggacctgcaaatgtactacgccgagaaggataccccggcaaaggccagaactactacgctgaacgaacagctgggacagatccactacattttttcagacaagaccggaacgcttactcaaaatatcatgaccttcaagaagtgttgcatcaatggccaaatctacggcgaccaccgcgatgcatcacagcataatcacaacaagatcgaacaagtagacttctcctggaacacttacgcagatggtaagctggcattttacgatcattacctcattgagcaaatccagagcggaaaagaacccgaggtgaggcagttctttttcctgcttgcggtgtgccacactgtcatggtggaccgtactgacggccagctgaactaccaggccgcgtcaccagacgaaggagctctggtcaacgccgcgcggaacttcggattcgcgtttttggctcggactcagaacaccatcacgatcagcgagctgggaacggaaaggacctacaatgtcctggctattcttgacttcaactcagaccgcaagcgcatgagcatcatcgtgcgcaccccagaaggaaacatcaagctctactgcaagggagccgacaccgtgatttacgaaagactccatcggatgaaccctaccaaacaagaaactcaggatgcgctggacatcttcgccaatgagactttgcgcaccctgtgcctctgctacaaggagatcgaagaaaaggagttcaccgaatggaacaagaagttcatggctgcctcggtggcctccaccaatcgggatgaggctctggacaaagtctacgaggaaattgaaaaagacctcatactcctgggagcaactgccatagaggataaactgcaggacggtgtgcccgaaaccatcagcaaactggccaaggcggacatcaaaatctgggtgctgactggagacaagaaagaaaccgccgaaaacattggattcgcctgtgaattgctgaccgaggacactaccatctgttacggtgaagatatcaattcgctcctgcacgcgcgcatggagaatcagcggaacaggggaggggtgtacgccaagttcgcccctcctgtgcaggagagctttttcccgccgggaggcaacagggcgcttatcatcactggtagctggttgaacgaaatcctgctggaaaagaaaaccaagcgaaataagatcctgaagctcaaatttccgcgcactgaagaggaacggagaatgagaacccagtcaaagcgccgattggaggcgaagaaggagcaacgacagaagaatttcgtggatctggcttgcgagtgcagcgcggtcatctgttgtagagtcactccgaaacagaaagcgatggtggtggacctcgtcaagcggtacaagaaggccattaccctcgccatcggagacggcgcaaacgacgtgaacatgatcaagaccgctcatattggagtgggaatctcaggtcaggagggcatgcaggcagttatgtcgtcagactatagtttcgcccagttccggtatctgcaacggctcctgctcgttcatggacgctggtcctacattagaatgtgcaagttcctgaggtacttcttctacaaaaacttcgccttcaccctcgtccatttctggtactcattctttaacggatactccgcgcaaacggcgtacgaggattggttcatcactctgtacaacgtgctttacacctcgcttccagtgctgctgatgggactcctggaccaagatgtgtcggacaagttgtccctgaggttcccgggcctgtacattgtcggtcagagggacctcctcttcaattacaagcgcttcttcgtgtccctcctccacggagttctgactagcatgattttgttttttatcccgctgggggcgtacttgcaaacggtgggacaagacggggaggccccgagcgattaccagtccttcgccgtgactatcgcatcagcgctggtcatcactgtgaacttccagatcggactggacacctcgtactggacctttgttaatgctttttcgatctttgggtctatcgcactctacttcggaatcatgttcgacttccactcggcgggaatccacgtgttgttcccctcggcattccagttcactggcactgcctccaacgccttgcggcagccctacatctggctgactatcatcctggcagtggccgtgtgcctgttgccagtggtggccatccggtttttgtcaatgaccatttggccaagcgagagcgacaagatccaaaagcaccgcaagagactgaaggcggaagaacagtggcaacgtcgccagcaggtatttcgccggggagtgtcaacgcggcggtccgcctacgccttctcccatcaacgcggatacgctgatctgatctcgtcggggcgctcgattcgcaagaaaagatccccactcgatgctatcgtcgccgacggtaccgcagagtaccgccgaaccggcgattcg

SEQ ID NO: 7282 - DNA, 3753 bp, synthetic construct
  misc_feature 1..3753: note = source = /note="Description of Artificial Sequence: Synthetic coding sequence"
  source 1..3753: mol_type = other DNA
atgtccacggaaagagactcggagacaactttcgatgaggacagccagcccaacgacgaagtggtgccctatagtgacgatgaaaccgaagacgaactggatgaccagggtagcgccgttgagccagaacagaatcgtgtgaaccgggaggccgaggaaaacagagagccatttcggaaagagtgcacctggcaagtcaaggcaaacgaccgcaaatatcacgagcagccgcattttatgaacacaaagtttttgtgcatcaaggaaagcaaatatgctaacaatgcaatcaagacttataaatacaacgccttcacttttatcccgatgaacctgtttgagcagtttaagcgagctgcaaacctgtattttcttgcactgctgattctgcaggccgtcccccagatctcgacattagcttggtatactaccttagtccccctgcttgtagttctgggcgtgacagccatcaaggacttggtcgacgatgtggccaggcacaagatggacaaagaaataaataaccggacctgcgaagtcataaaggatgggcgcttcaaggtggccaaatggaaggagatacaggtaggcgatgtgatccgacttaagaagaatgattttgtgcccgctgacatactcctgctgagttcatccgaaccgaattctctgtgctacgttgagacggccgagctggacggagagaccaatttaaaatttaaaatgtctcttgagatcactgaccagtacctgcagcgagaagataccctggctacattcgatggcttcattgagtgcgaggagcctaacaacaggcttgataagttcacaggcaccctgttctggaggaacacttccttcccattagatgctgacaagatcctgctgcggggctgcgtgatcagaaacacagacttctgtcacggactggtcatttttgccggtgccgacacaaagataatgaagaacagcggcaagacaaggttcaagcggacgaaaattgactacttgatgaactatatggtgtacaccatttttgtggtcctgatacttctaagcgccggcctcgcgatcggccacgcttattgggaggctcaggtgggcaacagttcttggtatctgtatgacggcgaagacgatactccatcctatcggggcttcttaatcttttggggatacataattgtgctgaatactatggtaccgatatccctctatgtaagcgtcgaggtgatcaggctgggtcagtcccattttatcaattgggatctgcagatgtactatgccgaaaaggatacccccgccaaggcccggacgaccaccttgaatgaacagctcgggcagatccactatattttcagtgacaaaacaggtacattgacacaaaatattatgacttttaaaaagtgctgcataaacggacagatttacggggaccacagggacgctagccagcacaaccacaacaaaatcgaacaggtggacttttcctggaacacttatgccgatggcaagctagcattttacgatcactacctgatcgagcagatccaatcaggaaaggagccagaagtgcgtcagttcttctttctactggcagtctgtcataccgttatggtggatcgcacagacggccagctgaactatcaggctgcgtcgcccgacgaaggcgccctagtcaatgctgcacgcaactttggatttgcgttcctggcacgcacgcagaacactatcacaatatcagagctgggcaccgagcgaacctataatgtcctcgctattctggacttcaactcagatcgtaaacgcatgagcattattgtgcggacaccagagggtaatataaaattgtattgcaaaggagctgatacagtgatatacgaacggttgcacagaatgaatcctacgaagcaggaaactcaggatgctctcgacatctttgctaacgagacgctcaggactctctgtctgtgttacaaagaaattgaagaaaaagaattcactgagtggaataaaaaatttatggcagcctctgtcgcgagcactaatagggatgaggcgttggataaagtgtacgaggagattgagaaggatctgattctacttggagctacagcgattgaagacaagctgcaggacggtgtgcccgagaccatctcaaagctggctaaggcagacatcaaaatctgggtactgaccggtgacaagaaagaaaccgcagagaatatcggatttgcttgtgagctactaacagaagatacaacaatctgctatggagaggatatcaactccttgctccacgcccgcatggagaatcagcgtaatcggggaggagtctacgcaaaattcgctccaccagtacaggaatcttttttcccaccagggggaaatagggcactgatcattacaggatcctggctgaacgaaattttgctggaaaagaaaacgaagcggaacaagatattaaagctgaaatttccgaggactgaggaagaaaggcgcatgcgtacacagtccaagcgtcgactagaggcaaagaaggagcagaggcagaagaacttcgtcgacctcgcatgcgagtgtagtgccgttatatgttgccgagtgacaccgaagcagaaagccatggtggtggatctggtgaaaaggtataagaaagccatcacactcgccattggcgacggagcgaacgatgtgaatatgattaaaacagcccacattggcgtcggcatcagcggccaggagggtatgcaggcagtgatgagtagtgactactcattcgcccaattcaggtatctgcaaagactgctcctggtgcacgggcggtggagctatatccggatgtgcaaatttctccgttattttttttacaaaaacttcgcgtttacattggttcatttttggtacagctttttcaacggctactcagctcagactgcttatgaggactggtttatcactctttacaatgtgctgtacacttccttgcctgtactccttatgggtcttctggaccaagacgtttctgacaaactgagtttacggttccctggcctttacatagtcggccagcgcgatctcctattcaactataagagatttttcgtgtccctccttcacggggtgcttacatcaatgatcctgttttttattcccctcggagcctatctgcaaacagtggggcaagacggagaggccccttctgactaccagtcgtttgcagttacaatagcaagtgcattagtaataacagtgaatttccaaatcggtctggatacatcttactggactttcgtgaacgcattttccatcttcggatctatcgctctttacttcgggatcatgttcgacttccactctgctggcatacatgtgttatttccaagcgcctttcagttcactgggacagcctccaatgcgttgcgacagccatacatctggttaacaatcattctcgccgtggccgtttgcctgcttccagtggtggccataaggtttttaagtatgaccatatggccctccgagagcgataagatacagaaacaccgaaaaagactgaaggctgaagagcagtggcagagaaggcaacaggtttttcggcggggagtatccactagacgctctgcctacgcatttagtcatcagcgcggttacgctgacctgatctcatcagggagaagtatcagaaaaaagcggagccccctggatgccattgtggccgatgggactgcagaatacagacggacaggtgactca

SEQ ID NO: 7283 - DNA, 3753 bp, synthetic construct
  misc_feature 1..3753: note = source = /note="Description of Artificial Sequence: Synthetic coding sequence"
  source 1..3753: mol_type = other DNA
atgtcaaccgagcgcgatagcgaaacaacctttgacgaggattctcagcccaatgatgaagttgtgccttacagtgatgatgagactgaggatgaactggatgaccaaggctctgcagtcgaaccagagcaaaacagggtcaatagagaggccgaagaaaatcgcgaacccttcaggaaggaatgtacctggcaggtgaaggcaaacgatcggaagtaccacgaacagccacattttatgaacacgaagtttctgtgtatcaaggagtccaaatatgctaataatgcaattaaaacttacaagtacaatgcctttacttttattcctatgaacctttttgagcaattcaagagagcggctaatttatatttcttggctctgctgatactccaggccgtccctcagattagcacattggcctggtataccacgttagtccctctgctggtcgttctaggagtgaccgcgatcaaggaccttgtggatgatgtggcgagacacaaaatggacaaggagatcaacaatcgtacttgcgaagttatcaaggacggtcgctttaaagttgcaaagtggaaggagatccaggtcggggacgtcataagactcaaaaaaaatgatttcgtaccagcagatatccttctgttgtcgagtagtgagcccaattcactgtgttacgtggagacagcagagctcgacggagaaaccaacctcaagtttaagatgtccctggaaattactgaccagtaccttcaacgggaggacacgcttgccacattcgatggttttattgagtgcgaagagccaaataatcgcctggataagttcacaggcactcttttctggaggaacacgagctttcccctcgatgcggacaagatactcttgcggggctgtgtgatccgaaataccgacttttgtcacggactcgtgatttttgccggcgccgacacaaagatcatgaagaactctggtaaaactcggttcaagcggaccaagattgactacctcatgaactacatggtctatactatcttcgtggttcttatcctactgtctgcaggattggccatcggacacgcatactgggaggcgcaggtagggaattcctcttggtacctctatgacggagaagatgatactcccagctaccgcggttttctcattttttggggctacatcattgtactgaatactatggtgccgatctccctgtacgtgtctgtggaggtcattaggctgggacagagccatttcattaactgggatctgcaaatgtattatgcagagaaagatacaccagctaaggctcgcactacgaccctaaacgaacagcttggccagatccactatatcttctcagacaagacgggcactctgacacagaatattatgactttcaaaaaatgttgcattaacggacagatttacggagatcaccgggacgcctcccaacacaaccacaacaaaattgaacaagttgatttcagctggaacacatatgccgatggtaaactcgccttttacgaccattacttaattgagcagatacagagtgggaaggagcctgaggtgcggcagttcttcttcctgctcgccgtatgccacactgtaatggtggaccggactgacgggcagctcaactatcaggcagcatcaccggatgaaggggcactcgtgaacgctgctcgtaactttggattcgctttcctggctagaacccagaatactattacaatctcagaattagggaccgaaaggacatacaacgtgttggccatcctggactttaacagtgaccgaaagcggatgagtatcatcgtacgaaccccggagggaaacatcaagttgtattgtaaaggggcagatactgtgatttacgaacgattgcatcgtatgaaccccaccaaacaggaaacccaagacgccctggacatcttcgcgaatgaaacattgagaactctatgcctgtgttacaaagagatcgaggagaaagaattcaccgagtggaataagaagtttatggcggcctcagttgcctctaccaaccgggatgaggctctggataaagtttatgaggaaattgagaaggatttaatccttttaggcgctaccgcaattgaggataaattgcaggacggggtgcccgaaactatctccaagctggctaaagccgacatcaagatctgggtgcttaccggtgacaagaaggagacggccgaaaacatcggattcgcttgtgaactcctgaccgaggacaccacgatatgttatggagaggatatcaactctctcttgcacgcgagaatggaaaaccaacggaacaggggcggtgtgtacgccaagttcgctccacctgtccaggagtcctttttccccccaggcggaaacagggcgctgatcatcacaggaagctggttgaacgagatccttcttgagaaaaaaacgaaacggaataaaatcctaaaattaaagtttcctcggacagaggaagaacgaaggatgcggactcaatccaaaagacgcctggaggcgaaaaaggagcagcgccaaaaaaactttgttgacctagcgtgtgagtgctctgcagtgatctgttgtcgcgtcacccccaagcagaaggctatggtcgtcgacctggtgaagcgctacaagaaggccatcactcttgcaatcggagatggagccaacgatgtcaacatgataaaaactgcccacatcggggtaggtatctctggccaggagggcatgcaggctgtcatgagcagcgattattcttttgcccagtttcggtatctgcagcgcctgctgctggttcacggacggtggtcttacatccggatgtgcaaattcctacgatattttttctataagaacttcgcctttaccctcgtacatttctggtacagtttctttaatggctattccgcacaaacagcatatgaggactggtttatcaccctctataatgtcctgtacacgtctctgccagtgctgctgatgggacttttggaccaggatgtgagcgataaactgtcattgagattcccggggttatacatcgtgggccagcgggacctactttttaactacaagaggttttttgtgagtttactgcatggtgtgcttacgtcgatgattctcttttttattccattgggggcgtatctacagaccgtaggacaggacggggaagccccctctgactaccagagcttcgccgtcacgatcgcgagcgccctggttattactgtaaacttccaaattggacttgatacctcttactggacatttgtgaacgctttttcaatctttgggtctattgccctttacttcggcataatgtttgacttccattctgccggcatccacgtactgttcccaagcgcatttcagttcaccggaaccgccagtaacgcactgcggcagccgtatatttggctcaccataatcttggccgtggcagtgtgcctgcttccagtggttgctatccgctttctcagcatgactatatggccttccgagtctgacaagattcagaaacatcgaaaacggctgaaggccgaggagcagtggcagcgcaggcagcaagtgttcagacgaggcgtgtcaactcggaggtcagcttacgccttttctcatcagaggggttatgccgatttgatctcttccggaaggtcgataagaaaaaagcggtctcctctagacgcaatcgtggccgacggtacggctgaataccgtcggacaggcgacagc

SEQ ID NO: 7284 - DNA, 3753 bp, synthetic construct
  misc_feature 1..3753: note = source = /note="Description of Artificial Sequence: Synthetic coding sequence"
  source 1..3753: mol_type = other DNA
atgtctacggagagggattctgagaccaccttcgacgaagactcgcaaccgaatgacgaggtcgtgccatactcagacgatgagaccgaggatgagctcgacgaccaagggtctgcagtcgaacccgagcaaaatagggtaaatagagaggctgaggagaaccgcgagccatttagaaaggagtgtacttggcaggtcaaagcaaatgataggaaataccatgaacaaccacactttatgaacacaaagtttctctgcattaaggagtctaagtatgccaataacgccatcaaaacgtacaagtataatgccttcacctttattcctatgaacttgttcgagcagtttaagagagctgctaatctctactttttagcactgctcattctgcaggccgtaccccagataagtaccctggcgtggtacacaaccttggtgcccttgctggtcgtgctaggcgttacagcaatcaaggacctggtcgatgacgtggccaggcataagatggacaaggaaatcaacaaccgcacttgtgaagtcattaaggacggccgctttaaagtggctaaatggaaagaaatccaggtgggggacgttattcgtctaaagaagaatgattttgtgcccgcagacatccttctcttgagttcatcagaacccaattccctgtgttatgtcgaaaccgccgaactagatggcgagaccaatcttaaattcaaaatgtccttggagatcacagatcaatatttgcaacgggaagacacccttgctacattcgatggttttattgagtgtgaagagccgaataacagactggacaaatttaccgggaccttgttctggaggaacacatcctttcctttggatgctgataaaattctcctcaggggctgtgttattaggaataccgatttctgccacggtctggtcatctttgccggagctgataccaaaattatgaaaaacagcggaaaaacgaggttcaagcgtaccaagatagattacttgatgaactacatggtctacacaatctttgtggtcttgattcttctgtcagccgggctggctattgggcatgcctattgggaggcccaggtgggcaacagttcttggtacctttatgatggggaggacgacacgccctcatatcgagggttcctgattttctgggggtatatcatagttctgaacactatggtaccaatctccctgtacgtcagtgttgaagtcattaggctgggacaatcccatttcatcaattgggatttgcagatgtattatgcggagaaagatactccagccaaggccaggacaacaactctgaacgaacaattggggcagattcattacatcttttctgataaaacaggtacccttacccagaatatcatgacctttaaaaagtgctgcattaatgggcagatatatggcgatcatagggatgctagtcagcacaaccataacaaaatagaacaggttgatttctcgtggaacacttacgctgatggaaaattggctttctacgaccattatctgattgaacagatccagagcggaaaagagcccgaggtaaggcaattctttttcctgctagccgtgtgtcacaccgtgatggtggatagaactgacggccagctgaattatcaggctgccagtcctgatgaaggggccctcgtgaatgcagcgcggaattttgggtttgctttcttggccagaactcagaacactatcactatcagtgaactggggacagagcggacctataacgtcctcgcaatattagatttcaattccgatcgcaagcgcatgagcatcatcgtgcggactccagaagggaacattaaactatattgcaagggggcagatacagtcatatatgagagactgcacaggatgaaccccacgaaacaggagacccaggacgcattggatatctttgccaatgagacccttaggacgctctgtctatgctacaaggagattgaggagaaggaattcacagagtggaacaaaaaatttatggccgcttctgtcgcaagtaccaatcgggacgaggccttagacaaggtgtatgaggaaattgaaaaggacttaatcttgttgggcgcaactgctatagaggataaacttcaggacggcgtacccgagacaattagcaagcttgctaaagccgacatcaagatctgggtgctgaccggcgataaaaaagagactgctgagaatataggcttcgcgtgcgagctgctgacagaggacacgacaatctgctatggcgaagatattaacagtctcttacacgcgcgtatggaaaaccagcgaaaccgtggcggcgtctatgcgaaattcgctcccccggttcaggaatctttttttccaccgggcggcaatagagccctgattattacaggaagctggctcaacgaaattctgttggaaaagaagacgaagagaaacaaaatcctcaaactgaagttcccaagaacagaagaagagcgcagaatgaggactcagtctaagcggcgccttgaggcgaagaaggaacagcgtcagaagaacttcgtggatctcgcatgcgaatgtagtgccgtgatatgttgccgcgtgactccaaaacagaaagccatggtggtcgatctggttaagcgctacaagaaggctattaccctggctattggagacggagcaaatgacgtgaatatgattaagaccgcgcatatcggggtgggtatcagcggacaggagggaatgcaggctgttatgtctagcgattactcttttgctcagttccgctacctccagcgactcttgcttgtgcacggccgttggtcgtacattcgtatgtgcaaatttcttcgctacttcttttacaaaaactttgcgtttacactggtccacttctggtactcattttttaatggctatagcgcgcaaacagcctatgaggattggtttatcaccctgtacaatgtgctctacacttcattgcctgttctgctcatgggccttctcgatcaggacgtctcggataaactctccctacgctttcctggtctgtacattgtaggccaaagggacctgcttttcaactacaaaaggttcttcgtgagcttgctgcacggtgttctcacctcaatgatcctgttttttatacctctgggcgcatacctgcaaacagtgggccaagatggggaggccccctctgattaccaatccttcgctgttacaattgcttccgcgctggtgatcaccgttaactttcagattgggctcgacacctcatactggactttcgtcaacgcattctctatttttggatccatcgctctgtattttggcattatgttcgattttcattcagcagggattcacgtgctgttcccatctgcgtttcagttcactggtaccgcttccaacgcactacggcaaccatacatttggcttactatcatcctcgccgttgccgtctgtctgctgcctgtggttgcaatacggtttttgagcatgacaatttggccaagcgagagcgacaaaattcagaaacaccgcaaacgactgaaagccgaagagcagtggcagaggcgtcagcaggtttttaggagaggtgtatccacacgaaggtctgcctacgctttcagccaccagcgggggtatgctgacctcatctcctctgggaggtcaatcaggaaaaagaggtctccactggacgctatcgtggcggacggcacagcagagtaccggcgcacaggagactcc

SEQ ID NO: 7285 - DNA, 3753 bp, synthetic construct
  misc_feature 1..3753: note = source = /note="Description of Artificial Sequence: Synthetic coding sequence"
  source 1..3753: mol_type = other DNA
atgtcgaccgaacgcgattcagaaaccactttcgacgaggactcccagccgaacgatgaggtcgtcccgtacagcgacgatgaaaccgaagatgagctggatgatcagggatcggctgtggagccggagcagaatagggtgaacagagaagcagaggaaaaccgcgagccgttcagaaaggaatgtacgtggcaagtgaaagcgaatgacagaaagtaccatgaacagccgcatttcatgaacactaagttcctgtgcatcaaagagtcaaagtacgctaacaatgccatcaagacctacaaatacaatgcgttcactttcatccctatgaatcttttcgaacaattcaaaagagccgccaacctgtactttctggccctgctgattttgcaagccgttccgcagatctcgacgctggcatggtacaccacgctggttccgctcctcgtggtgctgggagtgacggccatcaaggacctcgtcgacgacgtggcacgccataagatggacaaagagattaacaacagaacctgtgaagtcattaaagacggaaggttcaaggtggccaagtggaaagagatacaggtgggcgacgtgatccgcttgaaaaagaatgattttgttcccgccgacatcctgctcctcagctcatcggaaccaaacagcctctgctacgtggaaaccgcagaactggacggagagactaacttgaagttcaagatgtcattggagatcactgaccaatacctccaaagagaagatacgctcgccaccttcgacggctttatcgagtgcgaagaaccgaacaaccggcttgacaagtttactggaacgctgttctggaggaacacttccttcccgctcgatgctgacaagatcctcctgcggggatgtgtgatccgcaacactgatttctgtcacggcttggtgatcttcgcgggtgctgacactaagatcatgaagaattcgggaaagacccggttcaaacggaccaagatcgactacctgatgaactacatggtctacaccattttcgtcgtgctcattctgctcagtgcgggactggccattggacacgcctactgggaagcccaagtcgggaacagcagctggtacctctacgatggcgaagatgatactccatcgtacagaggatttctgatcttttggggatacattatcgtgctcaacaccatggtcccgatctcgctgtatgtctccgtggaagtcatccggttgggacaaagccacttcatcaactgggacctgcaaatgtactatgcggagaaggacactccggcaaaagcccggaccaccaccctgaacgaacagctggggcagatccactacattttctcggataaaacgggaactttgactcagaatatcatgactttcaagaaatgctgcatcaacggacagatttacggagatcatcgggacgcatcacagcacaatcacaacaaaatcgagcaggtggacttcagctggaatacttatgcagacggcaaactcgcattttacgatcattacctcatcgaacagatccaatcagggaaggagccggaggtgcggcaattctttttcctgcttgcggtctgccacactgtgatggtggaccggaccgacggccaactgaactaccaagccgcatccccagatgaaggagccctggtcaatgctgcgcgcaatttcggattcgccttcctcgccagaacccaaaataccatcaccatctctgaattgggaaccgaacggacctacaatgtgctggctatcttggacttcaattcggaccggaagagaatgagcataattgtgcggacccctgagggcaacatcaagctctactgcaaaggagcagacactgtgatttacgaacggctccaccggatgaaccccacgaagcaagaaactcaggacgccctggacatctttgccaacgaaaccctcagaaccctgtgtctctgctacaaggagatagaagagaaggaattcactgaatggaacaaaaagttcatggccgcatcggtcgcgtctactaaccgcgatgaagccttggacaaagtgtacgaagagatcgagaaggacctgatcctgctgggtgcgactgcgatcgaagataaacttcaggatggagtgcccgagactatttcgaagctggccaaggcggacatcaaaatctgggtgctgaccggcgataagaaggaaaccgcggaaaacatcgggttcgcctgcgaactgctgaccgaagataccacgatctgctacggagaggacatcaacagcctgctgcacgcgagaatggaaaaccagcgaaatagagggggagtctacgcaaagtttgcgcctccggtccaggaatcctttttcccaccggggggcaatagagccctgatcatcaccggaagctggctcaacgagatcctgctggaaaagaaaacgaagcgcaacaagatcctgaaacttaagttccctcgcaccgaagaagagagaagaatgagaactcagtcaaagcgccggctcgaagccaaaaaggagcaaagacagaagaatttcgtggacttggcgtgcgaatgctcggcagtgatctgttgccgcgtgacccctaagcagaaggccatggtcgttgatttggtgaagagatataagaaggccattactctggccataggagacggagcgaacgacgtgaacatgatcaagactgcgcacatcggagtgggaatttcgggacaggaggggatgcaagcagtgatgtcatcagactacagcttcgcgcagttccgatacctccagcgcctgctgctggtgcacggaagatggagctacatcaggatgtgcaaattcctgcggtacttcttctacaagaattttgccttcaccttggtgcacttctggtacagttttttcaacggatactcggcacagaccgcctacgaagattggttcattactctgtacaacgtgctttacacttcactgcctgtgctgctgatgggactgttggatcaggacgtgagcgataagctgtcccttcggttcccggggctctacattgtgggccagagggatctcctgttcaattacaaaaggttcttcgtgtcgctgctgcatggtgtccttacctccatgattcttttctttatcccgctgggcgcgtaccttcagaccgtgggacaagatggagaggcaccttcagattaccaatccttcgcggttactattgcgtcggctctggtcatcactgtgaatttccagatcggacttgacacctcctactggacttttgtcaacgctttctcaatctttggatcaatagccttgtattttggcatcatgtttgacttccactcagctggcattcacgtcctttttccctctgccttccagtttacgggcactgctagcaacgccctcagacagccctatatctggctgaccatcattctggccgtcgcggtctgcctcttgccggtggtcgcgatccgcttcctctcgatgactatatggccgtccgagtccgacaaaatccagaagcaccgcaagcggctcaaggccgaggaacagtggcagcgacgccaacaggtctttcgcagaggggtgagcacgcgccgctctgcttacgcattctcacaccagcgcggatacgctgacttgatttcgtccgggaggtcgatccgcaagaagagatcgccactggacgcaatcgtggcggacggaaccgccgagtatcggcgtaccggagactcc

SEQ ID NO: 7286 - DNA, 3753 bp, synthetic construct
  misc_feature 1..3753: note = source = /note="Description of Artificial Sequence: Synthetic coding sequence"
  source 1..3753: mol_type = other DNA
atgtcgacggaacgcgattccgaaacgacctttgatgaggactcacaacctaacgatgaggttgtgccatactctgatgatgaaaccgaggatgaactggacgatcaaggctcggcggtggagccggagcagaaccgggtgaacagagaagcagaggagaaccgcgaaccatttcgcaaggaatgtacttggcaggtgaaggcaaacgatagaaaataccacgaacaaccgcatttcatgaatactaagtttctgtgcattaaggaatccaagtacgcaaacaacgctattaagacttacaagtacaatgcattcacctttatcccaatgaacctctttgagcagtttaagcgagcagctaatctttacttcctggcccttcttatccttcaagcagtgccccagatttcaactctcgcatggtacacgactcttgttcctctcctggtcgtgctcggtgtgacggctatcaaagaccttgtcgatgatgtggcaagacacaagatggacaaggaaatcaacaaccggacttgtgaagtgattaaggatggcagatttaaggtggccaaatggaaggagattcaggtgggtgacgtgattcgattgaagaagaacgattttgtccctgcagatattctgctgctttcgtcctcggaacctaattccctgtgctacgtggaaactgcagaattggatggtgaaaccaacctgaagttcaaaatgtcacttgaaattactgaccaatacctccagcgagaagataccctggctacctttgatggcttcattgaatgtgaggagccaaacaacagacttgataagtttactggaactcttttctggagaaacacgtcatttcccctggacgcagataagattcttctgagaggatgtgtgatcagaaacacggatttttgtcatggacttgtgatatttgctggcgccgacaccaagattatgaagaactccggaaagactagattcaaaagaaccaagatagactaccttatgaactacatggtttacaccattttcgtcgtgttgatattgctctcagcaggtctggcgattgggcatgcctactgggaagcccaggtcggtaactccagctggtacctgtacgatggtgaggatgatacccctagctatagaggctttctgatcttttggggatacataatcgtgctgaacactatggtgcccatttcactttacgtctcagtggaagtgattcggctgggacaaagccatttcataaactgggatctccaaatgtactacgcagaaaaggatacccccgccaaagcgaggaccaccaccctgaacgagcagctcggtcaaattcactacatattcagtgataagaccggtactttgacccagaatatcatgaccttcaagaagtgctgcattaatggtcagatttacggagatcatagagatgcctctcaacataaccataacaagattgaacaggtcgacttttcgtggaatacttacgctgatggcaaacttgcgttttacgatcactaccttatcgagcaaatccagagtggaaaagaacccgaggtgcggcagttcttttttctgctcgctgtgtgccacaccgtgatggtggaccggaccgatggacaacttaactaccaagccgcgtccccagatgaaggagcacttgtgaatgcggctcgtaatttcggattcgcatttctcgcacggacgcaaaacactattaccatctcggaacttggtaccgagaggacttacaacgtcctcgccatcttggactttaactcggatcgtaagcgcatgtcaattatcgtgcggactcctgaaggtaacataaagctgtactgcaagggagcagatactgttatctacgaacgcctgcaccgcatgaaccctaccaaacaggaaacccaggatgcgcttgacatatttgcaaatgaaaccttgagaacgctttgcctttgttacaaagaaatcgaggaaaaggaatttaccgaatggaataagaagtttatggcagcaagcgttgcatctaccaaccgggatgaggcgcttgacaaggtgtacgaggaaatcgaaaaggacctgatacttctgggcgcgaccgctatcgaagataagttgcaggatggtgtccctgaaactatctcaaagctggcgaaagcagacattaagatctgggtgctcaccggagataagaaggagactgcagaaaacattggatttgcatgcgaactcctgaccgaggacactacgatctgctacggtgaagatatcaactcgctgctgcatgcacgaatggaaaatcagcggaaccggggaggcgtctacgcaaagtttgcgccaccagtccaagaatctttctttccccctggaggtaatcgcgcgttgataatcactggatcctggcttaatgaaattctccttgagaagaaaactaaaaggaacaagatccttaagctgaaatttccaaggaccgaagaggaacgcagaatgagaactcaatcaaaacggcgacttgaagcaaagaaggaacagcggcaaaagaactttgtggaccttgcatgtgaatgttccgcagtcatttgttgtcgcgtcactcccaagcaaaaagctatggtggtcgatctggtcaagagatacaagaaggcaatcaccctcgcgatcggagatggggctaacgacgtgaacatgatcaaaactgcgcatattggcgtggggatttcaggacaagaaggcatgcaggccgtgatgtcatcggactacagcttcgctcagttccggtacctccagcgtctgctgctggtccatgggcgatggtcatatatccgtatgtgtaagttcctgcgatactttttctacaagaacttcgcctttacccttgtgcatttttggtattcctttttcaatggttactcggcccaaaccgcatacgaggattggttcatcactctgtacaacgtgctttacacctcgcttcctgtccttctcatgggtctgctggaccaagatgtgagcgataagctctctttgcggtttcctggattgtacattgtcggacagagggatttgctctttaactacaagcggttttttgtgtcgcttctgcatggagtgctcaccagcatgatccttttctttatcccgcttggtgcatacctgcaaaccgtgggtcaagatggcgaagctccatcggattaccagtcgtttgcagtgaccattgcatccgcacttgtgatcactgtgaatttccaaataggacttgacacttcctactggaccttcgtaaacgcattctccatcttcggctccatcgcactctactttggtattatgtttgattttcattcagccgggattcatgtcctgttcccctccgcatttcagtttactggtactgcatcaaatgccctgcgccagccctacatctggttgactattatccttgccgtcgcggtgtgtctgttgcctgtggtggctattcggttcctgagcatgaccatatggccctcggaatccgataagattcagaagcatcggaagcggctgaaagcagaagagcagtggcagaggcgccaacaggtgtttcgcagaggtgtgagcacgcgccgctcagcttatgcattcagccaccagcgtggctacgcggacctgatttcatccgggcggtcgattcgtaagaaacggagccctttggatgccatcgtcgcagatgggactgcagagtatcgtagaactggcgatagc
